United States Patent Application Publication US 2007/0048818 A1 - sequence listing, part 6

SEQ ID NO: 9532 - DNA, 1155 bp, Homo sapiens
aaaggattgttttttgttgacttagcaaaaacttctccttacaaaacctcttgagtgtgctgaattgtgaacaggaaattgacttggggtaaggggagagagggaaccagggcactcttaaagagaaaaagacccctgggtcgataaccaagtggtcctgggactggatctggctattacatgcacatcaacaatcttatgtacttgctgattaacaaattatatatattctgcatgtttacacaaacagttcttgtgctagagagtccacatcatttaaactttgtgggagaattttgcaaatgatccaatcctagaggcttgtactctttcttgagccccactcacctttcctttgtacctcaaacctcagtctgactcttccagaaatataggggatggttcccttctcttctcccattccctacataaccctgagtttaaatacaaacactcagtttaattgtttcataaggcttatttttggataaagatatttcattttccctgcacattaaacttttatcacacttactgataaaatgccacagctcttgtattatcaactacaagttcagtcttctacttagataccaattaatttctgtttctttgagtatcatggactgaattttgtcccccactcattcatgtgttgaagacctaacccacaatgtgtttatatttgacatagggcctttaaggaagtaattaatgttaaataaggccataagggtggagccctaatccaacaggattagcattcttgtaagaagaggaaggggcaccagagttttcaagcacacaagaaaggccatgtgaggagccacaaaaccacggctgtctgcctggcgtcgtggcacacacctgtaatcccagcactttgggaggccaaagtaggcagatcgcttgaggtaaggagttcaagaccagcttgggcaacatagcgagacccatctctagaaaaaatacaaaaattagcagggtatggtggcaggcacctatagtcctagctgttgtaggggctggggtgggaggatcgcttgaacctgggaggcagaggttgcagtgggctggaatcaggccatcgcactccagcctgggtgacagagagagaccctgtcttttaaaaaaaaaaaaaaaaaaaaaaaaaaa

SEQ ID NO: 9533 - DNA, 17257 bp, Homo sapiens
gtagtcagaaccaactttataataatatttaagcttaaattaaatcctaagtaagatacacagcaaagtacctacttttcagctaattcactagacaaacatagcttaacaaacacgtattagaaggcccctcttcacaatacttacccttaaaagctgacattttataattgtgttgtatagcagcaactatatccttccaaaaatcaaatgttttttgaccattgttcagctgaaaaaataattccaaatgaaacaaacacaataattcagtttttaagcatagtgaaaaatgctggcaaacaattacaatgcagacagtccctgacttaagatggttagacttacaatttttttattttataatggtacaaaagtgatgaagattcagtagaaacttaacttcaagtacccatacaacaattgtttttcactttcagtacagtattcaataaattacatgagctattcaatactttattataaaataggctttcttttgatgactttgcccaacagtaggataatggaagtgttctgagtatgtttaagataagctaggctaagctatgatgttcagtaaactaggtgtattaaatggatttatagtatttttgacttaacgatgggtttatcaggaaaaaaccccatcataagttagggagcatctgtattactatattctgatataagtttatattttacaaaacataataaagttatcattcttctaaatgtaattttaaaaagaaatcttccatgaaaatcactgctacatatacacatacatatcactaaattttaatatagctcatatagcccaaataaaataaaaatttccactcgttataaagtctaaaaattatagaatatttttaaacacagcaaattcatagtgttatataatttctgggatatcagaatgtgttatataacatactatggcatcaatgggactaagaagactgacgccctaaaaccccaaaagctagttactttagaattcagtgcacacttaacctgaatttcgatatgaaagagctgcaagtctcaacagaagagatgaatgaggttccaaatccgaactgtaaattgttttcattaagtttttttaaatcagaaagcaaataaacattacattaaaatatacaaccctatgatcctttgcttccttgaaaatgttaaccagtgacctatctaaacaaagacagactactagatatttatatctaattatacaaactccaaaatatttaaagactgatacactttccttgtagtaactaccgaatgagaaactgactccatcttgtgttattaagatttctacaaacatacccaaactattgctcaatggaaactttcacaacacataaatgtaattctgattcacaaataaagcattacctgggttctattatcaaaatgatagtaattattattattattttgagacgcagtcttgctatgtcgcccaggctagagtgcagtggcgtgatctcggctcactgcaacatctgcctcccgggtttaagcaattctcctgcctcagcctccctagtagctgggactacaggtgcacgccaccacacccagctaatttttgtatttttattagagacaaggtttcaccatattggccaggctggtctcgaactcctgacttcgtgatccgcctgttttggcctcctaaggtgctgggattacaggcgtaagccactgcacctggccccaaaagtagttatttttaaaagacatgcataaaggaaagtgattctgacatataaatctgtttgatgttcataggtcttaagtcctaaggataaactagtataaccagagatctatttaatcttgatatacagtacaaaagaaaaaatttatattcattaaatgatgttcaaaatggtgaatttttaaatttcatccgatttttctattttatattatttagaatgcttaaagacacgctgaattttcttaatcacctctaacttttttattttgctaatgaaactatttattttgctaaaaaaaatgttttgtccagatccaagttctgtatttcttttctttttctaaacttttgccccctctgctggagaataggtttatttttcctgagagaaaaaaaaaaggtcactgctatttaattttccaaaaatatttgaaccaaattcaccatgtttttctttcccagtcagctctgaaaccacaaagaagaaactaagcaaaatcacaactcagaagcaatatataattaggtcctccaatttatgactgactacatatcatagttttaaaaaatgagtccccacttacttttgttaaatagtccaccaccctggcacacagaagagctcctggcaggtcaaagtagttgtcgtaaaagtaatactttcctaaaaaagaacaaaattttaaactgggaacaacataatgctgcatgcatgtgaaatacacaggaatatggctgaagagacactagattttgtttaattatctgaagaagcctccattccaattcaaagtggcaccattattggctgtcattgtcttttaagaaagatttaagctctgagggcaccacaagaaagttaaaagatgatatctagaagttaagcattgtattcgaagatattttagtcatcttaaagaatgtaaaaactaaaaagagtatatgcaaaaaataaaatagaatatgaaaaagccatatgatgttatctatgtcactgaatttcaaaacaatcaatttacctaaccctggagtaccatgaagcgctctatacaatagtgctttttcagattggttggctgacccctcctagagtactgtattctatttttatgccatttaatttcagtataatgtgaaaaaaactggggtgataagtagaatataatcatgccatgtgaagacacagtgtgcttaaaaactgtagagtataggacaggtatattccaagatttcgtggaagagagggatttggtttattctgtatgactttagggtagaattacatttgagcccttctttggcacatgtgacttttggatctgctgtccctgaacagacacttttgatgacccatgtcacatccccttggcctgcgtctgattgcagccactgctatgctaatagcaccatcccaccttggcaaaactgtgtcgattctctttctcccaaaggctctggagcccatgtggcaaacttcacatttagaacaggttcaggaaccagtaaaagaatgccctgcttcctgttccatggacagacaactctaggaggtattctctgcgcttctccttggaagtcccaatggagtccagcaaccattgttccttccatgtcttatcctctcattccttcactcctgactactgggatcaggagtaaccactctgcttttgagggaacccaacctcatacagttccctagagaacgcttgatacaaagaagagtcaaacagaaccaataggtaaagccagattttacattaataataaggtgcttgaatacatcattataatcacctgattttgactccccccccctccccccaatttgcaagctatgtatatgaggttatggaacacacttgtcttgttctttagcgttgactgggcacagtgttcagcatattctaagcactcaatagacgtttgctgaatgaatgaatgagtaatccaataagcaaatagattactttggaatgcagaagtattataaggaaattagaagaaaaccatatgcagaagccagggttctgttcctctgaatattgttttctgcctcttacttcttcctgtaaatttattttaaaatgtataaaaaaaaaatcaaagttttctgttagttcacaaaatggctgtgccagtttgtgtccattctctcagttaaaaatattttggttgatatagtcttcctgtttttcattttttcacagcttgaattgttaggggaacctctcaggctgtttttaattcctaagaaaggttaggatggctttgccagtgtgaagaaccagtgatctggaaaaaaaggaagatgatatgccatgtgcttttctgcctctgctttgctatgctgtaggactgtatgacactccaggactcccaagacttaggacagtgggcaaagcttcccaaggttcattaatctgcactttgtcatatcgcttggcctgacactagactgacccaacttcatggtcagctgtctcaggcactgttggagcaggaagcatcccagcattgccagttacatacccttgcttttctcctcccattcttcttcctttgtgggtactaatagatgaaattcagtctaagagttgaactattgattttgagtaagggctgagttctaattaaataattcagggggaacctaatgagaagagctcattggttttcacccacaatgcaagaggctaaggtcatttgactgttgaacttgggctgaatgtccgctgtgtggacacaagggcttgttcagccttgagctgttaactgggccaggctgcttgcaatgcctcacccaacacccaaactctgacactacaccacatgaaagcttcaacgtccacctctgtatagaagagacagctcattgctaatgaagtgattagtgagcccagttcaacaaaacaagcctctgaatcaagatcaagtcctataaccattaagttttacacagagaaaaactgctccccaagaaactactaccaaccctactccctttgtcttagtggccatggtagaatggcaaatgaaggactgaggggaaaggaacaatttatgttaacaaaggttctcacttctgcaaaggtggtattatctccactcaaagatgagaaaactgatgctaagagtgacttagtaccagagacactttatccagcaaataacagagctaatatgatccaggactgtttggcactaagccccttgtgatttccactagaccaagctgtttctgcataatctaccatttggggaagataagttcaaagggatttgctctctggagatcagctggcaaggaacactgttcttatgttaggtcaacaacctgaaaagagattatcaaacaagttgtcatcaaacatctctacatccctcagtgctttaaatttcctaaatgtactgatagggcatgtactttacaattctgttcttaactctgaggattaatatacttaaaggtagaagaaagctacaaatataaaatcaactggagttcctgaaaataaaggacttatttggcaatatttaccaaaattttaaacctgtatatctttagagcaagtatacttctaggagtttatcctagatatatgtatgaaagtgcaaaatatacattcatgaaaacatcaccacaggcttgtttgtaatggtgaaacaccagatacaacataaatgtccattgctaggagcctgattaaatatatcacgatacaggcactgaattgcagagcatcccagcatttagaagaactaagtgtacctagtgtgtgtgtgctgatgccagaatctctaagatgtaaattgaaaagagcaaggtaaatacataattccttttgtatacctttaaaaaataggacaggagttgaagacaattactcttccttctattcatttctataatatttaaattttctaaccatgtgctgagattaatatttaacgtaaacaaactttaattgggctgtggtatcacaggccatttttttccttcttccatacttctctacatttaaaaaaactcatattattttttaaaggcattagctctccctcattttgcaaaaacaatgggcctctattatgtgtcacaacctgaccactgggtacctggatgggaaacacttccctaactaacccaagtaggtacagataaactcccaggaccattctcagaaggctcctgaccaagtaagtgccagatgaagctactgattccaagaggtggcgctctctagtgggcgaaacagtgggtaaacagatgtgtcttactgagtgaatgctcttttagcagctgggtactttattctttaaaatactctggattcttaataaatttcagagtgaaacactcagctatgtgcctggcttttccaggagaaaggaagagcctgtttacacctgccaacatctggagagacaacagcagttctcgaccatcatttgagtaagaggctttcctcccatctgacttgataggtatacaaaggcattctatatctaaccccagtgtgaaatcttagtttctcctatcaactaattttatcaagagcactcatacttcctgacattttcagctcgctataaaaacaaacaagcaaacaaaacagaactctcaaaagatagcaaatataacaaagcaaacacaataggaacaaggagtaactgcaactattttcaggttactatattctctgaaggagaaaaggtgcaattcaatactgtagtgtgggagaaaactgcaaaatggtcaaaaaaattggaacaaataaaaaaactaataattaggatttttaataaggtctatttataaaaacatttaactattccctattaattatgcacatctatgtctataaatcatttctgaaaaatcatttcatgtttacccatggtgaaactctttaaaggcagtagaaaataaaaatagttaaaatcatctggaaaacaggaaaataagagacaaaggcagatgatactaaactggcagtaaggaagataatcatagaaaataggagtggtaggtaatgtgaatgcctggaggaatcagagatggagaaagaaaagtaaggattgaggacaaaacaaaactgataaatacaggacaactaaggattgtattattcctaagtgctaatctttaaaccagaacaagtacaggtaaaaggagtgccaataaaatcttctgtgaacagtattttgaaccatctgccaaacagaagtcaaatacacttggaaaaaatacatcctattgctataaagctgaagctgctccctttggcatcctgcccagcaggggaaaggggggtcttctttgtcctgacatcaaaggtttagggtacaaaacaaacagggagcggatggtggagctgcctcatttgagtcatacctgagcggcaagccattccagtgtccgacaagaagtgcttccactctttcttgccatatgcctctgccagcacctctggagtcatcatcttggtgccatggcttgccctgattttgagagaggaggcacattgctcattaatggttccttgaatgccccttcctctatcattgtgactgttgatccctgttgccactggagctaacaaaaacatatgtattttttctgttttcaactgggtgcctccctgtttaggattctgtaaagcatttctgtgggcagctgtagcacttacccgctttaatccatcaagtagcaggtgattaggagatactcactctgaggtcaacactggataagataccacccttttttagagaagttgtcgtttaactacacaaataagatgaacatacctggagcaattagaaaacaactgtgtggattagtgggaagctggttctggcagcactggagaaagagcagtaggtaccagagtcaaagcatgagtccatcgggcccataggaggcacaggaagcacctggcacccacaggtggatcattgtgagcacgcaggactgtgaagacaagatgaggagcaacctgcccactcaaggacacagcatggctaaaaccaaatagggaaatcgaagagaaatgtggaaaaacagagcaacatgacaagaaagtaggtattttctgtgctcgaaatactgcttttgtccagttaagagaatcctatgctacagagaaatatggtagttcccccttatccagttttgctctcccacagtttcagttacctgtggtcaacctgggttgaaaaatactaagggcataattccagaaacaaacaattcgtaagttttaaactgcatagcattctgagttctattgttatattttatattttcttactatatctattaaaccttatcattggaaaagacatagtacacatagggatatgtactatccatgatttcaaggaaccactgggggttttggaagctaacctccgaggataaggagggactactgtagttgaaatgttaatgtagttcattataggaactagttgaaatgttaatgtagtttattatgagaaattataatgattgagagtattattctcttggtattataatgtggcaacaaaataatatgaaggaaaaaagaaataaaataagaaaagcaaatgggggaaaatcacaaatgggctcctttttataaaggggttaacattttagaaagctatatgtaaagatcaaagaatcctgaatgggaaatatgatcagaaaaggaatctactacactggttgaaagaaagcatcaaggaggtatgctaataaattcaggagaaactaaaggttagccaggacttggatggagagagacagaccttgtaggaggggtactgggacaaggacagacagatagaacaaagagagaaagaaacaaaattgtagaaagcttttcattcttttaactgtggttgaagatagccaagaacactgtgagaatctgacagaagagttaaaggtcatagacaaagctgcatttacacataccctatctctcaatgcctgagaaataaacatggaaacaaactacaaaataccaaaggtggggctacacctgctctaggtagatgcaccttaggggaaggtcgggggaaagtgtgaagggagtttgcatcatgcaaaaagaatgatgcaacaaaagagagtacatatcaggggtctgggagttctctcctttgattctgatcctgtttgtgtatgtaataaatggtatagcttcatagccatgttgacttgcctgtactattagtactggagaaaaaacagatgctccctccctggtgccctgtgagagacagagcagtgacagcagctgcttctggactgcttgtcatacccttagcaaccgttgagaggctgggcccactcagagaggagagaagtaaagaaagtcagcctggagtgtgggaggaggaagaggttgatgagacttggaacagtccagaaaaacttccaaaaggagctaggacacaacatgatccctgcatgacagggccaaatttggataaatgaagaaagagagggtggtgggtatagaccaccaacccctacccaatacccattctttctttcttaacaaaaagaatcccaattttattttaggcagccacacagtcagctaaaacagtaaaattcctgggctcttttgccagaaggagtggtcaatgagacgtagcaggttataaactttctattgtatgtcctacaaatatttctaatgatgtaaacttaaaggaactagacctttaaatctaatgctcacaaattcatatttaaatggcttaaacaattcatacaaagacatgtagacagacaatctgtcatctgattaattaaaataatcatatttaacccatactgtaagggtcatatgccactcagtaataaagtgtctcagagaaggtaaagtttagacttcacaactaagttttattacctgagaacagtgccattatttgcaagtttaaggaagttcccatcttctagatccaatgccaaacctttgcaactgaaataggaaagtttgattattaatcaattcctatatttagctaacctaagaaataacaacctatattttccaaacatcataatgctaaaaagggattctgccacccaggggaatgatatgttaatcacacaattaagaatatctaagaactgtaaaattaaatatctatcactgagcaggtataaaaggaaaattgttatataggtaaacaaggacagcatatttagtttgtaaaatctttaggcttttcaaaagataaatctaaaactcaaaagagaaaaaaagaacctgaacatcatcccatgactttgttaaaatgtacaaatgttttccactaaataaaacacacatacacacacacacacacacatttatattctacaagttaagcacttagccagtctttcctacactctagaattcgtctcaatttaggtcaggttacaagaacttgccatctggacaaggcatatcattgaaaaccactatggccaggcgcggtggctcatgcctgtaatcccagcactttgggaggccgagacgggcggatcacgaggtcaggagatcgagaccatcctggctaacacggtgaaaccccatctctattaaaaatacaaaaaattagccgggcgtagtggcgggcgcctgtagtcccagctactcaggaggctgaggcaggagaatggcatgaacccgggaggcagagcttgcagtgagccgagatcgcgccactgcactccagcctgggcgacagagccagactctgtctcaaaaataaaataaaataaaataaaataaaataaaataaaataaaataaaaagaaaaccactaaaagaaagtcaaatactgttttagctcctttactgtaaaagacttgtgggatttggggagaaaggtgagtacagattcattattatgaataataaaagcaaagtggtataatggctaccaaataccaagggaattaaacaaaaaatgacagggtactttagaaggattatttacttttgttcagggtaaaacttccagagtcagtaatttcatatagtaacatgttactgtttcttccttttacaaaaatgttacatcaaaaaagactaacaaaatatcaaaagaatgcatactagatcaacataatgtaggtatttttcatgtggtttagtattgttattgattctcactctgtagcccaggctggaatgcagtggcatgatcagcggctcacagcagcctggacctcctgggttcaggcaatcctcccaccttagtctctccagtagctggaaatacaagcacgtgccacctcacctggctaattattttttattttttgcagagttggggtttcgtcatgttgcccaggctggtctccaactcctagactcaagcaatctgcccacctcagcctcccaaagtgctgggattacagaattgccaccacgcctgcctggcctgattttaaactgaacaatttaaagtggcttaggatatttgtttgttttgttatctaaatgaggaagacaaacgaagctttgggaagctgagagtcctaacccaggaagggaattcccagtaagagtcttaggaatgtcgaactaaatgacagaaaagcaattgtcctaattcagacttactcaaaatgtgatgattcctccttttctcttatagttcttaaaagatagtaaaccaaacctttttcttaaagatgcaaattttagaaacagttcttactaacctctgaaactattatgacaaacttaaactatatgaaaatatccaaattagtcacataaactcttagcttattttcacatttaattaggcaagtctaaacttgtttaaagtagaaaacactttaattcattaaatacaaaacttttaatatagaaggcatttgtcctttgactcaatctcacatttcacattccatcttcttagaagagaaagcattacagttttatcagtaacaattagaaccacaggaaatgtacagacttaaaaaaaaaaaaaaaaaaagaacttaccagaaatcccaatcctctggggtcacattgagcaattccttatcgtaccctttctccttaactaggaactgggcaaagctattataaatgagctgcaaataaggggaagaaaaacagattaaatataacacccactattcattcttaatgtcacagacctaaaaccctaatggaattgctgatgggggcaggtaggaggaaggaaatatctgtaattgtgaagttctgcagtataattctccttcacaagcaatttatcatcccctgcatgccccaggtagctgtcccattcaaaattataccgtcagcatacaattatacaaccaaagacaattattaaccctactcctgaattctaatgggttggagatcataatttaagacttgacaaagctttttaaacttatttaatacatcactaagatgataaagatgatgaccactctatccatccatccttggtccattctggccagaaaggccccatgtcagggaaatacatatggggaccaggaaggtgatctaaacaagtcatgatgcctctatcagatacaggtaatcactcttgtttctccacacacacatacacaaaaaccattaaaaaaaaaaaatctaaagacaaaggacaaagaaagcctctggaagcaagtacaataattacaataataaatactctgttgattgctgacagatcttatttctcaacaacaaaaaatgctaggtttttgagtaaaatatctggtttttaagtgctggctaactttaaaagaactgtacataccaaacaaaaagtgcacaaaaggtagatggtccaaccttattctacctcgaagtgttctttggccagtgttgggtaaacttgagcctgagcagaacagttgtctgagtcaacctgcacagtgtccaaaaggacacactgaacaatctgacccttcttctacagatattaacccacaacaggtttcgataacatgtcatacttttagggagaagagggaggcagaggagcaggggaaatctctcctgggtagtgaggtttacactgatacttagatgcagcagttcgctgggtgaatgcagagggaatggggggcaactcaggttcagaaactgaggggcctgcacacagctggagtaggggtgtcggggtctgagtgtcaggatatgagcatggagaaagcaaaggctccttgtgaaatgtcaaatcgagttgctccctgtcataaagctaattaaaatcactacacatgtacttccatccagtgcaatgtgaccttatccaggtcaactgttaattgaaccacattatgttaacactatatatcaacagttcttaaccctggtggtgattcagaaccataggtgacacttcttaaaactacccagagcttccaagcatacagggtagagagggccctctctgaagcacagagaacactgaaaatcactgacctgcatgttttacagatttttattcaatcattaaaaggaaaaaagcaacaaaaaatacactgagtcaccctgtggtacaaagtactatggacaataaaaagtccacatcacgatcctgcttataagaaaccagtgctgcagggctaacagatgtaaaatgcttagagcagagcctggcacaccagcaaatccaatttaagtatttgctattattatgttgtatgctgctaaaaacaaaacaaaacaaaacaaaaaaacagaaaacaaaaacactgccctgacaggtagcgcttgcccatctccacggtgtaaatattcccaccatggcctgtttcaagtcaccaacagcagtttacctgcttgcacaattcctgaatagttaacaattggctttcacaagcccctaagagccagctattgtacaccttagatttgcctctcattgaggcacttttgagtttctccagttattcaagtgattagtctaagatatgggcatgtaattctaaaacacttgaattctcctggaagaaaggagccctttccatcagagacgccaacagggacagcaacagctgtgttccttaccttgtggaggagatttttctgtaacaggagagaagggggccaatggacaaggaaaagaagcagagaaaagcagtgtgaagaaaagcaggggcatctgtactctgaaacccctggtctaggcagaaggcttcttgcagtttgtccttagagtacgctgagtctctctagaagccttcatggcacagggctctccatgacattcctcccccagccttagctatcaccacctcacagtctctcaggagtaataataatacacgttctactgcagttgccaattggtaccctgtggtccatatgcagcctacaaattatgtttggttcccacttaaggttgccagataaaatttaaaaatgcctaggtaaatgtgactttcaaataaaaaacaaataatttttttttagtataagcatgcaatatttgggaccccactctcccactcacacatctacgttaactgactggtatcagacttctgagtctgcaaccttagagaggagaaaccatgtgtcatcctctcttctagaatgcctttcctgaggcctcatgtgagggggacacactcagttctgtgtttgcacaactctgtgcagttgttaaatgcctacaaaactgaaaggagacgcactcacagctctccatgatgcagcccccactgacttctccaccatcttctcctgcaacttgccaccttttgcttgcacccagcagttcccggtgctgttgctcacctcgaggttctgacctttactctaactcctctgggtgaagcactcctctccacctcctcacctgccagctcccggcctttcctctgtgttttcgggcaccatacagacagcaaggtgggaagaagcagaaatccacagccggactacctcgcttagttgccctggatacactttccttctgtgccccgttgcttgatgctctcttaacagtgactaaatcactgttaagtgattaaacagtggtgataatatctacctcacagggacgttgtaaggattaaatccattcatataagcagcatgcttattagaatcatggctgtatcatattctgttattaaaatacctattatctattcagtctatttattgagtccagtatgtgcccagcactaagctcggcacacagaacacacaagaaactgtcacagatactgatggagtcatcacgctgggctctaggggaagtccaacaagtaaacaggaagtgttaatatcatgcagcatgtgctatgaggaatgaagggttttgtggaaaactgaaggtgggcttagaatggaagggcaaactttaagggccaaaaagacttcctaaggggaacgatgtttaagatgaggcctgatgggatgaagagcttctgtgcagagcaaagaggccctccaggcactgttggcagcgtgaagcaagacccaggtcatactacccaccacaagggaccaagactaactcttcagcatttttgcctactgtgtaaggctgcctggaggcctgcgtgttgatctctgtatcctcagctctagcatggtgctcagcacactgtgggacttaaaataaaaaagatttccacaccaaacatgatccaaaactcaataggttactgttttcaagctttaaacatcacttattctccaggtttgcagtaaaaaaacctcttgtctttgagaatcttatattctgaaattttatgatcacctatggacaacactagctctaacatgacagtggtttaacaatattacctccaaatgaaggtaactaaagaggagacacacaaaactgtgaaccaggaaggattcgaaagacacagagggaaggaaaacatgtatcaaagacctaggggaagcagtggccaaagaatcaagcagtaaaaaagccttcttaattctcaatgtgactaaggaaaccagacctgtaaggtaagaaagcaggaaagtgtaacagcagaaaaaggacatttaaaaaaaaatttagcatctgggcatagaaaacacacgagaaattcgggcagccactcttttttgacctttaacgtgtacctgaactggtgggtgcaggaactggcgggtgcccataatggggcacaaccctggctgatgtctgcaccagtgatctagagttctacccataaactgtgaggtttccaaatagtttgggtggtaaccataaaagcaaacacttgtctttgccaaggtactattctaagcattatacatctcttactcatttaatccttgcaacaatcttgtgaggtaaatccaattattagctccattttacagatggggaaactgagaagcagcacaggttaagtaacttcctcgaagtcacagagctagtaacagtggagctggtgtcctaagctaggcagtctggctgaggagtcctcgctttcaccactgtactcataaccagctctttttctgtctggatgcttagatcttggactaaaaaaatctggtaacttttcaaaattagtttccttgggaattgggaaaccaaaggaatagtggagggagggcaattaatttgagtgtacaggtctggaagcatgcatactccatgtccccctccctcagggcacagtgaggacccaaacttcgcagactgttggtaggactggaatgtattcaaagtgcacggagcacgtagtcgatgcgcaataaatatgtattttcttctcttgatagaaggtaaaactagggctaagatcttaatgacttttcaactagtgttcctttcaatacactacactatatactacgcatctctcccagattgcagtttaaacactgatgggtggttgatcgtgcaaacagaaaaatgcagccaaaaaaaatgcaagtaccaaatcaagtggctgtgtccacaatcagctggtgtccagaaagacatgcagagaaagttccacgacgtgagatcttcaaggacagccctagtccccctgaccccgcccctcctcggccctagaaatcaccgattccccagcccggtcttgcgcagtttgcccctccttcgttcttccctatccctctcaacattagctaatggctgaggtaaatgtgccggtccccacggcaccggcgcggagcggaggctgcacacttccgccccttctcgccgctggaggccgcgctctgcggcaagactcggccgccgcaggccccgggcagcgtccgccgttgcccaaacctggaggaaactcaagccccagccgccatggaggttgcgcgcagtgcgccccggagcccgcgccactcaccggggcgctctcgggcaggttgtagcgacacagagtgtggtccaggtcgaatccgaccacgtcgcaggcggccagggagaagtgctgagccatggctgcgcggggagcaccagggagcgcctcggccgcgaagggtgcaaggagctggctggcgggacgctgcgggacaggaccgggccggacgcggc

SEQ ID NO: 9534 - DNA, 1320 bp, Homo sapiens
aaaataaataaaaatagaaaaaaaaactcttcagtcaaatatggtggccactagtggctattgagtacttgaaatgtagctagttagaactgcaatgtgctgtaagcctaaaatacacacatttagtacaaaaaagattataaaatatcccaacttttatattgattttgaaataatattttgagtatattgggctaaacaaaatgtagcattaaaattaatctcacttctttcaatgtggctgacaaaaaagtttaaattaaatgtgcggctcacattttgtttctattggacagcacaggtggagaaggtctctgaacataaaacaccgaataagtatattttccactgggactggggatgggtgctttgggggaagtgcataggtgctgggcagtgttaaaatcagggtgggcgtaggtggcagtgaagggcagtctttgtgcagccagcatggcaagtgagagcatgaatgcctgactgttggaaatgacaaaataaatcatggaatcctgaagtttcagggtgtaaaatgctttataaatcatcatctgacccactaaatgatggaaagaaatgccctggactctgaatctgaatgttttggttccagtctcagctccatcatttattatataggacgtcttgggcaagtcagactcttttcttatatgtctaatgggggacataaaatctgcttgatctttcctggaaggtgatttctattattttaactcatttgaaagcccactctaaattccaaagtactgcaacactatgagatattaaatagatgttgcctattttacaatcctggctcagcccagttctacagacagttggtaattttcaaggtgagtaattaatacacagatactctggcagagaaaatattattagagtgtgtgtgcttatgtctacacacagaaaagagaggaggcaaagataaaacctgtggctcccattttcttcttatatatttttacttattttttctgtcacagatataaccccttaagaaaaatttagatgagtactataatctggcaaaattagttaaatcagactgtgatgagtatgatataacacaatgagctgtagaatgatgttttggctgagccactcactctgtcaggggcagcaccttctttaattgactctcttcaaggaaatgcactacacgtggctctctgttgttacctgtgtgtcatgacccgctgggccattaacccatttgtcttgaatagtcaattctctggccccacgattgtcacgagccacgaggagctggggaacatgggtgagacattctcactcctg

SEQ ID NO: 9535 - DNA, 6271 bp, Homo sapiens
caccgccagcgccgtggtggagttcaagcggaaggaggtgcttgtccgcgcgtgctgtggtctacccagtgtctgtctccggccacagttcgtttctcggtcggtttagtgtccgtgtagccacccaaccgtgtggccgaccattcgcgctttcatttgtccttcgcctccgtctgcgccgtctgtcctagggggaggggaagggggagtcctgccagcacccagctgggccttgcctcgggaggcaaggaccaggacgaggcccgagggctcgcgtctggggcatacttgtgccgctgcaggcgggcgcggcgcgctgcccgggcggggagcatctgccgggagggcactccctcccaccagcagttagcccccaacgggagggcccttgagtgaccacgagcagagccggggattggagaaggacgggaaggcggatcacctccggcgccgcccgccccgcccttctccggctcgcgctggtggagcgcgaccgccacctgctgggcctcggccttcctgcagccggcccacccagcaggggccgtgggagagtgggcgtggggactgaggtaggtagtacgttgccttgttccgcttctctgggcacaccacgtgcaggtttggcagggaaagggggtctggtcgaaagcacaatttgtgagtaaaggctatgtgggcctccctggggtgacagcagaggcctggtgggcagagccatccaggtgcccagcggctttcctcacaaccccctccagcctggggtaggaggatgcttggaacagagcgctctgatgtacacctggcctcggagctcggctctgccggctgttcctgtgtgaccttgacctgaccttcaccctgtggggcccagcttcctcaggggagagtggaggtgctcatcctgctctctggggacctggatgggacctgccagcagggtgcctgggcatcggctgtaattctccttataagaggtctgcattgtacctgttacacaggcgaggctcagtggctcagggaaggtgacggccaggctggccagtgaccccgtgggaacttgaacccaggtcagactgtccccagacctggctctgacaacacacatctggtccacctatgggctgtgtgggacgtgcagcattctaaggtctctggttttggggggtctgaggggcccatctcgcctgcactgaccaacgccctctgcatcctgcaggacaccgtggtggccacgctgcgtgtcttcgatgcagacgtggtacctgcatcaggggagctggtgaggcggtacacaagcacgctgctccccggggacacctgggcccagcagaccttccgggtggaacactggcccaacgagacctcggtccaggccaacggcagcttcgtgcgggcgaccgtacatgactatagtaagaggggctggtggcacggcctggctaggcccccaggaaatgaggtgctcgctcttcatgggcaagcagcaccctacacacatgcacacctggcatggccctctgtggcccaagccacttcccctccaccctctgcccagcacttcctgtgtctctgccaggcctgccctccagccaccagcagggctttcaccatgggacctctctccctgagctgatccatggccgaccctggcagggccccaccacacccccctgctgacctcaccagggctcaccaccgactgcaaacacacatgtcacctgaggctttcctccagcccctggcactccatcgttgcccctaaggcgtcccaagtgcttacggattattgctccagcctcagcagctctctgctaaacaggctggtgtacagaagcagccccgagccaggtcagggcttctgagcccattatcctgcctgactgctgacatgccaccatgctcacctgcttgcagggcacctttcagcagcggccttgcttcctgcctccctccgccacctcctgcagatttctcctgggatcgccttccaaataaaccacctgcatttggggtctgtgtctggtggaaccccaggccatgagtccttcacccctttctgcctggcctggtcctgttcattcctcagtcctccccacctcaccaagcctatggaggccccacttgtcagaggggagacagcctccttgccctggcactgaacaccctgtgtgccagagtgcccctcccatcattgtttccaccacatgagatccacagtggcagcacgcggcaggtacaccgatggcatgacttccagggcttggcctgcggggtcattgggtctgctggaggttcctgcagtggagggtagttctgccatgctctgggggagctgtctggagggctctagtgtgtccttcccagggccttggtaatgtagacctttaaccccccatgcctcacacacacacacacacacacacacacacacacacacaccctgttacccaaaaaacgaaactctgtaaaacattttaaagaggtttattctgagccaggatgagtgaccacagcctggagaaaacacaaacccaagaagccttgagtaagtggtccccaggtccaaggtggtggagttacagtttgcttttatacattttagggagacaggagttacaagcaaggacataaatcaacacacagaaggtatacattggtttggccccaaaatgcagggtatcttaaaacaggggcttacaggttagaggtagatgcagagattctttaatttacagttggttgaaagagttaagctttgcctaaagacttcaggtcagtacaaaggaatgttaaggaggcctgctatgtgtcgcctgatgctatacagggtcaggagggaaagtaaaccacgttatacctgggtaacttaaaaaaaaaaggtttttaacaagattttatggaccaggcatagtggctcacgcctgtaatcccagcactttagggagaccgaggcgggtggattgtttgagtccaggagttcgagaccagcctaggcaacatggtgaaaccctgtctctacaaaaaaaaaaaaaatacaaaaaattagccaggcgtggtggcacatgcctggattccaggaacctgggaggctgaggtgggaggatggctggagcctgggaggtcgaggctgcaatgagatgcaacagagcaagactctgtctcaaaaaagaaaaccaatgttatggtttgtagggtgtttcttaacccttgcctggcatggccttaggtcctgtttataatttggtatcttactgccacaaagagtccgatctgtcagtcttatgatctctgttttaatgttaatgccggtcagttgtgtccaaactccagcaggaagagggcctaataaggcaagtccaccctgccttcctgtcatggcccagaattctgtttttaaggtttttctggtgtcccttggccaagaggggatctattcagttggtccggggactcaagattttagtttcagtttacaactctatacacaaacaccccatacacacaggcaccaataccctatgcacagacaccacacaaatgcatactacacacttacacataccacacacacgcataccatgcaagcatatcatacacacagacaccccatacaatgcgtacacatgcacacacacacaggctgcctcaaattgagaagggttccttggactttcagttcagtaaatcccaacgtttgaacattggtgctaacttaggaccagccccaggcctgttgcatggcactgtatgtgtgaaagtgcgtgtttgcaccagtgtgagtgcagggctgtgtctgggaagaggtgtgctacacatgaggaagcagccagagcagcttggtggtcattgttgtgcccctacctgcagggctggttctcaaccggaacctctccatctcggagaaccgcaccatgcagctggcggtgctggtcaatgactcagacttccagggcccaggagcgggcgtcctcttgctccacttcaacgtgtcggtgctgccggtcagcctgcacctgcccagtacctactccctctccgtgagcaggagggctcgccgatttgcccaggtgagcccatacctattgcctgtctggggaagattgaaaggccaagggacatgggggcacagggaggcaggtgacactgcctcttggcccaaccagcacagagtagactgggtggagtcctgagcccagggccaggaggtacagctgtgtgcacagaagaggcctgggagagctcacagtgggcagggctgggggctccttgggcctctctttttttcccctttccattcttggtatctttaaaatgtattttcaaaaatgcaagagcaatactgggtaaatctgcatatggtgactcggaagaatcttcctggtggattggtgagagtggcttgcagagatgttggtcccacgtgactccctttgtgcaaaagcagatcttccctgacagggatctgcaagtgtgcagagatcacagtgctgtccacagtggtgccctcagggggaggcaggaaacgcttccactttttactttttgtaactaggtttgctagaaagcgtatatttatatttgtctttggaaaataatgactagaaatagaaggcataaaagtaataaatattcattaaagaagatgaggcatgaggcatgaggcgtgatcccttctacccataggcgccagtgttgcacatcgtggtgttctttctgggatgtttctcgtaagcacttattaagttgacttgaaactgcagcacgcatgttctcgcatgccgctctcccttgcagagcagcccgtggcgcctcctcttcaggggccatctgccagttctttcgggtggttctgtgcccgcatcagctcctggcagccacccgtgtccagcccacgagggagcccacccttggacatatctaagctccccgaccacctccttggcctttaatgggagtgggatcagagacagaggggcgacaagacagagggccccggggggtctcatggggggcggggcaagagcaggcattgctgaagttgggtcacctgccctctgtcaggagcaacgggggcctgaatcccagtccagcctcagcctcactgtggtctcacctttctccccagtttgtaaagctgtgaattagggacaggaaccctgaacaattttgagagtcacatgagcatttggaagtgggctttgtaggggaaagtgaggaggcccaggaggctggtttttgctgtggtcacttgtgggcctgggagagcccagccctgctctggcccgcccccatctcgccatctgtggaacttttggtttcaagcagctgcaagagttgccaagaggttgaaagaattcagctgcctgactccaggtcctggcatccccaggagaggcccctctttcccaggggctctggtcaaagtcccagagcctggcatccccaggagaagaggctcctctttcccagaggctctgctcaaagtcccagggaggccccctggtcctgcatgggctggggcaaccatgctcccgagtcttgtggctggggttcagtgctctgaccaggggacaccagggcagggtggacctctaaaccctgtgcactgagggaggagtgaggggtccccagagcactgctggggcagctgggagcagccagggaggagcctgggagacattccggcggctttgttgtctgagtgagggaggaaaggggagtaaagggttgagtcagggcctgcctggggcttttcctgccaccaaactgaacctcgaggccctgggttgccttgacctccagctcccaggaacaggggcagctggtaacatgtggcctgagtggaacggggcagggcagggctggggcaggtgggtgggtatgaaggctctgaggggtggaggacagggtgctcgggggggctgctgtctccaggcccagttgggggctgttccaggacttaggctgtgtgggaatctctaccctcaggccattacaggccggtccagctgcctggctaaggtgttcccctgtgcccccctagatcgggaaagtctgtgtggaaaactgccaggcgttcagtggcatcaacgtccagtacaagctgcattcctctggtgccaactgcagcacgctaggggtggtcacctcagccgaggacacctcggggatcctgtttgtgaatgacaccaaggccctgcggcggcccaagtgtgccgaacttcactacatggtggtggccaccgaccagcagacctctaggcaggcc

SEQ ID NO: 9536 - DNA, 6274 bp, Homo sapiens
caccgccagcgccgtggtggagttcaagcggaaggaggtgcttgtccgcgcgtgctgtggtctacccagtgtctgtctccggccacagttcgtttctcggtcggtttagtgtccgtgtagccacccaaccgtgtggccgaccattcgcgctttcatttgtccttcgcctccgtctgcgccgtctgtcctagggggaggggaagggggagtcctgccagcacccagctgggccttgcctcgggaggcaaggaccaggacgaggcccgagggctcgcgtctggggcatacttgtgccgctgcaggcgggcgcggcgcgctgcccgggcggggagcatctgccgggagggcactccctcccaccagcagttagcccccaacgggagggcccttgagtgaccacgagcagagccggggattggagaaggacgggaaggcggatcacctccggcgccgcccgccccgcccttctccggctcgcgctggtggagcgcgaccgccacctgctgggcctcggccttcctgcagccggcccacccagcaggggccgtgggagagtgggcgtggggactgaggtaggtagtacgttgccttgttccgcttctctgggcacaccacgtgcaggtttggcagggaaagggggtctggtcgaaagcacaatttgtgagtaaaggctatgtgggcctccctggggtgacagcagaggcctggtgggcagagccatccaggtgcccagcggctttcctcacaaccccctccagcctggggtaggaggatgcttggaacagagcgctctgatgtacacctggcctcggagctcggctctgccggctgttcctgtgtgaccttgacctgaccttcaccctgtggggcccagcttcctcaggggagagtggaggtgctcatcctgctctctggggacctggatgggacctgccagcagggtgcctgggcatcggctgtaattctccttataagaggtctgcattgtacctgttacacaggcgaggctcagtggctcagggaaggtgacggccaggctggccagtgaccccgtgggaacttgaacccaggtcagactgtccccagacctggctctgacaacacacatctggtccacctatgggctgtgtgggacgtgcagcattctaaggtctctggttttggggggtctgaggggcccatctcgcctgcactgaccaacgccctctgcatcctgcaggacaccgtggtggccacgctgcgtgtcttcgatgcagacgtggtacctgcatcaggggagctggtgaggcggtacacaagcacgctgctccccggggacacctgggcccagcagaccttccgggtggaacactggcccaacgagacctcggtccaggccaacggcagcttcgtgcgggcgaccgtacatgactatagtaagaggggctggtggcacggcctggctaggcccccaggaaatgaggtgctcgctcttcatgggcaagcagcaccctacacacatgcacacctggcatggccctctgtggcccaagccacttcccctccaccctctgcccagcacttcctgtgtctctgccaggcctgccctccagccaccagcagggctttcaccatgggacctctctccctgagctgatccatggccgaccctggcagggccccaccacacccccctgctgacctcaccagggctcaccaccgactgcaaacacacatgtcacctgaggctttcctccagcccctggcactccatcgttgcccctaaggcgtcccaagtgcttacggattattgctccagcctcagcagctctctgctaaacaggctggtgtacagaagcagccccgagccaggtcagggcttctgagcccattatcctgcctgactgctgacatgccaccatgctcacctgcttgcagggcacctttcagcagcggccttgcttcctgcctccctccgccacctcctgcagatttctcctgggatcgccttccaaataaaccacctgcatttggggtctgtgtctggtggaaccccaggccatgagtccttcacccctttctgcctggcctggtcctgttcattcctcagtcctccccacctcaccaagcctatggaggccccacttgtcagaggggagacagcctccttgccctggcactgaacaccctgtgtgccagagtgcccctcccatcattgtttccaccacatgagatccacagtggcagcacgcggcaggtacaccgatggcatgacttccagggcttggcctgcggggtcattgggtctgctggaggttcctgcagtggagggtagttctgccatgctctgggggagctgtctggagggctctagtgtgtccttcccagggccttggtaatgtagacctttaaccccccatgcctcacacacacacacacacacacacacacacacacacacacacaccctgttacccaaaaaacgaaactctgtaaaacattttaaagaggtttattctgagccaggatgagtgaccacagcctggagaaaacacaaacccaagaagccttgagtaagtggtccccaggtccaaggtggtggagttacagtttgcttttatacattttagggagacaggagttacaagcaaggacataaatcaacacacagaaggtatacattggtttggccccaaaatgcagggtatcttaaaacaggggcttacaggttagaggtagatgcagagattctttaatttacagttggttgaaagagttaagctttgcctaaagacttcaggtcagtacaaaggaatgttaaggaggcctgctatgtgtcgcctgatgctatacagggtcaggagggaaagtaaaccacgttatacctgggtaacttaaaaaaaaaaggtttttaacaagattttatggaccaggcatagtggctcacgcctgtaatcccagcactttagggagaccgaggcgggtggattgtttgagtccaggagttcgagaccagcctaggcaacatggtgaaaccctgtctctacaaaaaaaaaaaaaatacaaaaaattagccaggcgtggtggcacatgcctggattccaggaacctgggaggctgaggtgggaggatggctggagcctgggaggtcaaggctgcaatgagatgcaacagagcaagactctgtctcaaaaaagaaaaccaatgttatggtttgtagggtgtttcttaacccttgcctggcatggccttaggtcctgtttataatttggtatcttactgccacaaagagtccgatctgtcagtcttatgatctctgttttaatgttaatgccggtcagttgtgtccaaactccagcaggaagagggcctaataaggcaagtccaccctgccttcctgtcatggcccagaatttgttttaaggtttttctggtgtccccttgaccaagaggggatctattcagttggtccggggactcaagattttagtttcagtttacaactctatacacaaacaccccatacacacaggcaccaataccctatgcacagacaccacacaaatgcatactacacacttacacataccacacacacgcataccatgcaagcatatcatacacacagacaccccatacaatgcgtacacatgcacacacacacaggctgcctcaaattgagaagggttccttggactttcagttcagtaaatcccaacgtttgaacattggtgctaacttaggaccagccccaggcctgttgcatggcactgtatgtgtgaaagtgcgtgtttgcaccagtgtgagtgcagggctgtgtctgggaagaggtgtgctacacatgaggaagcagccagagcagcttggtggtcattgttgtgcccctacctgcagggctggttctcaaccggaacctctccatctcggagaaccgcaccatgcagctggcggtgctggtcaatgactcagacttccagggcccaggagcgggcgtcctcttgctccacttcaacgtgtcggtgctgccggtcagcctgcacctgcccagtacctactccctctccgtgagcaggagggctcgccgatttgcccaggtgagcccatacctattgcctgtctggggaagattgaaaggccaagggacatgggggcacagggaggcaggtgacactgcctcttggcccaaccagcacagagtagactgggtggagtcctgagcccagggccaggaggtacagctgtgtgcacagaagaggcctgggagagctcacagtgggcagggctgggggctccttgggcctctctttttttcccctttccattcttggtatctttaaaatgtattttcaaaaatgcaagagcaatactgggtaaatctgcatatggtgactcggaagaatcttcctggtggattggtgagagtggcttgcagagatgttggtcccacgtgactccctttgtgcaaaagcagatcttccctgacagggatctgcaagtgtgcagagatcacagtgctgtccacagtggtgccctcagggggaggcaggaaacgcttccactttttactttttgtaactaggtttgctagaaagcgtatatttatatttgtctttggaaaataatgattagaaatagaaggcataaaagtaataaatattcattaaagaagatgaggcatgaggcatgaggcgtgatcccttctacccataggcgccagtgttgcacatcgtggtgttctttctgggatgtttctcgtaagcacttattaagttgacttgaaactgcagcacgcatgttctcgcatgccgctctcccttgcagagcagcccgtggcgcctcctcttcaggggccatctgccagttctttcgggtggttctgtgcccgcatcagctcctggcagccacccgtgtccagcccacgagggagcccacccttggacatatctaagctccccgaccacctccttggcctttaatgggagtgggatcagagacagaggggcgacaagacagagggccccggggggtctcatggggggcggggcaagagcaggcattgctgaagttgggtcacctgccctctgtcaggagcaacgggggcctgaatcccagtccagcctcagcctcactgtggtctcacctttctccccagtttgtaaagctgtgaattagggacaggaaccctgaacaattttgagagtcacatgagcatttggaagtgggctttgtaggggaaagtgaggaggcccaggaggctggtttttgctgtggtcacttgtgggcctgggagagcccagccctgctctggcccgcccccatctcgccatctgtggaacttttggtttcaagcagctgcaagagttgccaagaggttgaaagaattcagctgcctgactccaggtcctggcatccccaggagaggcccctctttcccaggggctctggtcaaagtcccagagcctggcatccccaggagaagaggctcctctttcccagaggctctgctcaaagtcccagggaggccccctggtcctgcatgggctggggcaaccatgctcccgagtcttgtggctggggttcagtgctctgaccaggggacaccagggcagggtggacctctaaaccctgtgcactgagggaggagtgaggggtccccagagcactgctggggcagctgggagcagccagggaggagcctgggagacattccggcggctttgttgtctgagtgagggaggaaaggggagtaaagggttgagtcagggcctgcctggggcttttcctgccaccaaactgaacctcgaggccctgggttgccttgacctccagctcccaggaacaggggcagctggtaacatgtggcctgagtggaacggggcagggcagggctggggcaggtgggtgggtatgaaggctctgaggggtggaggacagggtgctcgggggggctgctgtctccaggcccagttgggggctgttccaggacttaggctgtgtgggaatctctaccctcaggccattacaggccggtccagctgcctggctaaggtgttcccctgtgcccccctagatcgggaaagtctgtgtggaaaactgccaggcattcagtggcatcaacgtccagtacaagctgcattcctctggtgccaactgcagcacgctaggggtggtcacctcagccgaggacacctcggggatcctgtttgtgaatgacaccaaggccctgcggcggcccaagtgtgccgaacttcactacatggtggtggccaccgaccagcagacctctaggcaggcc

SEQ ID NO: 9537 - DNA, 374 bp, Homo sapiens
agcccaggtgacccctgctttgtgaccatgatgtcctgtaccctgccctgcgccctgtgctcctggcactgtctttgctgccctgggtctgtcactccggtccccttgggctccatccgtgggcagctcagctggtgctgttccctgtccttgggcactagctggacgctgggcccaggccagccccctgtgaccctgcttgtctgccacctgcagatgtggccgaggaggcgggctgccccctgtcctgtgcagtcagcaagagacggctggagtgtgaggagtgtggcggcctgggctccccaacaggcaggtgtgagtggaggcaaggagatggcaaaggtaagccctggaaacgcccaagggaggcctgc

SEQ ID NO: 9538 - DNA, 374 bp, Homo sapiens; identical to SEQ ID NO: 9537

SEQ ID NO: 9539 - DNA, 147 bp, Homo sapiens
aaaaattagccgggcatggtggcgggcgcctgtagtcccagctactcgggaggctgaggcaggagaatcgcctgaacccgggagttggaggttgcagtgagccaagatcgcgccactgcactccagcctgggcaacacagcgagact

SEQ ID NO: 9540 - DNA, 134 bp, Homo sapiens
cggagtctcactctgtcgcccaggctggagtgcagtggcgcgatctcggctcactgcaagctccgcctcccgggttcacgccattctcctgcctcagcctcccgagtagctgggactacaggcgcctgccacta

SEQ ID NO: 9541 - DNA, 1031 bp, Homo sapiens
gtgttcaagactttttttttcttttctttaattttcagaagtttgactatgatgtgtgttggtaaggatttcttttggtttctcctatttgggtttgctcagattcttgagtctgtaggtttacatcttttgccaaatttgaaaagttttctgtcattattcctttgagtatattttcagtcccaccctcttttgtaactctttctggaactccaatgacaagcgcattagatcttttgttatggttccacagatccctgagcatcaattcattttttctcattagacttaaatagactttcaagggactcaaaacagagtctactttctctcttttgtttagactgggcagaataatggcctccgaaagatgtccacatcctaatctctggaacctgtgaatatgttaccttatacagcaaaaggacttggttgacatgattacattaagaaccttgtgatgaggagattattctggattataatgggcccaatgtaatcacaagggtccttagaaatggaagagagttagaaggagatatgactatggaggaggttggagtaatgtgatgtgagaaggattcgatcctctgttgctggctttgaggatgatagaaggggactacaagccaaggaatgtgggctgcctccagaagctaaaaaaacaatgaaaaggattctttcctggtgtctccagaaaagaatacagcccttccaacaccttgattttagcacttctgacctacagaactgtaagataaaaaatgtgtaatactttaagcttctaaatttgaggtaatttgttgtgagaacaataagaaacaaacacaggaatccctattgtctgtcttcaagttcactgattcttttcttttctttttttttttgaggtggagtctcactctgttgccccagctggagtgcagtggtgcgatctcagctcactgcaaactctgcctcccgggttcatgccattctcctgcctcagcctctcgagtagctgggactacaggcacctgccaccatgcctg

SEQ ID NO: 9542 - DNA, 220 bp, Homo sapiens
tcgctctgtcgcccaggctggagtgcaggggcgcgatctcagctcactgcaagctctgcctcccgggttcatgccattctcctgcctcagcctcccgagtagctgggactacaggcgcccgccaccacgcccggctaattttttggatttttagtacagacgggatttcaccgtgttagccaggatggtctcgatctcctgacctcgtgatccacccgcc

SEQ ID NO: 9543 - DNA, 840 bp, Homo sapiens
tttttttttgagatggagtctcgctctgtcgcccaggctggagtgcagtggcgcgatctcagctcactgcaagctctgcctcccaggttcacgccattctcctgcctcagcctccccagtaactgggactacaggagcccaccaccatgcccggctaattttttgcagtttactattagtagagatggggtttcaccgtgtagccaggatggtctcgatctcctgaccttgtgattcgcccaccttggccttccaaagtgctgggattacaggcgtgagccaccgcgcccggcctcaaccagcttccactcttatttaaatgtttgagagcatggaatttacccatgacaatgtctgcctctccccacctttgtcaccaccatggatacacatttcctccaaagatggcaggaaaccccaaacacagttgatattataggtcctggacagaccatatgctatttattagctaaaacatttacttgttcccttcatacttttcttaaaaattcaaccaattatataaaaatatatgccaaaagtcttgctgatgagtatactgggcccagtcattccataggatcaagtaaaaatgagtggttaagtgagtacaatagttaactcactgcatattatggctgttttctacattattgagtgtttcttaatttgcaataaccacaatcattactggccttacactgtaaaatcatgtaatatacactgcttgctttgagttgactcctcctcctccttcatttatctgcctaaattttattgggcttctcaaatagctcaggccaccacctcttcagtaacccttccttaacctaaagtacc

SEQ ID NO: 9544 - DNA, 156 bp, Homo sapiens
agtctcactctgttgcccaggctggagtgcagtggtgcgatctcggctcactgcaagctctgcctcctgggttcacaccattctcctgcctcagcctcccgagtagctgggactacaggcgcccgccaccacacctggctaattttttgtattttt

SEQ ID NO: 9545 - DNA, 172 bp, Homo sapiens
ctctgttgcccaggctagagtgcagtggcgcgatctcggctcactgcaagctccgcctcccgggttcatgccattctcctgcctcagcctccagagtagctgggactacaggtgcccgccaccatgcccggctaatttttttgtatttttagtagagacagggtttcaccgt

SEQ ID NO: 9546 - DNA, 113 bp, Homo sapiens
tttttttgtatttttagtagagacagggtttcactgtgttatccaggatggtctcgaccccctgacctcgtgatccgcctgcctcggcctcccaaagtgctgggattacaggc

SEQ ID NO: 9547 - DNA, 1257 bp, Homo sapiens
gaaaacgacaaggcacataagggctgaagaccgcgcctggcacgaagcaagtgctccgtcattgtggctgctgcggccgtggaatgccctccatttttgccctgctcacatctgctccaaacactccccagcctgtgtgggttctcatacatgagccccatcagtgcctttgcttctgaaagcctagaggtaatgacatgctcggcgagctcaaactcctggaaactctcccaggaaaactcgggatgcgaagatgtactctagaagggaacagatggcttctgtttttgtgtgtggtatggaatggatggcaaaaggtcagtgagctctgtgggagacagcacggtgccaaggggacccgtgtcaccttcctcacctctgcctctgtctcagacacctgctgacatatgaccaggtgcagatggagcagtgccagccacgccctgggatgaggagatcaagctggtgctcagccccagcaaggcggggtcagtgacatccctatatgtgaatggggacacatttgtaagcagagacatgaagtgacagaatgagatcacccacagcgacatctgccactacccaggtgactgggccaaaagtgggctgtggaattggaacaaaatacaacagattgtatttagatattgactccattctaatatatagactttgcaaggtaaacatttcaaaattgctctttactatgagaaccaaatgttttctccagatattttgatataaatttttgatgaaataaatgcatcctaggaaaggccttgctcccatattaggaaagtaaattctatatccaaggacactgggtaactacagccttgaatgttcatgggctacaataacgacgattatgagggaaccagattctctctcctttactgtgtttgggtagatcctttcatcagtatgtcaaggctactgaaatgttagtgtaatcttgatgtcagacaggggacagggtctttgcttggaagcctcccaaatccagggcctgtggaaagccaaagcattccctctgagatttcggcgaatcttttgtctcctaattcccctttcttttttctttttctagttttttgttttttttttttttaggcggagtttcgctcttgttgcccaggctggagtgcaatggctcaatctcggctcaccacaacctccgcctcccaggttcaaatgattctcctgcctcagcctcccaggtagctgggattgcaggcatgcaccaccatgcccggc

SEQ ID NO: 9548 - DNA, 128 bp, Homo sapiens
ggcgcagtcttggctcactacaacttctgcctcccaggttcaagcgattctcctgcctcagcctcccaagtagctgggactacaggcacacaccaccacgcccggctaatttttgtatttttagtaga

SEQ ID NO: 9549 - DNA, 302 bp, Homo sapiens
gctgggcgcggtggctcacgcctgtaatccctgcactttgggaggcggaggcgggtggatcacgaggtcaggagatcgagaccatcctggctaacatggtgaaaccccgtctctaccaaaaatacaaaaaaaaaaaaattagccgggcgtggtggcgggcgcctgtggtcccagctactcgggaggctgaggcaggagaatggcgtgaaccctggaggcggagcttgcagtgagctgagatcgcgccactgcactccagcctgggtgacagagccagactctgtctcaaagaaacaaacaaa

SEQ ID NO: 9550 - DNA, 1348 bp, Homo sapiens
ttcttattatttcttgtcttttttgatctaatttatcttttatattgcagaattctccctcctttggctagagggatccttttctctctaatatctgtctttctttttttagttgatctttccacccactcccctttctcctcttctccactgagaataatctccctgtcttttattcacttcattttctatactcctatttatccattttgattgtttatacctactatttgtattcgaatgacttcatttttcccaccctgtgggtcagtttgtgacttttggaattttccacaggtacctgtacaacttgatatttgaaaacaggattcatcaccatatatccccagcccccgttttctttttaaacaggcctcattgcgtaattcctttgccctgaaaagtgtcaccacctttatatttttaccccagccttggagttatctttttctgctctccattctccatgtccaaaaacttgctgtcagtccagtttttaatcagttttctccttgaggcttgatctcccatttctctcatcccattatagcttttcatgtagatctgaggcccaggttactgtaattcttttttttccaatttccttgctcccaggatccccatcttgtataaagtttctaaggtgctcctcctcaaactccatttttacaatatccgtattgtaaaattttcattttcagtaacacccagtagataatttttcaaagacgatcctcctcaaacacccatttttacaatatctctattgtaaaatttcattttcactaagtaacacccagtagataattcctatggagcagtggtgttccaaattctccattacctctatgcctaatattcatcagccttcattactctctagcatattcaccttgattcaacagattcaaacttcctacagccttctactgatgtcttacaagctcttgcctctgtgcctttctcatgctattctttttgcttagattgctctttggtcccagctcatgttcatcactcccttcaaagcctttcttcctttatatcttctgactgagctctccctgattgacatcacctcatgcgatgacctccctcattctgtgctgcctcagcacttatcttttgagtttgtactgtggtccatgtacttactaatatgttgctttgtaattattttctagcactctgtgttacagtttcatatttgtatttatttccaaaattaaattgtaagctccttgagggcaggaataataacttttacatttgtatctctgcacccccgagtgcctagtatagtgctgagcacatagtaggcgtttaataaatgcttgttgaagtattg

SEQ ID NO: 9551 - DNA, 3784 bp, Homo sapiens
gaaataataatcattttatgattgatgggccaaaaaaagcaatcaaagtcttacgtcatagaggaccaccttttggatcataaattctttccctataacattccttctctgcctctctatggcccactttgaccactaacaacatcagaattatctacatcaatttcattgagccattggtgaatgaagacacccatcacttgtcatgttggtttccaacagtcctttcgattatcctttattttcttatcctcccttctcttgtttcttttatttataagttaccattcctagtttctttgtacttgaaattttaagaaaccagaaacaagtaaatctggttgtatctagatctttgctctgtgtttcagttgtgccttaccctctgtaagatactgattcttcctggggccagtattaccttgtatgcaaatattacatatgatgggtgcattgtcagagggaaaatatatgtgtatgtacacatgtgtatgtacacacacacacacacctgccatacactttagaagaacgcttctcttctattccaataaaaagtccttttagcaatgcaacatattaacaaaattgggtgcattcagggtagtatggccatagaccagagcaacacattgaaatgtatacagatgtactagctaaagtctctttatgtgtcagtattaagagtaatatgtagccagattacttaaatctcagaattactaagcatgtggcataaatttggagaaaataatatgactagaaaaattagtgttatattgggtgtgagaaaagactgtgtcttgaaagaattatcaaagctgatacagcacatatacagaattagccaaatggtataagacaatagaaaaaggctgtggattctttgaggacatcactagaaatcattctttgtctcaagttcacactcttagcatagaatattattgactaggctgtatgacattttgagctcttaactgtgaatggcattcattaagctcctttatcctatagattctatctttatgttcatctgaaatgaactattcatcagtactttctcctcccatcctaagcttctcattttaggaactgacatgataaggtggttctttcataactctaatgccatccaacatagccctgggagaggcatgttaggtttcagagattttctccatggagcaaggtgcagtgctagaatatggtggttgattcccaaacagagcagttaactttactcttggttctgagtctccaaataataatagccgacgtttattgagcacttactatgtgcccaaccctgttatgcctttctcaggctcatgataaatgtattagtctgttctcatgctgctattaaagacatacctgacactgggtaatttataaaggaaagaggtttaatggactcagttccacatggctggggacgcctcacaatcatggtggaaggcaaggaggagcaaatcatgtcttatacatggatggcagcaggcaaagagagaacttgtgcaggggaactctttataaaaccgtccgatcttgtgagacttattcactatcacaagaacagcacaggaaagttctgcccccgtgattcaattacctcccacttggtcccacccacgacacgtgggaattgtgggagctacaattcaagatgagatttggatgggacacagccaaaccatatcaataggtattattttatcccccattttataaatgaggaaacggaggcttagttgagtgagctgaccaatatcacccagccagtatgtgataaaactgattctgacccacacagtttgattctagagcctgttctgactactgtgctaaggtgtgtataatgaacatggtaattctaaccagctttttaaaaatatgtagcgcttgtcatgagaggtactggggaaaagaatgtgcagtagagtgcaaatacattacaattactggaaaattggtggaaaatgctttttggggttacaattatatcatttttaagtgttgatgctttgtagtactacaaagctaaattgtgcaaacaaaacatatttaacagagtaattgggaggataaagcaataataaattcaaatatatttttctccaaactgccaaagggaaagtagaattgtggagggaaatgaaatatccatgtaccaggccaggcagatggtcagttaggatgacaatagtaagttcatctacagcataaaatgtgaaatgctttcatcctcattgcccatttccaactaccattctgtttctcctctattgttcatggtttttcaaacatatctttgatttttcaacccccctttttcattaatctgttcttaaaacttctttttactggctttcatacttagcattccagtgaaatgttcttagactcaccagtggacaaataataaggcctttttttattattatttcttgtcttttttgatctaatttatattttatattgttgaattctcccttctttggcttgtgggatcctttttctctaatatctgtctttctttttttagttgatctttccacccactcccctttctcctcttctccactgagaataatctccctgtcttttattcacttcattttctatactcctatttatccattttgattgtttatacctactatttgtattcgaatgacttcatttttcccaccctgtgggtcagtttgtgacttttggaattttccacaggtacctgtacaacttgatatttgaaaacaggattcatcaccatatatccccagcccccgttttctttttaaacaggcctcattgcgtaattcctttgccctgaaaagtgtcaccacctttatatttttaccccagccttggagttatctttttctgctctccattctccatgtccaaaaacttgctgtcagtccagtttttaatcagttttctccttgaggcttgatctcccatttctctcatcccattatagcttttcatgtagatctgaggcccaggttactgtaattcttttttttccaatttccttgctcccaggatccccatcttgtataaagtttctaaggtgctcctcctcaaactccatttttacaatatccgtattgtaaaattttcattttcagtaacacccagtagataatttttcaaagacgatcctcctcaaacacccatttttacaatatctctattgtaaaatttcattttcactaagtaacacccagtagataattcctatggagcagtggtgttccaaattctccattacctctatgcctaatattcatcagccttcattactctctagcatattcaccttgattcaacagattcaaacttcctacagccttctactgatgtcttacaagctcttgcctctgtgcctttctcatgctattctttttgcttagattgctctttggtcccagctcatgttcatcactcccttcaaagcctttcttcctttatatcttctgactgagctctccctgattgacatcacctcatgcgatgacctccctcattctgtgctgcctcagcacttatcttttgagtttgtactgtggtccatgtacttactaatatgttgctttgtaattattttctagcactctgtgttacagtttcatatttgtatttatttccaaaattaaattgtaagctccttgagggcaggaataataacttttacatttgtatctctgcacccccgagtgcctagtatagtgctgagcacatagtaggcgtttaataaatgcttgttgaagtattg

SEQ ID NO: 9552 - DNA, 564 bp, Homo sapiens
actcaccccagctgctcttgagcttggatagttatacattttggtgacttctgactctccttccacctccccactgtacactgtggtacagatagttggcactatcctagttatggcatcaggtaggagaaggagacgaagatgctttaggaagataaaaaccttacaaagaatgtatactcatcttttttggcccattacaatactgctttctcaggttcttaacagcctgtgcaaactccctgactagatggtctgtcactcctatcattaccttgcacccatctctttagatggcctcagcacctcactcgttattctccatctgtttcttgccattagtttatatgactttaatatccacagtggtaatctaataccttacctcacaggttttcattcttttgaactctggtgcactccatctgtaatccatgtctataatctaccaacaaagatgtactcttaaactcagtatcaccaggcactatatttcatctttgaggcttttgttataccaaggaatactatataaagtaatgagactggtttaaagtaacatgc

SEQ ID NO: 9553 - DNA, 2100 bp, Homo sapiens
gctttccatctctgagttggccttcaacgttcaagaaaatggatatattattttttttccttttctatttccttcaggaaagactaggtttcagtacggtttcaaataaaagcagtggagtaattttctctcccgtaggttctccctcagccccctgaatcataagaatcaaccctcattccttttctcccaacctctcaggtgcatttgctgagtcactgcatgttggcctgaaacagggtccatgtgtctccccaccatttccaaggcatggagatgggaagtgggaagtggggagggtgagctttggactgaacacccaaggcccacggccaccagctacgaggcttcccacaggcttgtctttctctgtatgtctgtcacaggattccagttctccagtcaaaccaatgatgcttctttggccctgtgctccctgaagtcctccctttatatcataagtaaccaaggagtccttcatgcctgatttttgaatgctagtaaattttcaacatcctcatccaactctattccccaggcttccctgctccaaactccaaatcacctgaaaaatatgttccagtcaccccacctctgcaccaacttgagtgagtctgaactgagaagcattcattccaatttgtcatatttgtggaggatttttcttaaatggtcacaatatttctagttccatgggctcttccaaggctttgtcacttcccatccagaggcagtttctgtgttcttccccttgaacgtgggaggcatttgtgacggctgccttgaccaacagggtggaagagacactgcatgacctctgagtgagtaaaggccaggcagcccttgcttgactctcttccttgagatgtcatccttagaacctccatgttgtgagaaagctcaggccactgggaagaacacgtgggtgttcccattgttgacagcctacagacaatatcaaacaccagacatgtgaatgaatgagcctccaggtaggtccagccattgagccagccctcagtcaactgtaccagctgtgaccccagacatattggggtagagacaattataatatctctactctgccttgttcctgttgctgacccacaatctgtgagtctactgctggtcatgaaaaaaaacaaattgaactttcattcattcattcattcattcattcattcatctatccacctactcatccatccaccaaagacacacttactgatatcccactgtgtatcatagactataagcatgggggctgcagagataaagaaagaagtgaaggtcctgaggagctcacagacatactactcattctgctgttgacccatcaccccaagtaacaaaagagcacccctcctaatatcctgcttcagattttcacagtcgctcatttatgcttgcatttctgctttgccattccaactaagtgcctttagaataagggatcaactttttttctcatggtgcttagcacggttttataaatttaacacatgtttgatatagcttgttaatttttgaaaaatcagtccatatactgctagaggttttcaaggcttcaagtaaataaaagaattacattttggaaaaataacttaataaatgaaatccttgtgccaataggagaaaaagaagaaaggtatgaatgatttttgggtccttattagatgactggggcctgctatttcatttactcttcataggaaacttatacaaattatgacaatcctcaaattgcagactttaagataaactggctaaattgaatgactatcaaatgtggcacaaggagtttagccaatgccagggactcttttgcagccactgtggtgactccagcacatgaagatgccacccagatgacatttgctttcaagacctttgaacaggctgccttgaaaagaatgctttccaatgtgcaactctatatcttctgtggctctggtaagtgaggactttacagcttatgttcactctttcctgtaatcatttccaggcctcgtggaaaagtgttaccaattaatactcccattatagaactggaacaaaacaaagtgcaggacgtgggacaaatcagttaaatatcctcga

SEQ ID NO: 9554 - DNA, 2096 bp, Homo sapiens
gctttccatctctgagttggccttcaacgttcaagaaaatggatatattattttttttccttttctatttccttcaggaaagactaggtttcagtacggtttcaaataaaagcagtggagtaattttctctcccgtaggttctccctcagccccctgaatcataagaatcaaccctcattccttttctcccaacctctcaggtgcatttgctgagtcactgcatgttggcctgaaacagggtccatgtgtctccccaccatttccaaggcatggagatgggaagtgggaagtggggagggtgagctttggactgaacacccaaggcccacggccaccagctacgaggcttcccacaggcttgtctttctctgtatgtctgtcacaggattccagttctccagtcaaaccaatgatgcttctttggccctgtgctccctgaagtcctccctttatatcataagtaaccaaggagtccttcatgcctgatttttgaatgctagtaaattttcaacatcctcatccaactctattccccaggcttccctgctccaaactccaaatcacctgaaaaatatgttccagtcaccccacctctgcaccaacttgagtgagtctgaactgagaagcattcattccaatttgtcatatttgtggaggatttttcttaaatggtcacaatatttctagttccatgggctcttccaaggctttgtcacttcccatccagaggcagtttctgtgttcttccccttgaacgtgggaggcatttgtgacggctgccttgaccaacagggtggaagagacactgcatgacctctgagtgagtaaaggccaggcagcccttgcttgactctcttccttgagatgtcatccttagaacctccatgttgtgagaaagctcaggccactgggaagaacacgtgggtgttcccattgttgacagcctacagacaatatcaaacaccagacatgtgaatgaatgagcctccaggtaggtccagccattgagccagccctcagtcaactgtaccagctgtgaccccagacatattggggtagagacaattataatatctctactctgccttgttcctgttgctgacccacaatctgtgagtctactgctggtcatgaaaaaaaacaaattgaactttcattcattcattcattcattcattcatctatccacctactcatccatccaccaaagacacacttactgatatcccactgtgtatcatagactataagcatgggggctgcagagataaagaaagaagtgaaggtcctgaggagctcacagacatactactcattctgctgttgacccatcaccccaagtaacaaaagagcacccctactaatatcctgcttcagattttcacagtcgctcatttatgcttgcatttctgctttgccattccaactaagtgcctttagaataagggatcaactttttttctcatggtgcttagcacggttttataaatttaacacatgtttgatatagcttgttaatttttgaaaaatcagtccatatactgctagaggttttcaaggcttcaagtaaataaaagaattacattttggaaaaataacttaataaatgaaatccttgtgccaataggagaaaaagaagaaaggtatgaatgatttttgggtccttattagatgactggggcctgctatttcatttactcttcataggaaacttatacaaattatgacaatcctcaaattgcagactttaagataaactggctaaattgaatgactatcaaatgtggcacaaggagtttagccaatgccagggactcttttgcagccactgtggtgactccagcacatgaagatgccacccagatgacatttgctttcaagacctttgaacaggctgccttgaaaagaatgctttccaatgtgcaactctatatcttctgtggctctggtaagtgaggactttacagcttatgttcactctttcctgtaatcatttccaggcctcgtggaaaagtgttaccaattaatactcccattatagaactggaacaaaacaaagtgcaggacgtgggacaaatcagttaaatatcctcga

SEQ ID NO: 9555 - DNA, 2096 bp, Homo sapiens; identical to SEQ ID NO: 9554

SEQ ID NO: 9556 - DNA, 1477 bp, Homo sapiens
ttacactagataaacctgtattttaaaagtattcaaaacaaaacacaacacacttacttagagcaataataataaatattacagaataatataatccttcccgttctaaaatatttttaaagaatatgataactttatattgggtcctagataccatactgtatttagggaatttaccaagatagagctggctttattgtaagtcaagcaaaatgaactggcgttcttgtaagctgggttcagtctactattatcggttctgtacagtgtctcctcgtgtgctagtgaaacaggatggggggcgaggaacctccttcccatcttttactagcctgagaagtatcttttcaatattttataattttgcctttggcaaagggctgcttatctcctgggaattcaggcacattttgaagatttccccatagccaatgagcacagaatgattattctcacaaaagttcttaagaaatgtcacctctcttgtgtctccttctttctagataagctctccccacacctttctcctgagacagtctagaatctcccttttatattgctgcagaaacacagactcatttccatacacgtttactccggcacctatagcatagatcaatgctatggacacgtgctgttgtgtgagatttaaaagtaaattttccattcagagatttttaaaaaaaaaaatctggtcatagcagccattagtcaacttagtcttcattgccctcctttttatttctaagcatgattcattcaggatataagattgcatgggcaatcattctagtattaaacaccttggaaagatgaggaccatcttcttcctccctgtgtctgcttctctttctgttccatcttctttccttccccatttctttcactctttccttccctgtccaggtcctgttgaatgctgactcaggccatctgtgctttccaggccagctctttcacttattgctcatgattttggccaagccatttaaaatgcctaggcctcaatttcctcatgggtaaaggaagctaataaggtctacctaatggacccacccaataaaattcttttgagaattaagtgggaaaatgtatattaaacacattggaaattcttgtctacaggggatatgtcatcaatgggagttgttactgctgctgtttctactagattccaaattgagaagaaaatctttctaaagcaagtatcaagtagagtcaggaggaagcatctaaagtttctgcaaggaccatggcacatcttcttgaacactgctgggatgattatttggataataggagttggcatcattttcattattttataggcaatatagaaatatatctgcactcttctttaaaaaaattactaatacataatagttgtatatttttatggggtacaagtgatattttgctacctgcatagaaagtgtaatgatcaagtcagaatgttaaggttgtccatcacctcgag

SEQ ID NO: 9557 - DNA, 1477 bp, Homo sapiens; identical to SEQ ID NO: 9556

SEQ ID NO: 9558 - DNA, 585 bp, Homo sapiens
acagatagagaaactgaggtccagacagggaagggactagccctggggccccacagtgccttttggtgagaccccaggccaggcctggagagagacaggcacacacacactaactagtaattcccactcaacagatcaacagattcctcttgcaggaacaagaggaatttcgtttcccttccaccaacaaatcaaagatctgttatggtttcatgctaaccgccactgatgcttggttggcttttctctcttgcttatcacagtgacatctgcagactaccctggcattctgtagaaagtgtgcactgcctggggtgggagttgatgggggttaggattaggtagaccccctctgtgctcccacaatctcctgaggaccctgagccccagtcctgaccacatcctcctccagccattcttgatgtgtctccctgctcaattgggacttcttgagcacagggacccttgtacggaattatctttatgtgactgtcacatatcttggaggtgaacttctggagagggggtcagagggagaggcctgggtgagttgtgctgccttccgtcatccccctcagtctcgag

SEQ ID NO: 9559 - DNA, 585 bp, Homo sapiens
acagatagagaaactgaggtccagacagggaagggactagccctggggccccacagtgccttttggtgagaccccaggccaggcctggagagagacaggcacacacacactaactagtaattcccactcaacagatcaacagattcctcttgcaggaacaagaggaatttcatttcccttccaccaacaaatcaaagatctgttatggtttcatgctaaccgccactgatgcttggttggcttttctctcttgcttatcacagtgacatctgcagactaccctggcattctgtagaaagtgtgcactgcctggggtgggagttgatgggggttaggattaggtagaccccctctgtgctcccacaatctcctgaggaccctgagccccagtcctgaccacatcctcctccagccattcttgatgtgtctccctgctcaattgggacttcttgagcacagggacccttgtacggaattatctttatgtgactgtcacatatcttggaggtgaacttctggagagggggtcagagggagaggcctgggtgagttgtgctgccttccgtcatccccctcagtctcgag

SEQ ID NO: 9560 - DNA, 1116 bp, Homo sapiens
catcatggctccccatgccaggttcctgcttctcatggtccttctcacggttgttgggagttttcctatctctccagtgctcttggaagacggtttatggtatattatcaagggaagcctgaaagggaaactgctagttgtgttcaccacccaacgagatctggagtcctgccttctttctacacttagtcacacagacctagccccacagccctctagttgcagggcttgattgagaaaagtatgcagaggccgagagtgtgtgtgaccgaccacatcatagccatcgaatgtttatcaattcccattcagtgtttcagtgaatcttcagtagtctctgtgttctttgttagtcacctggtttagatgttccatgaattgttcttcctcttctagcaatgatgaccaacgtctatgaattgttaatatttaccggggactgtgctaagtgctttgcatgtgtatttttcatttggtgttcgctataactaggagtaggttgttttgctcctttcacagaggaggaaacaggcttggaaaaggtcactggcatgcataaatcccaagctagtcagtagcagagctagtcggtagcagaactagtccgtagcagagctagtcggtagcagacctagccggtagcagtgctagtcggtggcagagctagcctttgaattgaggtttttctgactccagattccatgccttaaactgacttcctgaatgtatccactgggataaatttctcaaaatggaattggtagatcagatgatatatgagtttaaaatatggatagatagttccaaccggtttttcagggcattgcctggtgtttaccattcttgtgtatgtgcttatttgcaccagcagtatttatcttttagttttgcttttaaaaacaaatcttgtaggccaggtgcggtggctcacgcctgtaatcccagcattttgggaggccgaggtgggaggattgcctgagcccaggagtttgaaactggcttgggcaacatagcgaggcccaatctcccaaataaataaatgatatttttaaaaacaaaataacacagagcccttggaaatcaaaaatctagcaggaggaaaaaacatctctcgag

SEQ ID NO: 9561 - DNA, 731 bp, Homo sapiens
ccatattgtctggttcaggtaatcacttgttatcagagttcttccaaaatgaaaacgttctgatttgtactttctctcttgaaggtgacttgagtagtcttgaattctccatctgttctggagactttggttgaatacaggcactgaggacacaaaagtggacgggggcttctggttcctgccagggagctgctcccaattgttccacggacccccatgagattcctgaaattgcgtgcaaattattgtgcatttaaacatttttcctagggagggagagtgtttttattcagatcgtcagtgggattgaaactcttaacaaggaagaattgatctagcacacatctacatagttcttcagtatttacccaacctcctagtggttacagtaggagggactctttgaaaaaggtttcttggccaggcgcggtggctcatgcctgtaatcccagcactttgggaggccaaggtgtgcagatcacgaggtcaggagatcgagaccatcctggctaacacagtgaaaccccatctctactaaaaaagaaaaaaaattagccgggcgtggtggcgggcacctgtagtcccagctactcaggaggctgaggcaggagaatggcatgaacccaggaggcggagcttgcagtgagccgggatcgcaccactgcattctagcctgggtgacagagcgagactccgtctcaaaaaaaaaaagaaaaagaaaaagaaaaagg

SEQ ID NO: 9562 - DNA, 387 bp, Homo sapiens
ctgaatttatttttcaagtaaaatggtaatagacatatgtggtatgactacctagttatgaaggttaaaagcagaggtacattgtttagtacctattgcacgtatacgtggtaaaaatgtttgtggtttccaaaaaattcaggagtgtggtaaccttgggtgagagtgaaggaacacaggagtttctgggaacgggcactgttctcgatgactttggcagtggttacctggtgtctgccttgtagttatttgtgatagttaatgtcttacagacttttctgttatgtttcacagtttaactattttttaaaaatgagtgatgtctttggccaaaaacttcaaattgagttacttttatcttctattttaaaaagctggagtcacatt

SEQ ID NO: 9563 - DNA, 760 bp, Homo sapiens
attttctgtaaattaaagttgtttttactaaattatgggccatattttttggatgtgtgctctgaaactaatactgcttgcaaggagaaaaaaaggagatgcaagtgtgtctaatatattggatacataaaagctggagtatgcataatcgtcttgcaagagttcttaaatctctgtatataaactgtttaaaagtaaattaaaattattccttaatgaaatacaaatctgaagtcacttgaataactaatcattttatgacccatgcagtgaatttttaatgcctacttctacctgattattttagatatgtctgtgttgtaaattaaaagctacataaatcattaatgtgttgatacagatcagtgaactgcttacactatatgtgattccttaggacatacaatgtctgattcacctccctccctttcaattatatggctgccaggctctttttctctattcattttttgcaaggtcttatttggtagaactgcattccagggtctttatcactttcccaagaggaactgatgtttccaatcaaaagagggctcacactgcaaaaatgaacaggtcctaaatccaagagtgtgaacacacaatctacgagggagaagtttgcttttatttttgtttttgttttagtaatctatgctcccaagaaactgtagcaacgaaacataacctctgcacttttttaggtcattgcagcctttttaccttccttgaaaatgtcgtgccctttctgtacctcgag

SEQ ID NO: 9564 - DNA, 760 bp, Homo sapiens; identical to SEQ ID NO: 9563

SEQ ID NO: 9565 - DNA, 1234 bp, Homo sapiens
ggtgcttccaggtaagagccagctgtggtaaaagcagatgggtatgtacttgatctttgtttactgtgtggtactcttttttgtttcagccctgacgggggtggctggtggagctcctagtgaaatgcactgaagtctctgcaggggggctgcactagctccaagtcttagacaggcagaaatgtgatctctttccctgtcacactcctgtactggggctcataactctccatgcagatgcacactgtcgtctgtctccaggccatagtgtgattgagaaccgcagaagacacctctcccctggctctccactggagtggtttcacgctggaactcctcactcagcccaatacagacagctctgtggctttcctgttctccaatgtggtaatgctgctgattgaagcagagagggagaggggctccatcttttggcacatgcaggtgggtgtcagctgtggtgctgtcagctggctgggtcagcctaagctcagacccgatggacctaatagacatttacagattattctacccaacaactgcagaatatgtatttctcatctgcacgtggaacattcccccaaattgaccatatgcttggccagaaagcaagtctcaatacattcaaaaaaattgaaatcatatcaagtatcttctcagaccacagtggaataaaattagaaatcaataccaagaggaaaaaataaggagtttttcaataggtagaggaaggagaatggtgccctggggttaagaacacattaacaaaagtacaagaggcatgaaaatgcagtgtgtaaaggaagagaaaagttaatgatgcaccttcatggtaaaggggtacaaagccggaggtagtggactggacgaggcaaacctccaagcccagagcctgtaaatggcctgctcgatggtgtatgggaagcctcaggcagtaacagctgagttggtggcagaatacgcaggtggtgggaaccccagggttgatcacagacctgtcagcatgggctctcagaagggctccagctggcagctgaaacggttgggtgggagcagggtggccgtgctgctgttctttcgctgaggaaggcggactccctcagctggagcaagggaggctggcagctgtgggatgcgtggcccgattgcacttcccttttataggagtggaggtgtatttcgctgttggggacatgcaaacgtgctcagcctccccctctctccctggcctcga

SEQ ID NO: 9566 - DNA, 1234 bp, Homo sapiens; identical to SEQ ID NO: 9565

SEQ ID NO: 9567 - DNA, 378 bp, Homo sapiens
ttctgccccaggaatgcctataagttacaggtttggtcactttatgtattccatatttcttgaagactttgttcatttaaaaaaaaaaaaattgggggctgcgtgcagtggcttacaccggtaatcccagcactttgggaggctgagatgggcggatcatgaggtcaggagatggagaccatcctgtctaacatggtgataccccgtctctactaaaaatacaaaaaattagccgggcatggtggcacgtgcctgtagtcccagctacttggggggctgagacaggataatcgcttgaacccgggaggcggaggttgcagtgagccgagatcgcgccacttcactccagcctggggacaagagcgagactctgtctaa

SEQ ID NO: 9568 - DNA, 378 bp, Homo sapiens; identical to SEQ ID NO: 9567

SEQ ID NO: 9569 - DNA, 427 bp, Homo sapiens
aggtgaatgtcttctccacatatccattagcagagtgcatgttcggtaccaaagggtggtgtgatgcaagctctctttcctgctgctctcgtagtttcctgtgttgctgtgaaatagaaggtgggataaggcacttggttctccaggagtactttcctctaactgccaccgtttttaagcttctcagcagtgtttttcacaccctgctttccgtgtgcatgtctgtcacttatgattaaactaaacacaagtttttccatttttaatgctgctatgcttctatacctctggtaagtttgatcatcgtgttctgggttgggagggtgagagttcttgtgattccctttgtacttccctgacactaacacatgccctgcacacccatcatgttgcatcaggtccatggtggtggtataaaattctcgag

SEQ ID NO: 9570 - DNA, 11601 bp, Homo sapiens
gaaagcaaagatatcctgttagtggatctaaactctgaaatcgacaccaatcagaattctttaagagaaaatccattcttaacaaacggcatcacctcctgttctcttcctcgaccaacgcctcaggcatccttcttgcctgaaaatgccttttctgccaatctcaacttctttcccacccctaatcctgatcctttccgtgacgatcctttcacacagccagaccaatcgacaccttcttcgtttgattctctcaaatctccagatcagaagaaagagaattcgagtagctcgtctactccgctgagtaatgggcccctgaatggtgatgttgactactttggtcagcaatttgaccagatctctaaccggactggcaaacaggaagctcaggcaggcccatggcccttttcaagttcgcaaacccagccagcagtgagaactcaaaatggggtatctgaaagagaacagaacggcttctctgtcaaatcctccccgaacccttttgtgggaagccctcccaaaggactgtccatacagaatggcgtaaagcaggacttggaaagctctgtccagtcctcaccacatgactccatagccattatcccacctccacaaagtaccaaaccaggaagaggcagaaggactgctaaggtgaattgtcttctccacatatccattagcagagtgcatgttcggtaccaaagggtggtgtgatgcaagctctctttcctgctgctctcgtagtttcctgtgttgctgtgaaatagaaggtgggataaggcactttggttctccaggagtactttcctctaactgccaccgtttttaagcttctcagcagtgtttttcacaccctgctttccgtgtgcatgtcttgtcacttatgattaaactaaacacaagtttttccatttttaatgctgctatgcttctatacctctggtaagtttgatcatcgtgttctgggttgggagggtgagagttcttgtgattccctttgtacttccctgacactaacacatgccctgcacacccatcatgttgcatcagtgtccatggtggtggtataaaattctcgagcttatctcctcttttaaatactgagtaaatacataagctttttctaagcttatgtatttactattaccactatgatctcagctttatttaagagcaatttaaaatgcagttcccataggtgtctttttttacctctcctaagaatatacaggcttgcctggattaagaccctatgatctctatgtagactgacttaaaatccaatggaatgaacaaaaatatttaggatgcttattggtagttgccccttttacacacttgctcccccaacttcaagcatttagcgatgagaccagaccaatgtgagtgtgtaaaggaatatagtagatttcactttgcaagtcctaggtagtgtcagacactaagactcagtagtccgtccgttgtaggaatctgtgtctttttttggaggactctttttctgtagtagtagttgttgttgttcatctgtcaagaaaaaagttttcctttttgtggctctcaaattggggtatagggtaggagacaaaatgaggctgtatttcactgttagtgagtaactaaggcttctccctccctccctgtcctgtcagtcttcagccaatgacttgcttgcatcagacatctttgctcctcccgtctcagaaccttcaggccaggcgtcacccacaggacaacctacagccctgcagcccaaccctctggatctcttcaaaacaagtgctcctgccccagtggggcccctggtgggtctaggtaggtgcctagagataaaattaagtatgactcttttgcttttgctcataaaatgatgatgcatcggaagagatttcatactcccagagggttttacagcataagatttgagcatcccagggagcccttctcccacttctactatacaaccccacatccatttgatattcttgacttgtaactcacatttggctcctcgaggcagcatgagacaagaaattcattttcagtattgtacttacttgaaccaactggtcatggtttcctgaaagacaattgtaagggattctaaactcagaccagcttcagtagcaaaacagggttgacataagagaggcttgtctgtcaacatgcatgtcttccatgtcttttgccataatagatcgaaggcctatgtcctttcaacacatagccctcttagaaggaatatatgcccaagaaggatgtaagttaagtctgaagcaagaataagtcatagagtgaaagtcctaggttctgggcccagctgtgttcctaggtgtatggtaagggtagatcaggcacacatcctgatcagtctctgagcacttctgccataggagctccttgccaatattttggctagcttgagtgttttactgaagctagaacataagtcctagaaagccaaagttgaaaaaagagagaaataagggaagagatggaattttatcagacagctaggatgcattgacgctcttaattcctaaatgtgtcattagcttgtgtgagccgctgatcactctgtggtaggacagtgggaaagtccacttgactgagggctggccttgctattcttagtccatagcctatagttcttttcagactccatggtacagttttcagaaaccctgacaatagtttttgctgtcctgctatggactctatttttcttctcttggcacctctacaaactccaaatggactctggcttgggaggtggaggactgtagacgaggaaggactctcctctccttcggtaaaatctgaccagggatcctggctttctctgcctcctgcagtcagtcatcaggatccttgttttgttttcctctctgtctctgttgttttcctacaaaggaaaatagtttggttcttttacaagaaatctgtttaatcatatctagaatagggtggccagaggaggactgttactcaactgctgagtggcagaaatccgtgagggtatgaaaagccagcttgtcccaggtctctgctcgcatttaccccatcaagaggctctctctaaagacttcatgtctcttgggggcttccccctttctgcgttgctcttttccttgcacccccaagtggagctggttggtacccttccctcacagaagaccagagtgcttgcaatgcaatgtctgcagcgagatcacatcacagagctttttatctgatatcaatgcccttaagaatttttgcagccaatatttaacaagtcagcctgaaaatacagctggaccctataactgtttatttattcagacgaagtgaagctttttggctaggtgcccctgttgagggcttggggtatacaactgcagaatactgatgattgttccaagtttggacatgggactcaaactgagctctacagtatagtccctgtccactagcagggatcctcagccaaaccatggaaggttgtaggtctggcttccgctagacccagctgggggactgtctcccctggagaactgggggggtggggagagggtattgtagaaagctgagccctcagattcaacttgcttgtattttaatctagcctcagaaggtaataaaattaatgttctatacccatgtcccctttttccttattccttgcccctactttgtcaatgtgttcaatgtgttcaatgtgttaaaacacaatgtggggatttggtgggtaggaatgaagactggtataagtatatactgggaaagccttgaattcctggcaaatgtaatatttttctctcctttttttttttttttttttttttgagacagagtctcactctgtcacccaggctggagtgcagtggtgctgtctcagctcactgcaacctctgcctcccaagtttaagtgcctcagcctctctagtagctgggattacaggcatgcgccaccacacccagctaatttttgtatgttagtagagacagggtttcgccacgttggccaggttggttctgaactcctggcctcaagtggtcctcccactttggcttcccaaagtgctgggattacaggtgtaagccactgcgcccagccctaatatttttctcttttacaaataccattctcactaatatgatattttcctaaatgaagacaagttgtccaacatgaaagatgataaaattctaccctcctttttgcacagctaactggtggaaattattagcaagtgatctggcttctgttaatacaatttaattgaatgtgttttaaaatacaagcaacaactttgttcaaactaaacccatttttagagcctgtattgtagaatataacttttctcttgatttgttatgaaaggagtatattcttcagtgaaaatgaagtctaatttctgtatccgtgaaataagtatttgaattaacatagcatttgaaaattaaaattgccccatgccttgctgccaaggaagcagaacaggagaatggggtgccggatttagagccagtgtgcctgattttcagtttctaccatcccagactatgaccttcccaattttaatgaatattcttgcacccagtttcctcacctccaaaaagcatgctgattaagtgaaatggcctgttctgaaacccaccactctctgtgagtacaccatgtgtgcccatggccagatggccagcatgcatgatgagaatggagtcaggtaataccaatgtctcagactaagaagctcgaagatataatcttgtgctccatcactcctaaataccattttcaaagtattccctcttggaaacataaacgtccctaacccaggtctgaagaaaactttcataactaaagaatgccatgcaccaaagctcaaagcaagtagatttcaagagcgaagcatcacccactaatagatatgaggctgaatttaggtttccttcttagcggtgagtttaactgaatcattaatgcacttggaaagaggcaggaaagacagtgccctgtatattagaacaagatgcagggagcgagcctctcaagaatcagaggccatcattggagaggcctggattctggcgatttaacgaattcctgatgacatagcaaggtcgtaggagatggagccattcaccacaaagatcagatgccccaacacaggccattagttaccttgaaagatttttgtttcccattgtcctctctcctcttttaaattctctgttctaacttctggcaaggtttagcaaatggcacatggcaggaagcacttttatttgaaacagtcttcctaggataacatcctttcttccatttttatatataaacgtctaaaactatcttggcattggccaaactttatcttccctttatgtatatagctgtatcagtcttggcagcaataaaaagtgaagaaactttgaaatggtttcttcaggatgcaagcatgttgaggtcttgtgcacatgtgtgattgctggtttccataagactccagacgtgagccagttgccaaatgaaaagatcaaatctgtgactcagagagtccaatggattatcttaattaactacatcataatcagcatggttcatgcataaaaatatattcacttaaataagttcctgctattaacaggctctgttctagttgtttgagatgtatcagacaactagtgtctgtatgataagggcttatttttttgatgagtagatacttatggaccgtactacccttctaatcaggaaagttaaaaagacatggtaggaagaacatgggcctcaaaatgcaaccagcatttgaatgctcactatacagtgttagctggctaacttttacagtgattaatctgtcatattcttcccatatcagcctcagggctcaatggaggtgttagctgtggagaggctttccagagagttgtgctctctgaaattcaagaatcttcttcaagcttgactcctgataagtatttttcttcctcttacttcaggtggtgtaactgtcacactccctcaggcaggaccatggaacacagcatctttggtcttcaatcagtccccttcaatggctccgggagccatgatgggtggtcaaccttcaggttttagtcagcccgtcatttttggtacaagtccagctgtttcaggttggaaccagccttcaccctttgcagcctcaactccccctccagtgcctgttgtctggggcccttctgcatctgtggcacccaatgcttggtcaataacaagccctttggggaatccttttcagagcaatatttttccagctcctgctgtgtccactcagcccccatccatgcactcctctctcctggtcactcctcctcagccacctcccagagctggccctcccaaggacatctccagtgatgccttcactgccttagacccacttggggataaagagatcaaggatgtgaaagaaatgtttaaggatttccaactgcggcagccacctgctgtgcccgcgcggaagggagagcagacttcttctgggactttgagtgcctttgccagttatttcaacagcaaggttggcattcctcaggagaatgcagaccatgatgactttgatgctaatcaactattgagcaagatcaatggtaagccactcaccactctgcctactgttccaacaactatcgccactgccacatggacctaaatgagttccccaaatgaaccctcttcccactcgccaacagctttgctcttgcttctgttggtaatcagggttacggagacaacttaaccatttaccttttggtgataactatttaccttagtcatttctgaggactgacccaatgctgccctctagtgataaatcttaaaagggctgccatgagctattgaaatgtgatgactggtgactcttggagggctgtgtaataaggcgtcatccatgtcccatcagcttaaaatgaggggattctgaatctcttccacttcagataaatatgcatggctttctcttccgagaaggataataattattggggtacctagtatttggtgttgatttttgttccactgatgtaaatttcaaaagtatagaactaaacttcaaaaataagctgactcggggactggcctatatttggggaaagcttgtctactgattgcctggattttttaccttctagaaccaccttagccagctcccagacaagtttccctgccagttaccaaatctactgacaatgcatttgagaaccctttctttaaagattcttttggttcatcacaagcctctgtaagtatgaactactagaagctcttctccaaagtacatgccacatagagctccagcctcctgaattaaccttgcttttataatagcttttatttatttatttatttttttaagacagagtcttgctctgtcggccaggctggagtgcagtggtgcaatctcagctcactgcaacctccacttcctgagttcaaaggattctcctgcctcagcctcctgagtaggtgggactataggcacgtgccaccacacctggctaatttttgtatttttttgtagagatggggtctcgccatgttggccagactggtctcaaactcctgaccttaagtgatccatctgccttggcctccctcagtgctgggattacagtcatgagccaccgcacctggctataatagctttttgatggtaaaacatgtttagctaagatttgtcaccaagaaccttcacagtataaacattcatttaaactggagaaagattatttgcacaagaactattatcttctgaatttgagaaataatatcacatagaaaacatccttcatatctcacttaacctgacccatgaaagcatttcgggagaaaattgagccaaaatactgtcttgaaaacctttcaaaaatttaagttcttaattttccaacaatatttctatagcctgtgaaaataatacttcccatttcggggaggcaaatgaaatgcatctgaaccttgattttcacataaataatatacactgccatctgcaagcagatgaaaacaaaacactgtaagccccatataatgtttgattggctgattggcctatgacctaagcgatttttaaaagaattttggaagtcttcattgcgatttttttcttatgactgtaactgtatttattgactagatgattttatcttcttaggtggcttcttctcaacctgtatcttctgagatgtatagggatccatttggaaatccttttgcctaaattctgtaagtagaagatcctaataagcctgtctcaggggtttttgtgagaaagggtgacatggaataaagagtgaaattttaattttagaattgggaagagggtaaatatctataatttaggagtaatcgacaggaaaatctctactgagatcattcaataatgactaggctgggcacttaagaatagaattcctaaacacatccaaaaatagtaatatacccttggggatgtggatttttatcttattccatgttcttggtttttcagttctgtgtgggaagtaaaactcaaaacaacacatcacaggtttctaacctttttactttcatattgaagtggttgcaaaacaacctagtaataatttggtttcctataaagggttcagattccattgactttctgaagccaccaagtcagcaaaacagattatgatcattacttctctaccatttaactgtgagcaatctcaaagttagtctgaaagagtctgatggtattaaatctgaaagttttaacaactattaaagatctccttcataggcagtaggagctcaaaatgagtctgaaggttgattcttctgtctcatgaactttatcttagataagtgattaggtagaatcaccctcagctgaaatcctgggagggctcagtgtaactctttctctacagaaggtgacagcaactttattctgatctcaaaagactgaatttagtagggaaaggaacgctctccccattttagagcaggtaggccagctggtaggggtagaacaatagaaataatgaaaaacaacaacaacaacaacaaaaaccaagcccattttttttccaatcttgtctcatccaaacaggactactaaactgtgatttggctcatctagaatgtaattatttttaatagatagatatcttaaacgtggcgaaaacaataagattgagcttataggcatctggatcattttccctcaactccagttctacaatgactgtgtttcctgtagtacctttccataaactgcttcagagaactgggtaaatcattaaaaatgcaaattcctgggtcctactgcagccctaaggaatttctctttggtgccaaggaaatgcttccttttaacaagagtgcaggtgattctaaaggtaataaagcagtaagtagatatttaagagctagaagtcttaccagagatcattctcaccttccattcaaggggagatatacccaaaccaatagaaggagtaaactacactcagagtcaagatggattgtatggactaaattgaatgaactagacttctctttggaggtccttccttctttaggtcatgaaggaaggatagtttaggtcaacctgctacatcaatagattgggtaaggggaactctcatgggataaaataactaacattgttgagcacttgcgctaagcattttattagatgctctacatttatcatcttcatcaatcctcacatcagccctaggagatactattactgacatctttaataatgacttgatatttaatacattgatattcagttcaaaaattctaaccacaagtttctttcttctccatacctctctaggaacttggtctgcagaccatccagaggaataaaaaggttggccttagtagtcaaaaacaaagctgatagccagacacgttctgatttctgcccttgttccagctttgacgtattatctgttgccttatttctcattgcctcttctacttgtaaaatgcttttcactttctgtctaggttaaagctaaactgaatctatggctttaaataaattaagatcctaaactctctagcttaagtgtaaatgaagtacagtagtttccctactgaaccctgcctcttgtgtccctggaaccttctagaacacctgccttctaccctctggttgggagatgcagccaccacatcccttcatatcatactgttttgaataaattttcaaatccttattgttcagagttgtttgggggttctgtttcagagcataaaacctaaaggttatagtagaacaaggcaccttcttaaaagaaatcttgcttcagaccatcagttacagagaatttctaaagtaaaattgaagcaactacaacttctccttagacactttggaatctaaccacttaaggacctttttaaagagatagcttctcttctttctgaagatcaatttctcccaaggccaagattgtccttttctcccatttcttgctagctattgcaaatgagggaagaacattattcatctctcctccccttttttttctgattcttttttcagtcagttttgctcctgggttcaagtagtattaccaccctttcacaagcaacagactctcacagggcaaaaaaaaaaaaaaaatctaatgattcacagacagatctggagcctctcttcattctcagtaattgctagtcccaagaactagaattgcaaatgggcacaacctatatccttcctgtggaagaggaggccactctcttgagctgaagttccagaagagcagttaatgttcaagagaaattgaactcaactcagcaacaaaggactctattttgaagagcaacatatcacaaagctaaatgtgattgtgccaaacacattaggtgcttatttggggtcatgctaggcctttatcaagtaactggaaaacttttcttgcagccacaatctcaatgtcgttagtaggaagataagaggggagaaaaagctgtagaacaaatgtttggggttaccattgaaaatctaatgtctgcaatatttttctcctcacaacttggaaacgttcccagttcattttcagtcctgttgtgagcacagttctgaagggtttattattgtcaaaataagttttgttttgttttgtttatgttgggtttttaatgttgtctcttgacccttaatgctcaggttcttgtgggagttaatcagccacatccaatgttaccttgagggggaagaagagggtgatgctcagaagctaaacaagacaggggccacatgaccctctattgattagccccaagtagaaagtcctgtggttttatgtttaatggtaatagttgatcatatatggcataattttctatcagcttcctactcagtcactataaacacagacttgaaatagtactttaaatgtccaaatacctaaatgtgctaaactggaggtaactatttctaggtagttgaatttttgaaagtcatgatcagccacacaactgttttgtacatacttattttctcatgcacttttctgtatgcaaataaagctataaatttactcatttcaataaactggagtggcagaatatca

SEQ ID NO: 9571 - DNA, 6937 bp, Homo sapiens
agatagaggaagccagcaaagcagttgaggtaaaattgcatctttacttcttgttaatcatgtgtgtgacatgcgtaagcccctgttttctacctgcccaaccactctcgccacctcgcttattactatgtgtttatgacttctctgatcatgaaagatgtttagttaaaagatgataccaaaaccattgctgcttagcagactaatagagtggacaaatacattttatagacaaagctcaactaaatccttaaatatttgctatcttttcagaatgggagtgaggccctaatgattctagatgaccaaactaacaaactgaaatcggtatgtattaatatgtgacgtttgacagttcttacttatctgaacatgggttctacttcctgtagatgttgctgataccaaatctgtattgaatctatatgaaaatccaattgagacaactgtttttcaaaatattagtgtaacatctatgtcaatatacaaaagtagtcaaaaaaagattagaaaagtaatctttttagtagccacacctgaatctaatctaatactttttaaggatgtggacaagatagatttgctttgagacatgtctacacttcctgacctaaacagcttaatatgaaatctattagttaaatggaaattaaattgtgacagctactttcctaaactttaggaaacaaatgattacaatatacgaagtaatcttttttagtagacacatctgaatctaatccaaatacttttttaagggtgttgaccagatggatttgtttggggacatgtctacacctcctgacctaaatagtccaacagtaagtgtttgtttttaaatttgcaatgtaataaaatgacatctataactcaaattggcaataaccagaaatcttaagcatctcattgaaacttggaaggtgactgttgatttttgcaaatgaagtgtcaatggtttttagaataaatgtgaatcttaagtcaccatgggaacctatccacactaattcagttatattaatattgcttacagattaaacctgaacaataagtcagcaatgtagtccttcttggtatcacttaggattagaaggaggaggtgaataatagtccttgaataagcctacttgaagaaagtatgactgttagatggttaatcataaagcctcctggcctcttcatttcttttgcattctgtctgttgcaatttagcagcataaatttggtgtgaagtaagatttaaaacaaacaagtggctcagttatattccaccaaagcttgtccttgttagaaagctgcccattctcataggattttataccatatccagtctgctcaatattgaatgatctgtaacaaccctgtaagaacagaacagtattttcctttataaattaaaaaaaaatggtggttcagggaaaaaaaagaagaaaaaaaaataaaaaggaaagaggtccagattcaagacttaggcccaagtcttcagaccttccaaaacatacctctaatgaaaatgtccatgacattttgaatgacttcttgcaacttcttttatttatgtaacagtttcctgagcacctgctatttgcaaggcatagcagtaagatgcacaacatcaatgacatcatggaatttactctccggcagggagaccaacattaaaactaatcacatcgttagtaattgatgttactacagggtatttatctagttcagattcaggtaatgcttctgcaggagtgagtttctagatttgaacataaaagatgagaaggcaataaacagacaaaaagagaattagtctagaataatggggggaaatgtctagaaaggactctcttgtatcaggaaattatcatggaagcctatgtgaccaaggttacaggagttgaagcaatggatcaaagattggataaaattctcccttcagacttctgcagagaatttgaggcctgtgaatccttactgcataaaactttcaggtcaaatgagatggagaggagcagggacttcatgcattcttctctgaccctaaccatatgagtatcacaatgcatggtagcattctaaaatgcctttaagagagaagcctgtttaatattcattttagcagtgagccctaactcacttgcctatagaacctttcattcttcataatttttgttatagttctgaggataaactttttaaagtactagactagattatcctgacaggtccatcctaactctgaggtccttttgatttgtagtcaactttgtgctctcctccattagtgatgttttctcaaataaatcagtatctgaacacttacttcccaagtataaatgacattcaaacaagtaatattcaaagagagcaaagcactcaagatatgaagtggaattccactggaataggcaaggaagtactgcctatataatctacttctgtagacttctagaatgttctaaaaaaggaaatggaaaacaacatggataatcttcagtctcatttttattagactttatgaagtctaagaattttttatttataggaattcaagttttagttaaactaacaataaagtaataaataccatcaaaatatatactctctgataaccaaaagaaggctaacagatctaattatgtgctggttaggctttgacatgttcttatctattgactctatagtcataggtcaaaaatagatttatctctacttggtaaagccagcatgtttaaaaatattcaactctttcaacaattgctctgaaatatgtaaagagagaaagaaatctaaattacctagactttattattggtcctagatggttgtcactcccctcaaatttatacagaaaagttttatgagtttcaaataatgctcatgttgcaaactatgtggtatcccctagaacagaatttttattggcaagccccttgagcattatccttccacactgcatctcaaaaaaggaaaagaaagaaaaacataaaaacccatgttctgcaactttaacaaccacttgaaagcacagttactatggaaagaatataagacatgatctgtgatcaaggagattaaatctggtacaagggatgggatcaggatacaaagcaggagtgtcacttatgtccttgtgtacatgccataagataacacgggtgggcacagggcaagtgcagacagaaaaatcgatgctaaaagctttgtaaagaatctgaatttgagttgggtctttgaagtgtgtaggaaaatagatcatagttgggctagaaacaacgtgggtcttattgtggatcatttggaaatttggcctaaggaggtttattttaatatagggagccagcagtaagccacttaaggctttgagtagagaagtcctcagtctgacaaactggaatggttaggtgagattagccacccagagaagagctaggctatggaactcaggatttatgtccgattactggagctccctacgagcaggttctgtaacgcactgccgtgtctccagtgcgtgcggctcaggtgctcaaacagtggccaactggaggcagtgttgacagttcgacaaagaatgaatgaggcgctgaccaagtgggtggatgaggagtctttgggctctcagttgtagtctgtgaactacacttttaatcttggattaataacaaacccagcctgaggagagccttatacattttacttatagggtgactattcagaagtctaacattgtggctcctgtttggtgtcctaagaacttcttctgaagtatttgaaaacgagaactctaccagctgtgaacactcaactgttctaacccagaggtggctcaaaacaaataaataaatattgaaatcacaagcttttgtaatacattttatcctaccttttgattgtataaagatccctagattaatagctcttccaatccatttctctgattaaatttttttttaattataagctctttcttgtgacaaattcttcttttataaagagaaagcctggctttggcttataaaaactgtatttttatgcctcacagtaaaggaatcccaaagatagattaccatttaggtctgattttgctgtctcttttgtggccatgaaataggacttaaactttctaaacaattgggtatttttttttcttttaaaagccaaggagttctatttgaacccttttgtatttactagtttgcaaattttatattcccttgaagttgtttattttccccaatgatcaaaatatttagtattctgctcagggtaatgcaagataactactataacttgcacttcagcaaggcattttttatcatttatattcttctctgggtagcatagttaagtatttaatggatcaaagtcaagcagaaggaagtgatgtcagtatgaaagttctgttctaggatgagttataattctgtcttttactggaataaagacatgtcggattcatcaaatttactgcttttaagctgagaattttttatcaaacagttgaaaatccaaaaaattaacacaccagagaaatgatagagaggggatagaattagtagagctacatatttgatatgtctttcaaattaactcttaaacccatgtctctaccttgtacaatagtccccctttatctgcagtttcactttctgaaattaagtctgtggtcaaccttggtctgaaaataagtgagtacggtacaatataatattttgagagaagagagacagagagaccacattcaaataacttttattacagcatattgttataatcattctattttattacttgttaatctcttattgtgcctaattgataaattaaactttatcatgtgtatgtatatgagaaaaatactgtatataggttttggcactatgtgccatttcagacatccactgtgggccttggaacatattccctgaggataaggagggactactgtatataaattaaagatcagttgttggttgactttaaccactaaatagatgagattactgtcacaacacaggcaactctaagcaatgttatgaaaagatgtacaaataggagatcttaatgtgtgattgactaaattagatcagtattgagtgtctctttcagaggacatagacaaaaagggtaagcccagaggagagactgggatgatgaggatgagatcctacttgactatcagcttcagcaagagccttaaatattaagagacatacctgaaggccgtgatataaaagaaaagcctctctcccacctctagaggaaagaactggaccgattttagggaaatgcatttgatcttaaatttcatcacagccagaactataaaatatgaatgtattagtcgatgaattttctcatttagagagatgatcctacatgactctgggggtacaatagagaggactgtatgtgtataggtaggaagctgagctaagcttctgaaatcacttactttcaagctcaacatactttgataatcatttatagtgactcacaatcaattccctttaagactttcaaagtcacaaattgaaacaatgctcataatgaattaagccagtctgtatgtgtgaaccagggtgagcagagacatgaagtaagcaacagtaagatttcacctaatgaggttgagacttaaataaaagggcatgatattggggaggaatagaaaggacctagtctatagctagggagtaatggactacgggggttgatggaaggaggtaatgatcaaccgatttatcaagaccaaattcaaatggaaattctgataatcctagtcatcttatgtaattttctcatttgaagtcacaacatggactaacactttctttttttttctttccaaatgtgataggaaagcaaagatatcctgttagtggatctaaactctgaaatcgacaccaatcagaattctttaagagaaaatccattcttaacaaacggcatcacctcctgttctcttcctcgaccaacgcctcaggcatccttcttgcctgaaaatgccttttctgccaatctcaacttctttcccacccctaatcctgatcctttccgtgacgatcctttcacacagccagaccaatcgacaccttcttcgtttgattctctcaaatctccagatcagaagaaagagaattcgagtagctcgtctactccgctgagtaatgggcccctgaatggtgatgttgactactttggtcagcaatttgaccagatctctaaccggactggcaaacaggaagctcaggcaggcccatggcccttttcaagttcgcaaacccagccagcagtgagaactcaaaatggggtatctgaaagagaacagaacggcttctctgtcaaatcctccccgaacccttttgtgggaagccctcccaaaggactgtccatacagaatggcgtaaagcaggacttggaaagctctgtccagtcctcaccacatgactccatagccattatcccacctccacaaagtaccaaaccaggaagaggcagaaggactgctaaggtgaattgtcttctccacatatccattagcagagtgcatgttcggtaccaaagggtggtgtgatgcaagctctctttcctgctgctctcgtagtttcctgtgttgctgtgaaatagaaggtgggataaggcactttggttctccaggagtactttcctctaactgccaccgtttttaagcttctcagcagtgtttttcacaccctgctttccgtgtgcatgtcttgtcacttatgattaaactaaacacaagtttttccatttttaatgctgctatgcttctatacctctggtaagtttgatcatcgtgttctgggttgggagggtgagagttcttgtgattccctttgtacttccctgacactaacacatgccctgcacacccatcatgttgcatcagtgtccatggtggtggtataaaattctcgag

SEQ ID NO: 9572 - DNA, 22958 bp, Homo sapiens
taataggcacacatgttccattttggaaactacaaaggaaacactcctacccactcccctgctttcagtcttcagtctaatacagcaggagaaggaacaaaatgagtccaaagaactacaaaagaaagtcactagttgtaagcctattctggcataaagtctgggtctgctgtgttctgatctcaatatgcctctaaactctgcctacaggtgtctgtgggaggttatgtttatttgagacttctccatcgggatcgcctggtgtcaccaagtgtccactggtactgaggtttgctgcctgccttcttgccatgtctaacgaagtagaaacaagtgcaaccaatggtcagcccgaccaacaggccgcaccaaaagcaccctcaaagaaggaaaaaaagaaaggtatggagaaatccacttgaagccaaggaagggagctagagatggttacccctggagaaatgtgagattcagaataaagtaagggctggctctgatcttccttcaacctcagcttagtctcatgttctcctaataggaaagttgtaccttgggagaagagactggttcatctcacgtgtaataagacatctctggaaacctgcgattatacccacttaagtccagttgggaaacagtcatggcatcttgttcagttaataatgcagtcgttaattattatatggttatcattcagttatttatttaccatttgattttactgaactcattgggaatgggactacacagaccttgtaaaaggagcaaaagacattataaagatgggataattatcttaataattttcaagagaacttaggcataattcctttctgccttattgataatttaaaatgttggtaaattgcttggcagcttatttttcttacattaaaaatacatatattatcatccttatattcctttaaagacttaaaaaaaactatgatgaaaaatgtccccaactcccacctcccatattcccatacgtttcccataacgctgtcaattttgtacttctaacagtttattttctccccacctcaactccatacacagttgattgtggaacatgattttgctcaaaggaagtaagaataagacaggacagaatattacatacatgatcagttgtagtataatcaggatttatattacttaaattttggagagtctagagcatatttggtcataattagaactagcattcttcatcctgtattcctttcttttctcaggccctgaaaagacagatgaatatctcttagcaaggttcaaaggcgatggtgtaaaatataaggccaagctgattggcattgatgatgtgccagatgcaagaggggataaaatgagccaagactctatgatgaaactaaaggtaaaagggaaatgaatgctttatctgtatattaagcaaaagtccaagagagggaattatattagaagctcttgttgacctattgttcaattacttgaaaactgcttttaatcacattatccatcagtagtgccccattttctgagaaaccgtgagtgtttgcatatttggagggatgtcctagatacctaattttatcaagtataataggactctagatgccttttccttctggcaagctcaacattaggacgaaccaagcgtattcctatttctattcctataaaagctgtgtgcaaatatttgcattgcttgtcttactatatgtggagagcacggaatatcctgttttagacctgggaattgttctgataaaattgaggattctacttagacattggtgttccttagcgctagcctttctgttttttgaatttaaaaatttagtactatggcactatgtgaaactgactgaataaataatacttgttcaatagttcaaggcctagaagaaacatctctaaagatcttctagttgagctttaccagtgactattctgaggccaagagaattagagtgacttgtccgagttcgcacagctaactaagggatgccctggttcaacgtcttctatgccgtcttgctgtcccggatgaaaagtgccgaatcctctcatcgatggcagatcaagtcgaaaacaaagctgactgactttgaaaattttaatattaaaaccattgtaggatgtttttaaaaattcaacttctcttgtttttccaccctcatcagggaatggcggcagctggtcggtctcagggacaacacaaacaaaggatctgggtcaacatttccctttctgggataaaaataattgatgagaaaactggggtaagaattcacatttgctgatacctctctgaccacctgagtctgaccaacaatttgctacttgaatttcggctccccttcttcgttctcaaagttctgtggggaacaaatatatcatatattacatctccagaagtaacaggcagaaaacagaataggaggtaaaagtcaagatacttgattttgaatttgtgttctataataaatgtgaatctaagtctgttaagtctgttaataggcttagattcacattatgtctataatatataaatatatatatttttgaaattaaataaatatatataatttatataatatacaaatatacattaaaatataaatacatatataatttataaagtaaaacttctatatatatatatttttttttttttttttgacctcgggtatacagaactagattaattttaacccctagtttgtgacacttttatgtattgcttacatgtgaacttaccggctaacctaaagctagaacctcacccataacacatctacctctttttcatttcttttttccctgccttctcacctcacagatgtaaccttgtttttgttggttcctgttgttctattacttgtgaacagtcttacttattttgccttgtttttaagccttatcagaaagctatttatcatacatcaagtcttctgtgattttttttctgtactcaatgtaacatcataagactcatgttttttaaaatgttgtgtgtggctcattttcattgctataaaatactctctcgcatcacgatactgtgaggagacctccagttactattcatccctttctagagtgcccattatctaccatgcaaacctagggccctggcaccctagtggaccccactcagcctgctagtgctggggtcctcaggcaccactctctttatcagtcgcctttatctgtcaactcttattttcccaagcccatcagagaaaggtggcatgtttctctcacccttctgtgtctcctcaaactttctaagatactctaagatatcttagacattcaggacaaaaagccaagacacactctgccacctacaaatatccctaaagagttcaaccttgttaactgcttgaaaggatcaagaaaaaggagggaaaaatagaagaaaagacactaagccaatacagtccccaccccttataattcctggttactgatgtagtcattatgtcattaacatactgtagttattactacattatgttactatgtattaggctgtctaggtgaggctgagaaacacttgatgacagtatttggtatcctccagaatatactgggaatacggttccaataacacataggatggttcctcggccactctgagccatcgtcaatgaatccctgtgaacactcctctagcttagttatgctgttcttttaagtttgtctttgagttgggaaagtagacctatttggcttggcttaagggctaaatgtctcctcttcacttggtcttctaatcctcagtccttcctggctatgtggcatcatgtctttaaagcagggagagtaaagtatcaatattttaagaaggaacattcttcccacttacgttttctattcttctttcttttgagccctttctagaaagagtaatgctctagccttcaaccagaaatgaaaagtctatcttcaaatggtttaaacttttcatatatgccttcatatatgtgtctgaggcttcggtgtgctagcctgcaaatagattctagttttcttaataaattactctttatgttcttttttaaggtaatagagcatgaacatccagtaaataagatttctttcattgcccgtgatgtgacagacaaccgggcatttggttacgtgtgtggaggagaaggccagcatcagttttttgccataaaaaccgggcaacaggtgagctctaagtcttgacatagacctggggacttgtcctctgtggacattggagtgtctgtcactcaactaaaagatttactggaaataattggatgtaagagggctaaataataattccgagaatgactatttttattggcctatggaatcttttaaaaatgtcattgatagctatgcactgctgtgtgccacaggattgtgagaatggaccttcttataaagtgaatactgacttcacaacagtggtgaattattctcaggaaccttaaaggacttcaaatatgatcatgatacctcttgttttgtctaaatacttattaaccctgctgtcttttatatacctaagggtgaggattgggttggtggtgatcccctataagccagcagagggtagtaaggcgttttaagattaaaaaaaaaatcccagtatgaattataattgatagcagacaaaggaaataaaatactaaaattaaaatacggataacagtgctttcccttactgcaggctgaaccattagttgttgatcttaaagacctttttcaagttatctataatgtaaagaaaaaggaagaagaaaagaaaaaggcaagtactacctgattaaggctctattaaatttaaaactggctgggcatggtggctcacacctataatcccagcacttcgggaggcagaggtgggtggatcacctgaggtcaggagttcgagaccagcctggccaacatggcgaaacctcatcactactaaaactacaaaaattagccaggggtggtggtgggcacctgtaatcccagctacttgggcgtctgaagcaaggagaatcacttgaacccgggaggcagaggttgcagtcagccgagatggtgccactgcactccagcctgggcgacagaacgagactctgtctcaaacaaacaaacttaaaactgtactcaggactatgtttaatattatatataaatatggtctatctgaaaatttggcttctatatgtattgtctattcttcccaatagggcaatggatacatttttatggttaggcacttctaatctgcactccctggcttttattttttttctctctatgagattcatattaattctaggaaatatacaggacaaccaagtttaaatccagtaactctactcaaaccttatattgatatgaaaaggggaggggaacggagggcagaaataatatacaagacttattcttgccttatgcctgtgaaccataggcatacttgtttgtgtatttaactccctttcactatgaatatgaagatcactgaatatgtatctttctttttagatagaggaagccagcaaagcagttgaggtaaaattgcatctttacttcttgttaatcatgtgtgtgacatgcgtaagcccctgttttctacctgcccaaccactctcgccacctcgcttattactatgtgtttatgacttctctgatcatgaaagatgtttagttaaaagatgataccaaaaccattgctgcttagcagactaatagagtggacaaatacattttatagacaaagctcaactaaatccttaaatatttgctatcttttcagaatgggagtgaggccctaatgattctagatgaccaaactaacaaactgaaatcggtatgtattaatatgtgacgtttgacagttcttacttatctgaacatgggttctacttcctgtagatgttgctgataccaaatctgtattgaatctatatgaaaatccaattgagacaactgtttttcaaaatattagtgtaacatctatgtcaatatacaaaagtagtcaaaaaaagattagaaaagtaatctttttagtagccacacctgaatctaatctaatactttttaaggatgtggacaagatagatttgctttgagacatgtctacacttcctgacctaaacagcttaatatgaaatctattagttaaatggaaattaaattgtgacagctactttcctaaactttaggaaacaaatgattacaatatacgaagtaatcttttttagtagacacatctgaatctaatccaaatacttttttaagggtgttgaccagatggatttgtttggggacatgtctacacctcctgacctaaatagtccaacagtaagtgtttgtttttaaatttgcaatgtaataaaatgacatctataactcaaattggcaataaccagaaatcttaagcatctcattgaaacttggaaggtgactgttgatttttgcaaatgaagtgtcaatggtttttagaataaatgtgaatcttaagtcaccatgggaacctatccacactaattcagttatattaatattgcttacagattaaacctgaacaataagtcagcaatgtagtccttcttggtatcacttaggattagaaggaggaggtgaataatagtccttgaataagcctacttgaagaaagtatgactgttagatggttaatcataaagcctcctggcctcttcatttcttttgcattctgtctgttgcaatttagcagcataaatttggtgtgaagtaagatttaaaacaaacaagtggctcagttatattccaccaaagcttgtccttgttagaaagctgcccattctcataggattttataccatatccagtctgctcaatattgaatgatctgtaacaaccctgtaagaacagaacagtattttcctttataaattaaaaaaaaatggtggttcagggaaaaaaaagaagaaaaaaaaataaaaaggaaagaggtccagattcaagacttaggcccaagtcttcagaccttccaaaacatacctctaatgaaaatgtccatgacattttgaatgacttcttgcaacttcttttatttatgtaacagtttcctgagcacctgctatttgcaaggcatagcagtaagatgcacaacatcaatgacatcatggaatttactctccggcagggagaccaacattaaaactaatcacatcgttagtaattgatgttactacagggtatttatctagttcagattcaggtaatgcttctgcaggagtgagtttctagatttgaacataaaagatgagaaggcaataaacagacaaaaagagaattagtctagaataatggggggaaatgtctagaaaggactctcttgtatcaggaaattatcatggaagcctatgtgaccaaggttacaggagttgaagcaatggatcaaagattggataaaattctcccttcagacttctgcagagaatttgaggcctgtgaatccttactgcataaaactttcaggtcaaatgagatggagaggagcagggacttcatgcattcttctctgaccctaaccatatgagtatcacaatgcatggtagcattctaaaatgcctttaagagagaagcctgtttaatattcattttagcagtgagccctaactcacttgcctatagaacctttcattcttcataatttttgttatagttctgaggataaactttttaaagtactagactagattatcctgacaggtccatcctaactctgaggtccttttgatttgtagtcaactttgtgctctcctccattagtgatgttttctcaaataaatcagtatctgaacacttacttcccaagtataaatgacattcaaacaagtaatattcaaagagagcaaagcactcaagatatgaagtggaattccactggaataggcaaggaagtactgcctatataatctacttctgtagacttctagaatgttctaaaaaaggaaatggaaaacaacatggataatcttcagtctcatttttattagactttatgaagtctaagaattttttatttataggaattcaagttttagttaaactaacaataaagtaataaataccatcaaaatatatactctctgataaccaaaagaaggctaacagatctaattatgtgctggttaggctttgacatgttcttatctattgactctatagtcataggtcaaaaatagatttatctctacttggtaaagccagcatgtttaaaaatattcaactctttcaacaattgctctgaaatatgtaaagagagaaagaaatctaaattacctagactttattattggtcctagatggttgtcactcccctcaaatttatacagaaaagttttatgagtttcaaataatgctcatgttgcaaactatgtggtatcccctagaacagaatttttattggcaagccccttgagcattatccttccacactgcatctcaaaaaaggaaaagaaagaaaaacataaaaacccatgttctgcaactttaacaaccacttgaaagcacagttactatggaaagaatataagacatgatctgtgatcaaggagattaaatctggtacaagggatgggatcaggatacaaagcaggagtgtcacttatgtccttgtgtacatgccataagataacacgggtgggcacagggcaagtgcagacagaaaaatcgatgctaaaagctttgtaaagaatctgaatttgagttgggtctttgaagtgtgtaggaaaatagatcatagttgggctagaaacaacgtgggtcttattgtggatcatttggaaatttggcctaaggaggtttattttaatatagggagccagcagtaagccacttaaggctttgagtagagaagtcctcagtctgacaaactggaatggttaggtgagattagccacccagagaagagctaggctatggaactcaggatttatgtccgattactggagctccctacgagcaggttctgtaacgcactgccgtgtctccagtgcgtgcggctcaggtgctcaaacagtggccaactggaggcagtgttgacagttcgacaaagaatgaatgaggcgctgaccaagtgggtggatgaggagtctttgggctctcagttgtagtctgtgaactacacttttaatcttggattaataacaaacccagcctgaggagagccttatacattttacttatagggtgactattcagaagtctaacattgtggctcctgtttggtgtcctaagaacttcttctgaagtatttgaaaacgagaactctaccagctgtgaacactcaactgttctaacccagaggtggctcaaaacaaataaataaatattgaaatcacaagcttttgtaatacattttatcctaccttttgattgtataaagatccctagattaatagctcttccaatccatttctctgattaaatttttttttaattataagctctttcttgtgacaaattcttcttttataaagagaaagcctggctttggcttataaaaactgtatttttatgcctcacagtaaaggaatccaaaagatagattaccatttaggtctgattttgctgtctcttttgtggccatgaaataggacttaaactttctaaacaattgggtatttttttttcttttaaaagccaaggagttctatttgaacccttttgtatttactagtttgcaaattttatattcccttgaagttgtttattttccccaatgatcaaaatatttagtattctgctcagggtaatgcaagataactactataacttgcacttcagcaaggcattttttatcatttatattcttctctgggtagcatagttaagtatttaatggatcaaagtcaagcagaaggaagtgatgtcagtatgaaagttctgttctaggatgagttataattctgtcttttactggaataaagacatgtcggattcatcaaatttactgcttttaagctgagaattttttatcaaacagttgaaaatccaaaaaattaacacaccagagaaatgatagagaggggatagaattagtagagctacatatttgatatgtctttcaaattaactcttaaacccatgtctctaccttgtacaatagtccccctttatctgcagtttcactttctgaaattaagtctgtggtcaaccttggtctgaaaataagtgagtacggtacaatataatattttgagagaagagagacagagagaccacattcaaataacttttattacagcatattgttataatcattctattttattacttgttaatctcttattgtgcctaattgataaattaaactttatcatgtgtatgtatatgagaaaaatactgtatataggttttggcactatgtgccatttcagacatccactgtgggccttggaacatattccctgaggataaggagggactactgtatataaattaaagatcagttgttggttgactttaaccactaaatagatgagattactgtcacaacacaggcaactctaagcaatgttatgaaaagatgtacaaataggagatcttaatgtgtgattgactaaattagatcagtattgagtgtctctttcagaggacatagacaaaaagggtaagcccagaggagagactgggatgatgaggatgagatcctacttgactatcagcttcagcaagagccttaaatattaagagacatacctgaaggccgtgatataaaagaaaagcctctctcccacctctagaggaaagaactggaccgattttagggaaatgcatttgatcttaaatttcatcacagccagaactataaaatatgaatgtattagtcgatgaattttctcatttagagagatgatcctacatgactctgggggtacaatagagaggactgtatgtgtataggtaggaagctgagctaagcttctgaaatcacttactttcaagctcaacatactttgataatcatttatagtgactcacaatcaattccctttaagactttcaaagtcacaaattgaaacaatgctcataatgaattaagccagtctgtatgtgtgaaccagggtgagcagagacatgaagtaagcaacagtaagatttcacctaatgaggttgagacttaaataaaagggcatgatattggggaggaatagaaaggacctagtctatagctagggagtaatggactacgggggttgatggaaggaggtaatgatcaaccgatttatcaagaccaaattcaaatggaaattctgataatcctagtcatcttatgtaattttctcatttgaagtcacaacatggactaacactttctttttttttctttccaaatgtgataggaaagcaaagatatcctgttagtggatctaaactctgaaatcgacaccaatcagaattctttaagagaaaatccattcttaacaaacggcatcacctcctgttctcttcctcgaccaacgcctcaggcatccttcttgcctgaaaatgccttttctgccaatctcaacttctttcccacccctaatcctgatcctttccgtgacgatcctttcacacagccagaccaatcgacaccttcttcgtttgattctctcaaatctccagatcagaagaaagagaattcgagtagctcgtctactccgctgagtaatgggcccctgaatggtgatgttgactactttggtcagcaatttgaccagatctctaaccggactggcaaacaggaagctcaggcaggcccatggcccttttcaagttcgcaaacccagccagcagtgagaactcaaaatggggtatctgaaagagaacagaacggcttctctgtcaaatcctccccgaacccttttgtgggaagccctcccaaaggactgtccatacagaatggcgtaaagcaggacttggaaagctctgtccagtcctcaccacatgactccatagccattatcccacctccacaaagtaccaaaccaggaagaggcagaaggactgctaaggtgaattgtcttctccacatatccattagcagagtgcatgttcggtaccaaagggtggtgtgatgcaagctctctttcctgctgctctcgtagtttcctgtgttgctgtgaaatagaaggtgggataaggcactttggttctccaggagtactttcctctaactgccaccgtttttaagcttctcagcagtgtttttcacaccctgctttccgtgtgcatgtcttgtcacttatgattaaactaaacacaagtttttccatttttaatgctgctatgcttctatacctctggtaagtttgatcatcgtgttctgggttgggagggtgagagttcttgtgattccctttgtacttccctgacactaacacatgccctgcacacccatcatgttgcatcagtgtccatggtggtggtataaaattctcgagcttatctcctcttttaaatactgagtaaatacataagctttttctaagcttatgtatttactattaccactatgatctcagctttatttaagagcaatttaaaatgcagttcccataggtgtctttttttacctctcctaagaatatacaggcttgcctggattaagaccctatgatctctatgtagactgacttaaaatccaatggaatgaacaaaaatatttaggatgcttattggtagttgccccttttacacacttgctcccccaacttcaagcatttagcgatgagaccagaccaatgtgagtgtgtaaaggaatatagtagatttcactttgcaagtcctaggtagtgtcagacactaagactcagtagtccgtccgttgtaggaatctgtgtctttttttggaggactctttttctgtagtagtagttgttgttgttcatctgtcaagaaaaaagttttcctttttgtggctctcaaattggggtatagggtaggagacaaaatgaggctgtatttcactgttagtgagtaactaaggcttctccctccctccctgtcctgtcagtcttcagccaatgacttgcttgcatcagacatctttgctcctcccgtctcagaaccttcaggccaggcgtcacccacaggacaacctacagccctgcagcccaaccctctggatctcttcaaaacaagtgctcctgccccagtggggcccctggtgggtctaggtaggtgcctagagataaaattaagtatgactcttttgcttttgctcataaaatgatgatgcatcggaagagatttcatactcccagagggttttacagcataagatttgagcatcccagggagcccttctcccacttctactatacaaccccacatccatttgatattcttgacttgtaactcacatttggctcctcgaggcagcatgagacaagaaattcattttcagtattgtacttacttgaaccaactggtcatggtttcctgaaagacaattgtaagggattctaaactcagaccagcttcagtagcaaaacagggttgacataagagaggcttgtctgtcaacatgcatgtcttccatgtcttttgccataatagatcgaaggcctatgtcctttcaacacatagccctcttagaaggaatatatgcccaagaaggatgtaagttaagtctgaagcaagaataagtcatagagtgaaagtcctaggttctgggcccagctgtgttcctaggtgtatggtaagggtagatcaggcacacatcctgatcagtctctgagcacttctgccataggagctccttgccaatattttggctagcttgagtgttttactgaagctagaacataagtcctagaaagccaaagttgaaaaaagagagaaataagggaagagatggaattttatcagacagctagtatgcattgacgctcttaattcctaaatgtgtcattagcttgtgtgagccgctgatcactctgtggtaggacagtgggaaagtccacttgactgagggctggccttgctattcttagtccatagcctatagttcttttcagactccatggtacagttttcagaaaccctgacaatagtttttgctgtcctgctatggactctatttttcttctcttggcacctctacaaactccaaatggactctggcttgggaggtggaggactgtagacgaggaaggactctcctctccttcggtaaaatctgaccagggatcctggctttctctgcctcctgcagtcagtcatcaggatccttgttttgttttcctctctgtctctgttgttttcctacaaaggaaaatagtttggttcttttacaagaaatctgtttaatcatatctagaatagggtggccagaggaggactgttactcaactgctgagtggcagaaatccgtgagggtatgaaaagccagcttgtcccaggtctctgctcgcatttaccccatcaagaggctctctctaaagacttcatgtctcttgggggcttccccctttctgcgttgctcttttccttgcacccccaagtggagctggttggtacccttccctcacagaagaccagagtgcttgcaatgcaatgtctgcagcgagatcacatcacagagctttttatctgatatcaatgcccttaagaatttttgcagccaatatttaacaagtcagcctgaaaatacagctggaccctataactgtttatttattcagacgaagtgaagctttttggctaggtgcccctgttgagggcttggggtatacaactgcagaatactgatgattgttccaagtttggacatgggactcaaactgagctctacagtatagtccctgtccactagcagggatcctcagccaaaccatggaaggttgtaggtctggcttccgctagacccagctgggggactgtctcccctggagaactgggggggtggggagagggtattgtagaaagctgagccctcagattcaacttgcttgtattttaatctagcctcagaaggtaataaaattaatgttctatacccatgtcccctttttccttattccttgcccctactttgtcaatgtgttcaatgtgttcaatgtgttaaaacacaatgtggggatttggtgggtaggaatgaagactggtataagtatatactgggaaagccttgaattcctggcaaatgtaatatttttctctcctttttttttttttttttttttgagacagagtctcactctgtcacccaggctggagtgcagtggtgctgtctcagctcactgcaacctctgcctcccaagtttaagtgcctcagcctctctagtagctgggattacaggcatgcgccaccacacccagctaatttttgtatgttagtagagacagggtttcgccacgttggccaggttggttctgaactcctggcctcaagtggtcctcccactttggcttcccaaagtgctgggattacaggtgtaagccactgcgcccagccctaatatttttctcttttacaaataccattctcactaatatgatattttcctaaatgaagacaagttgtccaacatgaaagatgataaaattctaccctcctttttgcacagctaactggtggaaattattagcaagtgatctggcttctgttaatacaatttaattgaatgtgttttaaaatacaagcaacaactttgttcaaactaaacccatttttagagcctgtattgtagaatataacttttctcttgatttgttatgaaaggagtatattcttcagtgaaaatgaagtctaatttctgtatccgtgaaataagtatttgaattaacatagcatttgaaaattaaaattgccccatgccttgctgccaaggaagcagaacaggagaatggggtgccggatttagagccagtgtgcctgattttcagtttctaccatcccagactatgaccttcccaattttaatgaatattcttgcacccagtttcctcacctccaaaaagcatgctgattaagtgaaatggcctgttctgaaacccaccactctctgtgagtacaccatgtgtgcccatggccagatggccagcatgcatgatgagaatggagtcaggtaataccaatgtctcagactaagaagctcgaagatataatcttgtgctccatcactcctaaataccattttcaaagtattccctcttggaaacataaacgtccctaacccaggtctgaagaaaactttcataactaaagaatgccatgcaccaaagctcaaagcaagtagatttcaagagcgaagcatcacccactaatagatatgaggctgaatttaggtttccttcttagcggtgagtttaactgaatcattaatgcacttggaaagaggcaggaaagacagtgccctgtatattagaacaagatgcagggagcgagcctctcaagaatcagaggccatcattggagaggcctggattctggcgatttaacgaattcctgatgacatagcaaggtcgtaggagatggagccattcaccacaaagatcagatgccccaacacaggccattagttaccttgaaagatttttgtttcccattgtcctctctcctcttttaaattctctgttctaacttctggcaaggtttagcaaatggcacatggcaggaagcacttttatttgaaacagtcttcctaggataacatcctttcttccatttttatatataaacgtctaaaactatcttggcattggccaaactttatcttccctttatgtatatagctgtatcagtcttggcagcaataaaaagtgaagaaactttgaaatggtttcttcaggatgcaagcatgttgaggtcttgtgcacatgtgtgattgctggtttccataagactccagacgtgagccagttgccaaatgaaaagatcaaatctgtgactcagagagtccaatggattatcttaattaactacatcataatcagcatggttcatgcataaaaatatattcacttaaataagttcctgctattaacaggctctgttctagttgtttgagatgtatcagacaactagtgtctgtatgataagggcttatttttttgatgagtagatacttatggaccgtactacccttctaatcaggaaagttaaaaagacatggtaggaagaacatgggcctcaaaatgcaaccagcatttgaatgctcactatacagtgttagctggctaacttttacagtgattaatctgtcatattcttcccatatcagcctcagggctcaatggaggtgttagctgtggagaggctttccagagagttgtgctctctgaaattcaagaatcttcttcaagcttgactcctgataagtatttttcttcctcttacttcaggtggtgtaactgtcacactccctcaggcaggaccatggaacacagcatctttggtcttcaatcagtccccttcaatggctccgggagccatgatgggtggtcaaccttcaggttttagtcagcccgtcatttttggtacaagtccagctgtttcaggttggaaccagccttcaccctttgcagcctcaactccccctccagtgcctgttgtctggggcccttctgcatctgtggcacccaatgcttggtcaacaacaagccctttggggaatccttttcagagcaatatttttccagctcctgctgtgtccactcagcccccatccatgcactcctctctcctggtcactcctcctcagccacctcccagagctggccctcccaaggacatctccagtgatgccttcactgccttagacccacttggggataaagagatcaaggatgtgaaagaaatgtttaaggatttccaactgcggcagccacctgctgtgcccgcgcggaagggagagcagacttcttctgggactttgagtgcctttgccagttatttcaacagcaaggttggcattcctcaggagaatgcagaccatgatgactttgatgctaatcaactattgaacaagatcaatggtaagccactcaccactctgcctactgttccaacaactatctccactgccacatggacctaaatgagttccccaaatgaaccctctcccacccgccaacagctttgctcttgcttctgttggtaatcaagggttacggagacaacttaaccatttaccttttggtgataactatttaccttagtcatttctgaggactgacccaatgctgccctctagtgataaatcttaaaagggctgccatgagctattgaaatgtgatgactggtgactcttggagggctgtgtaataaggcgtcatccatgtcccatcagcttaaaatgaggggattctgaatctcttccacttcagataaatatgcatggctttctcttccgagaaggataataattattggggtacctagtatttggtgttgatttttgttccactgatgtaaatttcaaaagtatagaactaaacttcaaaaataagctgactcggggactggcctatatttgggaaaagcttgtctactgattgcctggattttttaccttctagaaccaccaaagccagctcccagacaagtttccctgccagttaccaaatctactgacaatgcatttgagaaccctttctttaaagattcttttggttcatcacaagcctctgtaagtatgaactactagaagctcttctccaaagtacatgccacatagagctccagcctcctgaattaaccttgcttttataatagcttttatttatttatttatttttttaagacagagtcttgctctgtcggccaggctggagtgcagtggtgcaatctcagctcactgcaacctccacttcctgagttcaaaggattctcctgcctcagcctcctgagtaggtgggactataggcacgtgccaccacacctggctaatttttgtatttttttgtagagatggggtctcgccatgttggccagactggtctcaaactcctgaccttaagtgatccatctgccttggcctccctcagtgctgggattacagtcatgagccaccgcacctggctataatagctttttgatggtaaaacatgtttagctaagatttgtcaccaagaaccttcacagtataaacattcatttaaactggagaaagattatttgcacaagaactattatcttctgaatttgagaaataatatcacatagaaaacatccttcatatctcacttaacctgacccatgaaagcatttcgggagaaaattgagccaaaatactgtcttgaaaacctttcaaaaatttaagttcttaattttccaacaatatttctatagcctgtgaaaataatacttcccatttcggggaggcaaatgaaatgcatctgaaccttgattttcacataaataatatacactgccatctgcaagcagatgaaaacaaaacactgtaagccccatataatgtttgattggctgattggcctatgacctaagcgatttttaaaagaattttggaagtcttcattgcgatttttttcttatgactgtaactgtatttattgactagatgattttatcttcttaggtggcttcttctcaacctgtatcttctgagatgtatagggatccatttggaaatccttttgcctaaattctgtaagtagaagatcctaataagcctgtctcaggggtttttgtgagaaagggtgacatggaataaagagtgaaattttaattttagaattgggaagagggtaaatatctataatttaggagtaatcgacaggaaaatctctactgagatcattcaataatgactaggctgggcacttaagaatagaattcctaaacacatcaaaaaatagtaatatacccttggggatgtggatttttatcttattccatgttcttggtttttcagttctgtgtgggaagtaaaactcaaaacaacacatcacaggtttctaacctttttactttcatattgaagtggttgcaaaacaacctagtaataatttggtttcctataaagggttcagattccattgactttctgaagccaccaagtcagcaaaacagattatgatcattacttctctaccatttaactgtgagcaatctcaaagttagtctgaaagagtctgatggtattaaatctgaaagttttaacaactattaaagatctccttcataggcagtaggagctcaaaatgagtctgaaggttgattcttctgtctcatgaactttatcttagataagtgattaggtagaatcaccctcagctgaaatcctgggagggctcagtgtaactctttctctacagaaggtgacagcaactttattctgatctcaaaagactgaatttagtagggaaaggaacgctctccccattttagagcaggtaggccagctggtaggggtagaacaatagaaataatgaaaaacaacaacaacaacaacaaaaaccaagcccattttttttccaatcttgtctcatccaaacaggactactaaactgtgatttggctcatctagaatgtaattatttttaatagatagatatcttaaacgtggcgaaaacaataagattgagcttataggcatctggatcattttccctcaactccagttctacaatgactgtgtttcctgtagtacctttccataaactgcttcagagaactgggtaaatcattaaaaatgcaaattcctgggtcctactgcagccctaaggaatttctctttggtgccaaggaaatgcttccttttaacaagagtgcaggtgattctaaaggtaataaagcagtaagtagatatttaagagctagaagtcttaccagagatcattctcaccttccattcaaggggagatatacccaaaccaatagaaggagtaaactacactcagagtcaagatggattgtatggactaaattgaatgaactagacttctctttggaggtccttccttctttaggtcatgaaggaaggatagtttaggtcaacctgctacatcaatagattgggtaaggggaactctcatgggataaaataactaacattgttgagcacttgcgctaagcattttattagatgctctacatttatcatcttcatcaatcctcacatcagccctaggagatactattactgacatctttaataatgacttgatatttaatacattgatattcagttcaaaaattctaaccacaagtttctttcttctccatacctctctaggaacttggtctgcagaccatccagaggaataaaaaggttggccttagtagtcaaaaacaaagctgatagccagacacgttctgatttctgcccttgttccagctttgacgtattatctgttgccttatttctcattgcctcttctacttgtaaaatgcttttcactttctgtctaggttaaagctaaactgaatctatggctttaaataaattaagatcctaaactctctagcttaagtgtaaatgaagtacagtagtttccctactgaaccctgcctcttgtgtccctggaaccttctagaacacctgccttctaccctctggttgggagatgcagccaccacatcccttcatatcatactgttttgaataaattttcaaatccttattgttcagagttgtttgggggttctgtttcagagcataaaacctaaaggttatagtagaacaaggcaccttcttaaaagaaatcttgcttcagaccatcagttacagagaatttctaaagtaaaattgaagcaactacaacttctccttagacactttggaatctaaccacttaaggacctttttaaagagatagcttctcttctttctgaagatcaatttctcccaaggccaagattgtccttttctcccatttcttgctagctattgcaaatgagggaagaacattattcatctctcctccccttttttttctgattcttttttcagtcagttttgctcctgggttcaagtagtattaccaccctttcacaagcaacagactctcacagggcaaaaaaaaaaaaaaatctaatgattcacagacagatctggagcctctcttcattctcagtaattgctagtcccaagaactagaattgcaaatgggcacaacctatatccttcctgtggaagaggaggccactctcttgagctgaagttccagaagagcagttaatgttcaagagaaattgaactcaactcagcaacaaaggactctattttgaagagcaacatatcacaaagctaaatgtgattgtgccaaacacattaggtgcttatttggggtcatgctaggcctttatcaagtaactggaaaacttttcttgcagccacaatctcaatgtcgttagtaggaagataagaggggagaaaaagctgtagaacaaatgtttggggttaccattgaaaatctaatgtctgcaatatttttctcctcacaacttggaaacgttcccagttcattttcagtcctgttgtgagcacagttctgaagggtttattattgtcaaaataagttttgttttgttttgtttatgttgggtttttaatgttgtctcttgacccttaatgctcaggttcttgtgggagttaatcagccacatccaatgttaccttgagggggaagaagagggtgatgctcagaagctaaacaagacaggggccacatgaccctctattgattagccccaagtagaaagtcctgtggttttatgtttaatggtaatagttgatcatatatggcataattttctatcagcttcctactcagtcactataaacacagacttgaaatagtactttaaatgtccaaatacctaaatgtgctaaactggaggtaactatttctaggtagttgaatttttgaaagtcatgatcagccacacaactgttttgtacatacttattttctcatgcacttttctgtatgcaaataaagctataaatttactcatttcaataaactggagtggcagaatatca

SEQ ID NO: 9573 - DNA, 424 bp, Homo sapiens
agcaggttccaggggaattgaaagtaagccacagatgagctagagaaggctgctgataagaatatgttgcacaaattatctggcttatccaggtgctctgccgtgcgtctaacccgttgagcctgtgtgttatctccacgtgacttaatctgtgagatcttgccacaggttaacttgctcgtgtgtacaagaggcggacattcctttcagtgcagtcggaactactgttgatcaagcagagagtggcagttactgaagtgtccctgcaaagtggaaacacacctgttccttatacagttggctctcctaacctcagatttcgcatctgcagattcaaccagccacagatggaaaatatgtgaatagaaaataaaataaaaataatgcagcaattaaaataatacaaataaaaacaatacagtat

SEQ ID NO: 9574 - DNA, 348 bp, Homo sapiens
gagattactgtcacaacacaggcaactctaagcaatgttatgaaaagatgtacaaataggagatcttaatgtgtgattgactaaattagatcagtattgagtgtctctttcagaggacatagacaaaaagggtaagcccagaggagagactgggatgatgaggttgagatcctacttgactatcagcttcagcaagagccttaaatattaagagacatacctgaaggccgtgatataaaagaaaagcctctctcccacctctagaggaaagaactggaccgattttagggaaatgcatttgatcttaaatttcatcacagccagaactataaaatatgaatgtattag

SEQ ID NO: 9575 - DNA, 424 bp, Homo sapiens; identical to SEQ ID NO: 9573

SEQ ID NO: 9576 - DNA, 1010 bp, Homo sapiens
attcaaaatgcatggcccagctgctcctcatattgaagttgcgaccatgggatttggcaacattgagctccggctctgggcattgctctcacagctgagagtgacgcccaggctctggcagcccagacttgtcatcctgtaaatgaacaatccccagtccccgggcctcattttattcacttggctgagctgcctgtttgctttccgttctgtgctcgccagctcactaagcaagaggatccgtgcctgactgcgtggagaagctgtagaggaaatggccaccctgactgtcccagcacctcccggggtggcccggggcctgggccctgagcagaactgtgataaagggaagcagggaagcagtgcgagagccctgaccaggtgcaggagcctgattccgaatccacctctgccatgggcagattgcatgatgccatcagagccctctaacctctggccttcagttgtcacacctgtaaaatggggaaatattctaaagaagtggctcaaaacctgatcatccatcagcctccccccaagaacatggggacagtgcacatggcaaggccccatgcccagagtttctgattccacagtttgggatgaagcctaagaatgcgcatttccaacaaggcttctggtgaggctgatggcccagggacctcactttgggaagctctgtagtaaatccagtttctcagccagtctgctctgtagagctcctgagacagactctttccctaggcctcccctgaggttcttacttaagcaagtctccatttttcaaaagctctgccaggtaactctatatggcactagggctgagaggcactgggtggatgtttctaagatcccacgtagctctcacatgccaggatgccatgattttgaagcagagtgcctcctgccttgccaaggctgacagcacacacagggcaaaaggccatcgtcacatattggaatttcactctttgaaaacctggtaatcgtgtgtcccatttcagctcgag

SEQ ID NO: 9577 - DNA, 563 bp, Homo sapiens
acaagagacttatttgggctaatcagcctaaagaggatgatgcatataatatgcataggagagatctctctgtctgtgtctgtctctgtctctgtccctctctctccctttctctttgcaaaacacgcattcactgttgccgtgaactgccacagatagctccatagtgaaactgaggctgaaaagggtagagtaggggcacaaagtgagccgtggctcttcatggcatcactcagactcagctgccttgagccagctccacccccgactcccaggtattcaacataataaatttggtggtgttgttttgttttgttttgtttttgtttttgtttgcttttttttgagatgtagtctcactctgtagcccaagctggagtgcagtggcatgattcggctcactgcaaccttcacctcccaggttcaagcgattctcctgcctcagcctcctgagtagctgggactacaggtgcatgctaccacgcccagctaatttttgtgcttttagtggagacacggtttcaccatgttggccaggctggtctccaactcctgggctcgag

SEQ ID NO: 9578 - DNA, 563 bp, Homo sapiens
acaagagacttatttgggctaatcagcctaaagaggatgatgcatataatatgcataggagagatctctctgtctgtgtctgtctctgtctctgtccctctctctccctttctctttgcaaaacacgcattcactgttgccgtgaactgccacagatagctccatagtgaaactgaggctgaaaagggtagagtaggggcacaaagtgagccgtggctcttcatggcatcactcagactcagctgccttgagccagctccacccccgactcccaggtattcaacataataaatttggtggtgttgttttgttttgttttgtttttgtttttgtttgtttttttttgagatgtagtctcactctgtagcccaagctggagtgcagtggcatgattcggctcactgcaaccttcacctcccaggttcaagcgattctcctgcctcagcctcctgagtagctgggactacaggtgcatgctaccacgcccagctaatttttgtgcttttagtggagacacagtttcaccatgttggccaggctggtctccaactcctgggctcgag

SEQ ID NO: 9579 - DNA, 1613 bp, Homo sapiens
acaacaccaacatatctgcagcccatagtgcaaatgtccatgtatgtcagattaaatgttacttattatttaggtctgttttttaaattaaagtttgcacttgctttgcagccagccaggcagggagtcattacctagctctttcacttactcatgtgccaatgtgaatgtgttacttcacttctcctgcctcttgtctacagtgggcaggaggtaagcctcacggtgtgactgtgaagccaagtgaaatctcacacctacctcagaggcctttttcccactctccttttctgactcttttaatattttctcaattatttatagtaataataataatacaatgccaattgttcattcattcatccatttaaatcccaaaggaatttaaaagaagagtaacatttaacctgacaaagacaaaaggaggaagctttttaggtaatattaattataataaagtaacaataataacaacaataataatagcaagctcatataagcaagaagcaatagtcagtgtgtcatgttttgggggaattaagaatttcaaatagttcattttaacaccacctttctcattccttattctcctaccccactggcctgatcacttctagaaacttccagattctttacctcttcatgacatttataattgctgttctttttttggaggtacaatatacatataaaatttaccatctttatcatttttaggtgtacagttcagtggtaatatatctaaatttatattctttatttttctgttctttatgtctaggacatttcaatcctcaacacttcacattgctaaatcctcatctctcaagcctcagcttaaatattaccttttcagagagaccttcacagatgatgtaatataaatcactctcccctaccattattctcaaagacagaaatctattttctttattttactaatcacaggctgaacttattttgctgactttattatctgtctctcctacttgacagtaagttcaacgagggccaggacaaagtctgtagccccagcagttagttagcctggtttccatacatatcatttactcaatagctatttattaactggataaatggaaatgaatgcaagtgataggatagatacagaagagattagataactaaaccaaggtcaggaaatgccatgctaaacgtttgcactaaatctttaaaactctggaaaaatcctgaaggatctcagtggacaaatgcctccaatacgtttctattaaggaaaatcactctcataagaatgtaggggaattgactggaatgagagaactgagggagggagatccattaagggtctgactgcagtaattcagatgagaaatactgcaaaagcttaggctaagttagtggctataaagatggaataaatagagtcaagggttattacaattgaacagaatgtggtgtctgactagaaataaaaagacaatctagagaagtccaaaatgacttatagatttctgacctgggcaagtgaatagattagaaaacaagatttgtagggaaagatgaaaaacagttattggatattttgaatttgatgcaattattggatatgtttcagtctggagctcgag

SEQ ID NO: 9580 - DNA, 1616 bp, Homo sapiens
acaacaccaacatatctgcagcccatagtgcaaatgtccatgtatgtcagattaaatgttacttattatttaggtctgttttttaaattaaagtttgcacttgctttgcagccagccaggcagggagtcattacctagctctttcacttactcatgtgccaatgtgaatgtgttacttcacttctcctgcctcttgtctacagtgggcaggaggtaagcctcacggtgtgactgtgaagccaagtgaaatctcacacctacctcagaggcctttttcccactctccttttctgactcttttaatattttctcaattatttatagtaataataataataatacaatgccaattgttcattcattcatccatttaaatcccaaaggaatttaaaagaagagtaacatttaacctgacaaagacaaaaggaggaagctttttaggtaatattaattataataaagtaacaataataacaacaataataatagcaagctcatataagcaagaagcaatagtcagtgtgtcatgttttgggggaattaagaatttcaaatagttcattttaacaccacctttctcattccttattctcctaccccactggcctgatcacttctagaaacttccagattctttacctcttcatgacatttataattgctgttctttttttggaggtacaatatacatataaaatttaccatctttatcatttttaggtgtacagttcagtggtaatatatctaaatttatattctttatttttctgttctttatgtctaggacatttcaatcctcaacacttcacattgctaaatcctcatctctcaagcctcagcttaaatattaccttttcagagagaccttcacagatgatgtaatataaatcactctcccctaccattattctcaacgacagaaatctattttctttattttactaatcacaggctgaacttattttgctgactttattatctgtctctcctacttgacagtaagttcaacgagggccaggacaaagtctgtagccccagcagttagttagcctggtttccatacatatcatttactcaatagctatttattaactggataaatggaaatgaatgcaagtgataggatagatacagaagagattagataactaaaccaaggtcaggaaatgccatgctaaacgtttgcactaaatctttaaaactctggaaaaatcctgaaggatctcagtggacaaatgcctccaatacgtttctattaaggaaaatcactctcataagaatgtaggggaattgactggaatgagagaactgagggagggagatccattaagggtctgactgcagtaattcagatgagaaatactgcaaaagcttaggctaagttagtggctataaagatggaataaatagagtcaagggttattacaattgaacagaatgtggtgtctgactagaaataaaaagacaatctagagaagtccaaaatgacttatagatttctgacctgggcaagtgaatagattagaaaacaagatttgtagggaaagatgaaaaacagttattggatattttgaatttgatgcaattattggatatgtttcagtctggagctcgag

SEQ ID NO: 9581 - DNA, 946 bp, Homo sapiens
gtgtattttgataactcagtttcccaccttttttctccaatcagagtcgcggcgaggagctttattaatatgctgcaatttcaaatgacctacaaattcttagaagtgtaaagaactaaaaatatgtaaccaactaaaattgggttgtgggaggctgcagaaagcagagagagactaattcaccattgctcaaaataaagtgtcaatactgtctaaagaatgtactctccaaacttcacatcaaacttttttgggatgcagtgcgatgtggtacagagagtaacaggttttggagtcagatggctctgaattggttgacactcttactaacttggacattcgaaagttatgtagtcacttattttcctcatctgtagagaaaggctacactggtgaaatgagatcatgaagctaaaatgcccaaaggtaggcctggggcacagttggttatcattaataatagttattatcagttgtagatacttaggaggactaaaataaatatggaacccaatatcctagtagatgagtaagagagggttcgcagacctcgtgggtgtgaacgtagggagtgttgtatggagtcagaccaaccaaacaaagggagttggcatttgcggtcactcagattttatgcagccaggttactgctggctctggatggttgacacacagtgtgatgtttcactgcatttgtatcaagataatggcgcaaccatccccccaaaatccagcattattcataatcgcatctttcatcatcaatttggggaaagtctttggtacacagtcaattcctggggatgcaaatgatgatttcttccttttttttttgagacggagttttgctcttgttgcccaggctggagtgcagtggcactatatcggctccccacaacctccgcctctggggttcaagcgattctcctgcctcagtctctcgagt

SEQ ID NO: 9582 - DNA, 164 bp, Homo sapiens
ggcctatttcttccatttttaagtattcacatctcttttttttttttttgtgatggtgtctcgctctatcacccaagctggagtgtggtggtgagatcttggctcactgcaacctctgcctcccagttcactctattctcctgcctcagcctcctgagtagctg

SEQ ID NO: 9583 - DNA, 1115 bp, Homo sapiens
cttgccttggcctcccaggcatgagccaccatgcccagctgttttctctgttttatcctggaatctccatgggcctcagcttagcaattgtgagggtgggtatgcaggaggtggggtgtgaggaggggctggcaagcaacctttagaagcaggtctgaagggacttgtcaggggttccccaggtaggaaataggggtcacctgtgcccccagcccacctgccattgaggtgctagcccccagaggctgttatctttgtatagatgctgggggcatcaggacagcctgaaacactgtttccaggagtacagcatagaaaataagtctttccatccaaattggaaatgaaaaggccctggtacttgacagatctactccagtgacttggaacactgtgtgggagacttgtccttggcagcagtagaaatggggcggctgtgaactttctctctgtatccccaggcacatgtgtgcagacttgtcaggccctgtggtccaatcggatgtagtacctggctcttatccgggcatttggtaactcgagtaaaatggacttttcctcttctgctgcttgtgtttctacctttggggccatatcatttgtggcatcgtgccctctaggacctatagcttttgggagtgttggtagacacctattctactagcagagttttttcccccaaggcaggtgttttgatgagggcttgggtcacagcctcgggactcatggctgctctgtatcttccatcctgctggcctggaccacacggttccatgactttgccagattccttggcaggtttcattaagagagatgcacaggccggacgtggttgctcacacctgtaatcccagcactttgggaggctgaagcaatcagatctcttgagctcaggagttcgagaccagcctgggcaacatggcaaaaccccatctctacaaaaaatacaaaaattagcccacgtggtggcacacacccgtggtcccagctacttgggaggctgaggtaggggttgagccctaggggttgaggctgcaggaagccatgatagtgcccctgcacacttcagcctgggtgacagagcaagaccctgtctcaaaaaaaaaaaaaaaaaa

SEQ ID NO: 9584 - DNA, 1114 bp, Homo sapiens
  SITE (1114): n equals a,t,g, or c
cttgccttggcctcccaggcatgagccaccatgcccagctgttttctctgttttatcctggaatctccatgggcctcagcttagcaattgtgagggtgggtatgcaggaggtggggtgtgaggaggggctggcaagcaacctttagaagcaggtctgaagggacttgtcaggggttccccaggtaggaaataggggtcacctgtgcccccagcccacctgccattgaggtgctagcccccagaggctgttatctttgtatagatgctgggggcatcaggacagcctgaaacactgtttccaggagtacagcatagaaaataagtctttccatccaaattggaaatgaaaaggccctggtacttgacagatctactccagtgacttggaacactgtgtgggagacttgtccttggcagcagtagaaatggggcggctctgaactttctctctgtaaccccaggcacatgtgtgcagacttgccaggccctgtgggccaagcggatgtaggacctggctcttatccgggcatttggtaactcgaggaaaatggacttttcctcttctgctgcttttgtttttacctttggggccttatcatttgtggcatctgccctctaggacctatagcttttgggactgctggtagacacctattctactagcagagttttttcccccaaggcaggtgttttgatgagggcttgggtcacagcctcgggactcatggctgctctgtatcttccatcctgctggcctggaccacacggttccatgactttgccagattccttggcaggtttcattaagagagatgcacaggccggacgtggttgctcacacctgtaatcccagcactttgggaggctgaagcaatcagatctcttgagctcaggagttcgagaccagcctgggcaacatggcaaaaccccatctctacaaaaatacaaaaattagcccacgtggtggcacacacccgtggtcccagctacttgggaggctgaggtagggggttgagccctaggggttgaggctgcaggaagccatgatagtgcccctgcacacttcagcctgggtgacagagcaagaccctgtctcaaaaaaaaaaaaaaaaan

SEQ ID NO: 9585 - DNA, 1115 bp, Homo sapiens
cttgccttggcctcccaggcatgagccaccatgcccagctgttttctctgttttatcctggaatctccatgggcctcagcttagcaattgtgagggtgggtatgcaggaggtggggtgtgaggaggggctggcaagcaacctttagaagcaggtctgaagggacttgtcaggggttccccaggtaggaaataggggtcacctgtgcccccagcccacctgccattgaggtgctagcccccagaggcctgttatctttgtatagatgctgggggcatcaggacagcctgaaacactgtttccaggagtacagcatagaaaataagtctttccatccaaattggaaatgaaaaggccctggtacttgacagatctactccagtgacttggaacactgtgtgggagacttgtccttggcagcagtagaaatggggcggctctgaactttctctctgtaaccccaggcacatgtgtgcagacttgccaggccctgtgggccaagcggatgtaggacctggctcttatccgggcatttggtaactcgaggaaaatggacttttcctcttctgctgcttttgtttttacctttggggccttatcatttgtggcatctgccctctaggacctatagcttttgggactgctggtagacacctattctactagcagagttttttcccccaaggcaggtgttttgatgagggcttgggtcacagcctcgggactcatggctgctctgtatcttccatcctgctggcctggaccacacggttccatgactttgccagattccttggcaggtttcattaagagagatgcacaggccggacgtggttgctcacacctgtaatcccagcactttgggaggctgaagcaatcagatctcttgagctcaggagttcgagaccagcctgggcaacatggcaaaaccccatctctacaaaaaatacaaaaattagcccacgtggtggcacacacccgtggtcccagctacttgggaggctgaggtaggggttgagccctaggggttgaggctgcaggaagccatgatagtgcccctgcacacttcagcctgggtgacagagcaagaccctgtctcaaaaaaaaaaaaaaaaaa

SEQ ID NO: 9586 - DNA, 499 bp, Homo sapiens
cacacatgtgcatttgcagaaatgcacccttgcacttgtgtgacacacctgcacacttgcatacacccatttgcatacaggcacagacacactcgcatacatttgcacacacagccacaaacttgcacaagcagcacttgtacactgacacatatccgtttgtgcctatacagtgcacacttacacatttgcacacagctgtgcttgctcacacatttgcacacacccacctacacacttgcacacatactacacacttgagcgtgcagcacacatacctatgtgcatacatgcacatttgcacatgcacacagcagtggcacacacttctctatcactctccctagtcactgttctcccctgtgattcccacccctctgaccgcccctgctcacttgctgccccctccactggaaggggcctggcctggtgccctgtctctgtctgtctccaccgtgcagggaggtttcacaaggactggctgatgtctcgcctcgag

SEQ ID NO: 9587 - DNA, 970 bp, Homo sapiens
gaaactgaggctcaaagagccacagcgggacggaggaggtggacccggctctgatgcaggtggctggttcgatggcagactcccctgtgccgagactcccagaccaaatccggaggtcctggagtagagtgggtgggtccgccagggcatggccaggctgcctgtctctggagactcccccaaggaagtttcttgaccttgaggatgataacgcagggcaggctcttgagggctgtgcagggactccctggagagccctgggaaaagcaggtccccgcctgcctgggcctctgcctctgctgcaggggccagcacaggtgtcaggtccccacacatttcatgtccaggccattttcccactctagggccaaggctgggcacttcccagtcagtggcacagctggtactgtggggtctctcgctctgcaaaggttggtttcaatcccaagtgtcactgctggaaacactggccaccccgggacatgtggtcttgccagtccttctgcagggctctgtttcttaggtcccaatcatctgcagggagcactagtccgagatcttccaagatgctgggcaggaacaagcctgctatgctcattcccaaaggactccacatctagataaatgaaggcctggaaggctctttggctctacactagcaaaacagcttacgtcaccctgcctaaagagacagtcaggaaatccccttgttcctgggcgaggagaagctggcccacacggagtgacggcattgagcagatactacccttggctcgctcatggatggggcggggcctgctgaccttgacagcaatcaggggagggggtttggagggaaggggttagctggtgaaggtgagggaaaggactggagttaggacagggtgcagcgaccacatcctgtgacgaggaggcatctgtgacctgtgtgatctgccaggcaggcagcacaagtcattgtactgctact

SEQ ID NO: 9588 - DNA, 585 bp, Homo sapiens
cctcattttctctccttttcatgctaactttcccactattaaagagcatttttaaaaagaagatgaaaaaaggcagagagaaaagaaggatgaaagtgtgagcgggtatccggaagtccttttcaattgcctgctgctgtgcagggtctgaactaagagcaagaaattggaggatgctggaggggcgaggtttcgtttcagtcctgcctattgggccaagtctggggcggggaaggagaggtgatggaggtgggcctggctgggccctgcggccctggaggctgcccctctgcctgccacccagcccctggcctgtgcctggcacaggaagcccgtcaataatttcttgttgaatgaatgaaagaaaagaaatcagtggatggagaagggctggattcttttgtggggaccttccacgccaccttctctgtggggctctagggctgagaaagaaaggacagatttggcaaaggtcaggcaggggctgggaaagcattaggtggaccaggcatgctacagcaaggccacgcctgcactgttgtcccactggtgacacccatgggtgcagccatggcgggtgggcgc

SEQ ID NO: 9589 - DNA, 2695 bp, Homo sapiens
gaatgtatgtgtccctccaaaattcatctgttgaaacctaagacccaatgtgacagttttaagatgtgggaccttttgggaagtgataagtcccgatggctctgcccacatgaatgtattagtgagtgcccttgtaacagggctggagagtactatctacgtaggccctctttgccttttttttttttttttcctttctctcgaggtcaccatgtgaggactcagtgttgtggagccactagaagctgaaaggggcagggaaggaaatctcccctagagcttttggggattacggccctgccaacaccttgagttctgacatctgggctctggaactgtgggagaatcaatttgtcttcagccccgcagtttgtggcaatttgttacagcagctgtaggaaatgaacacaccagccacctagaaaaccaccagttcagatgggtgggtcagattccaactccacctgaagggataattctagttttctccctcctcatattttcaactccgttttctgacaagaaacctggcttctgtgatgcttaatagattgacttctttggtcagtcccccatatgacagcgacctccctgctcctctgccacccttggccctgagggggctccctcccgacctccccactggactcagggcagtgtcctgctctgggcacacacccatatcctctgtctcacctaatggctagacacacattactcggaggggaagggaaggagaagggtagaggaagaccagccctggtttatgcccacccttgctggagcatctcgactctcggtgcactgccctgctcccctgggaggtgctgggtgcccaccgtgccaggctggaatgcgggtgcccctgcaggaggctgagcctgtatgtgatcacacagtgcaggggtcaggcttcgatgtaagagtggcaggagtgcgtgtcaccgtcttaccctcccctcctcagagcgtcccgacgcacctgcaaaacccagtgtatctttctacacatgtggtgtcattggccaggccagggcttggctcctgggagtggtgctgcaggcaaactggggagaattgagatcctttatttcagttaggataaggcatgcatttaaatgtcagaggcatttcctggtggcataatggatatttatcccctattagatagggagcaatctgcactgaagaagccttcagattaaatttcagggatgaaccaagattcatcctgacaggtatatagatcctcaaagaataagtcctcataaaatagcctaaaaatgttccttatggcagttcgatactttgtaaagagcccttattatttgtgcttgataatgtatgacttaaatttaagaactgtttaatacaagcatgtcctttctccctaaagtgattcattcattcattcattcacacagatttttctaaatatctaatattgaccagacactgggctaagcataagctaagtactctgtttttagagagctcagtagggtggggaacacagattgctaagtcagtagtacaatgtttatcgatatgggcacatcaaaagatatgatacttagtgccctggggacacaaggtgggaggttctcctttgcacgggctttcctgcaaaggctctgttgctctatcaatcaaacagcaggacataggcaacctaagcaaagggaaatgcttgtaggacttccaggattgattagatatggacagcaggtttgacagtggggaggagcaaaggctatgctgcagggctgcccctgttccttccatcccgtggaactctgtcaagatccaaagtccagaagacagcatctacctgaccaagcttaagtcatatgtctgctcataaacttagggatggggaagggaagggaagggcaaagggagaggtgaaatctgtttctttccctttcagtagagatgaaactggtgcctggaataattaccttcttactaagattaaacacactagggagttattctctaaaaggaaaacaaactcagattaggaatgaagaatggaagctggacaaatctttacaatgaccaatgactcttacctggacattcaggcatggggaagaatatgggtaaaggcaagtccttagtaatactgctgaactgctggatcaagccttacctgaaaccaactgaccttggagctttccagttatgtgaacaagtaagtgtcccctatgccctcccattttttgctctaagcccatttgaatttggttatctgtcagtgtaaccaaaatatttctaactgatagacccccagaatgttttttaataagattctaggcagtcttttttccctaagaaattattgatttttactcatttttcagtctctgagtgacatttgtgctgcacgtttatagctcatatcagatgactgatccagctgataatatcacattttcaagtcatttatctcagataggtagtgtacaaacaaaatgatgtttgtgccatgtaggctaatttttaaaattgtttttgtagagacaagatctcactgtgttgcccaggctggtcttgaactcctgggctgaagcaatccttctaccttggcctcctaaagtgttaggattgcttgtgtaggccaccatgccctgccacattcttgttttcataattaatctgaaatttgttttatccttaagagttgttttta

SEQ ID NO: 9590 - DNA, 427 bp, Homo sapiens
ttttaacaaaatagggatgctttccctatttcataaagttgtgattagatcatagaaagtattatcaaatggaatcatgataactgctatttatggagggtcaagtctcacaacaaccttgcaagtaatattctctttaaagagctgggaaatcaagcccagataattcataagcacttacaacatgccacacatccctatgaagtatacaaactactacaattcccattttatagatgaggaaactgatggaacttgcccaagaccacataactaggaagtagtagagtcaggattcaaatctagaaagtctggctcttgttcagctgggctaggaagttgatgcatgtggtgcagaggacacatgggaagtgggagagatgggagtggtgcccagttctagctccaaaggccatgctggtgcctc

SEQ ID NO: 9591 - DNA, 516 bp, Homo sapiens
taccattgaaacaggtaaaggtttattatatagaatggtgaaacataaagaaaataattttattctttttaaggagccttcattaagaaaacccaatttaaagatatttctgtttccaaataatttatgtatatttgttgcagcataattctccaaacatacctaatgtaaaatacaaaactatttgaaaccgaattcaaatataaaatatatatgtgtgtgtatatatatacatacatatgtatgtacatatatgtatatgtacacatatatacatatatatgtatatgagctataaatgactgtgctaaagatgcagaaacctgaagactcatcagtgcgtcctcaaatcaggcaggttggtcagccaccaacaagcctcaccttttcaagtccttgcccaccaattaagggaaaatgtctataatgaaccatagactaacaaagattttataaaatgactttcaaaggattttttcccgaaatgccctatgtgatctggcaactgcctccttg

SEQ ID NO: 9592 - DNA, 3297 bp, Homo sapiens
gtcccctgggaacaggggtgggagaactagaggatgtctgagtaccaaaaaagaagtgggaagacaggggcaagtaccctacatttctgattatcattttaaaaatgtattttattcaacttggaaaatgagtacaaatccctgggtgttttttgtcagggaggagtggggagtaggcaggaaagagaagagggtaggaggcaaggtaaggtatgagcatcacagtggctgcctcaagaccctgcccagggagggtggggtgggctgggggttgagcacggagctcaggtccggaggaacaccatggtgaggaggcctggaggggggacaaagaaagaatagggtcgcatgggcagccctggggctctgttagctctcctcccgtcccttctccctttttcctggggcctgggtccctggccactactgtcctcacccaagacgtaggcggccaccaacttttgtcccagggagacgtgcaggacttgaggcagctggctgccgagttcgtccgggagtgggagcagcaggaaggccacagacacaatccccgtcagcaagaagaggaggaaggagctggtggccagttgctggcgggggtctgagaaacaagactcatcagatgctgcagcccccactcctgcccagcccaggtcctccagggagaagcctgaacaaggaagatgtatctactttttttttttaattatcttttattttttgtagagatggagtctcactacgttgtccaggctggtctggaactcttggcctcaggtgatcctcctgccttagcttcctaagtagctgggactatgggttcatgctaccatgcccggctaatttttaagttgtttgtagatggtcttgctatgttgtccaagctgatcttgaactcctggcctcgagcaattgcaatcctcccaccacttcagcctcccaaagcactgggattataggtgtgagtcaccacaccctgtatctacttttttttttttttgagacggagtctcactctgttgcacccaggctggagtgcagccacacaatcctgactcactgcagcctctgcctcctaggttcaagtgattctcctgccttagcctcccgactagctgggattacaggtgcgagccaccactcccagctaatttttgtgtgtttttagtagagacggggttccatcatgttggtcaggctggtattgaactcctggcctcaggttatcagcccacctcagcctcccaaagcactgggattataggcgtgagccatcacaccctgtatctactttttactgccctccaggggtacactgcaagtgtcctctccttcctacagcctctgtccccaccaccacaagaactctctcctccagtccctcagcattcattttctctcttctgtggacctatccgacaggcagggacctctcttgatctcatacccagcacacaacttggtacagggttaattgctcaatacaggtttcttattgaactgaactgagctaccacatgataggaagtactgcggttacagtcaaggaagaactttttcctctaagtagaagtcagaaaccagggaagctgtaagtcttttccccctcacctgatataaaatctcaactcggaggaatgtttccaccaaaagacaaaagactgaaccaggagacttcttcaaatccaatttatctcatctctagggaaatgctagttcctccctccctacagaactcaagatcccagtctcccaactcacgctcctggaagtgtctggccgtgggtggtggtgtcccagcaggaggccctgggcgaggcgctggatctggctgtccctgaagctcaagggggtacgctggggctctcagaatggaggtaatgtccttgcgtcccaccactcggccctcagctccttcctcagacagctcaatgcggaagcggtcctggacatcatagtggctgggaatgggtgccacatggcgaatcacactggtcccaaggtaggagagaagcccattggggtgaatgaggcagtaatccaaggaaatctgggcctccccccagaagtctctcccttaggggcacaggcagaggatagggcaaataggttaaagggggcaaggtctcagacctcagacaacaggtggcagcgacccctggcttccacaagcctccccaccctcccagctcactcacatgtcaatgcaagactggggcttcacatatccctctgcgtcaaacaccgtgtatttggcaggtgctgtgcacaggactgggggatagagacacacacagacaagccctgccatgtgggtcatttaagtcccctctgccttctgccccggaggctggacatgactttcccagtccaccaaagctggacgtgcaaccctacccatctgactcctccagccaacacaaccccccagtgtccggccaccagcccccacgaggcgccgatccctttacctcggaagcgaagcgcagttcctgtggggttatagagggtcagcagctgtcggggtccgctccgctggtccgccctgaatactagatccgggggaaagaccaggaccgggacaacgggtcccaagggaggaggggcgccccgggacccccgcccagggggccccggacccaccagctcctggtcctggggcgccccacggcgcatgcaggctctgggcggtcggacatccgagggcagagctcaggggacagggcctggagtcagagctggggggcgtgaggggcgaaaggggacaagatgagctcccggagcagggcctcgactgatgccgccgccgccttggaaccccgctagatggggctcccgcagacccaggcccagggcccccaagacctttcctcttccagctctgccccaggttccttcggacccgccgagccccacctcgacggccacgcccaccccgctaaacccggcccctcgcagctcccaacccggccttctcctcacgcccagctcacgatctccataagccccgccccgccgctggcctcgccccttccgggcgttcccggacgcccgcctcctctctccagccagactccgcccgctgcagcgggcgcctgcagagcgacctgtgacgccgcctgcttcctgggagacctgtgtttgcgtctccggcccctccctaagctcggacacgggccccatcgggcttctgcctcaaaacggtcgctcgcgttaggatgcccaccttgtggttaaagcacctgccagtcagcttgtggtcagattaatgttgccatgttccagagagtccttttc

SEQ ID NO: 9593 - DNA, 434 bp, Homo sapiens
ttgggtgtattttttgtatttttagagacaagagttcaccatgttggccaggctggtctcgaactcctggcctcaagtgatccactcgcctcggccctgcaaagtgctgggattacaggcatgagccactgtgcccagccaagggagttgaagtcttaaaggaaagacccaggaaaacagatatagggtccaaaaggcagaaaaggattctaggggttgtaaacacccaggtaaccctggtgaaaggctttgttgcctccagatggtgggacaggagttccaccgcaggcaggattaggtggtattttcattcatttctttttaggttaatacattggcttagggacaggatcctattccagggctgaaggggatcttgagaatcaacttgcccaatgctctcattttgtaggtagaatctacagctcagagaa

SEQ ID NO: 9594 - DNA, 152 bp, Homo sapiens
tttgcttttttttttttttttttgagacgaagtctcgctctgtcacccaggctggagtgcaatggcacgatctcggctcactgcaaccaccgcctccagggttcaagcgattctcctgtctcagcctcccgagtagctgggattataggcgt

SEQ ID NO: 9595 - DNA, 460 bp, Homo sapiens
cccagctttagttgctggtgcccagatcatatcgtggaattgtacaggtgtaagttaaaaataaacttagagcaaatgattctcttttgattccctacccaatccacactcttccctgtcccctctatgtcattcctggcaggtggacatgaagctccaggtaagaggcaagcatccgtgttcaaattaccattcccagtttgaatgactttgtttgcaggatcttacttctgcttaactaaatttgtaccccaccctctatgcacttaaaatccctttaaaatttgttgatccttagttacctccctggagctccttctatttatacacaataactggtttccaaatattgaaaatcaactcttgtagcccctctagtttttgtttacttacttgcttcattccccacgggctgaacactccagttccctggacttttctcatatgatatgtactcgag

SEQ ID NO: 9596 - DNA, 460 bp, Homo sapiens
cccagctttagttgctggtgcccagatcatatcgtggaattgtacaggtgtaagttaaaaataaacttagagcaaatgattctcttttgattccctacccaatccacactcttccctgtcccctctatgtcattcctggcaggtggacatgaagctccaggtaagaggcaagcatccgtgttcaaatgaccattcccagtttgaatgactttgtttgcaggatcttacttctgcttaactaaatttgtaccccaccctctatgcacttaaaatccctttaaaattcgttgatccttagttacctccctggagctccttctatttatacacaataactggtttccaaatattgaaaatcaactcttgtagcccctctagtttttgtttacttacttgcttcattccccacgggctgaacactccagttccctggacttttctcatatgatatgtactcgag

SEQ ID NO: 9597 - DNA, 303 bp, Homo sapiens
gggcacggtggctcatgcttgtaatcccagcactttgggaggctgaggtgggtggatcacgaggtcaggagatcgagaccatcctggctaacacagtaaaaccccatctctactaaaaatacaaaaatttagccgggtatggtggtgggcacctgtagtcccagctacttgggaggctgaggcaggagaatggcgtgaacccgggaggcagagcttgcagtgagccaagattgtgccactgcactccagcctgggtgacagaacgagactctgtctcaaaaaaaaaaaaaaaaaaaagaaaga

SEQ ID NO: 9598 - DNA, 296 bp, Homo sapiens
gggcacggtggctcatgcttgtaatcccagcactttgggaggctgaggtgggtggatcacgaggtcaggagatcgagaccatcctggctaacacagtaaaaccccatctctactaaaaatacaaaaatttagccgggtatggtggtgggcacctgtagtcccagctacttgggaggctgaggcaggagaatggcgtgaacccgggaggcagagcttgcagtgagccaagattgtgccactgcactccagcctgggtgacagaacgagactctgtctcaaaaaaaaaaaaaaaaaaa

SEQ ID NO: 9599 - DNA, 1003 bp, Homo sapiens
catcaaaaagatacacgggcctaagataaaagatcaactaaacgtctcgtaaagcctctaaacagggcaggaaagcctgggccaacgtggagatgttacatcaaaggcagcagcagctcagtgatcctcacacacagtgggctgaagttaaaaaaagcagagtcatcagtggttcacaatttacattataattgtaatttattatttgcatgtatagttatattagtttatgctttgtttgatatttcatgtttaccatatctttatttgaaatatagtaaatatttatttctatacatatttggaaaaaatatattctgaacaactttttcttaatgctagcatccctggtgttgtggcacttttcagaataaaccctagcatggtcaagatgattggcattagccttcttctttaatcatctcaaaccattgttccctttgcttactatagtctttctgtgtttgcctccttttcatttcttactctaaactctttcctgccatagcctttgcatttgctattccctttgtctggaaggttcttgccatgactctgcatagtggctttactgacacatatctacaacacataatttgtacagagatctaaatattttttccagatttacattcaatgacctttgtataacagatatttctattatatcaagtactgtgttatctacttggaaatattgtcctatcttaactttgccacttgtcaattaattaatatcattgccatttgaggagtggaggaatttcagagtggcttagtgattgcacaaagtcatacagctaataaacaacaatgccagggtttgaacccagggtttctgagtttggatctcttttgcattaatctctgacatcactcatgcttttgcctttctgtatccagcagtctcttcttatctatttttattattatcaatggtagtttttgaaattgtactctgtgtaactgatgcttttatgctttatttgacttgtataatcat

SEQ ID NO: 9600 - DNA, 116 bp, Homo sapiens
gctgaggcaggagaattgctcgaacccaggaggcagaggtttcagtgagccaagatcacgccactgcactccagcctgggcgacagagcaagattctgtctcaaaaaaaaaaaaaa

SEQ ID NO: 9601 - DNA, 1849 bp, Homo sapiens
taagtccctatgaatgaaaccatgacattgtgcaatcaaggcaggaatgttcagactccaatcctgctgaaatacagaggtgatctttgccaatgaggcatcgtggagactccattacacgctccagcaagcaaacctgttatcctcagtggcccatgaccattcttgctgtcagactttgctccgtatgcactgagcccagagctgattttatctgccatgaaaagaggatgtggaacaaagaagggaacagagtttggttgcagagagaagtgtatgctccaagaaccagatgctaagatgggattaaatgtgcaaggctattattaggggagatgcctgtggcagaaaatggggagagagatggacaaggctgggcaagtcatcagatcatgatgcaaggctgatctgagtgaaggaaagagggagaaaaggtagttggacatattctaggctgccatgcagttaaggagtgttcagctagggcattgggggtcctggagccagtgtcaactgacataggacaggaatgagccttagtatctttgccatgaccagttgttggtacgtggcctcaccacaaacacagtgatggatttcagagcccagcagctgaggccgatggtcagttatgctctcatggttaaaggtcttccaggcacattctcatgacagccacgatatatttttgtaagaaattctaccaaggcaaaatatgattaagataggtagccaaaacaaacaaaaaagaaagaaaagccgcaaattcctccctgcttgctctttatgcatgctcctttgcaatgtgattttgctattagctccatcaagagatgggtctccttgaatctgagcttgaccacgtgaattgctttgaccactggagcattcacaaacatggcacaacggaggcttgaaaaatgcatgtgccttgggacttgccctctcttgttacttttggaaccagagacctccatgcaatgagcctagactagcctcctagaagatgaggacaagaagaagcagaaatcaagcaccttcccaccaccaggcatgtgagtgaggccatcctagactgtccagccccagccaagctgtcagtgaccacagagaccagctaagccaaactaaaaccgaaaggactgtgggaaaacctatagtactgtgagaaaccataaatgcttgttgttttaattcactcagttttgggacagtgtgttatgtagtaaaaactaattgatatcatttatgtccattttatagatggaggaactgaaacctggagacatgagaaagcccctcaatgaatggaagtctcaaggtgttcattggtcttcctcagagcctcctacagcaagctgggcttgatcggaaggctctgagtttgggggtagctttactcatttgtgttatttgcctaaaccctggagtctactgagatcgagacccccgaatttgatcattaataaatctcttttggatgaataatataaaggtgttaggaggcccttctaggccattgaagccactagaacagaagtcaaggaattctcaatcttcaaagcatgggaaatgaggggtacagggattctccctagcccagttagaaactccttcaggcaggacgtaaaatttatatttctcttctattcttcttcactactgtgctagtcttataagtctattgttcattcattcaacaaatacttattgagtgtgccaagaaaaaagcaaagatctttgccctcatagagtttactttctaggagggaaatagaaaataagcagaataaataagagaaatatatggtgtaccagataatgatgtgtgctaggaattaaaaataaa

SEQ ID NO: 9602 - DNA, 1849 bp, Homo sapiens
taagtccctatgaatgaaaccatgacattgtgcaatcaaggcaggaatgttcagactccaatcctgctgaaatacagaggtgatctttgccaatgaggcatcgtggagactccattacacgctccagcaagcaaacctgttatcctcagtggcccatgaccattcttgctgtcagactttgctccgtatgcactgagcccagagctgattttatctgccatgaaaagaggatgtggaacaaagaagggaacagagtttggttgcagagagaagtgtatgctccaagaaccagatgctaagatgggattaaatgtgcaaggctattattaggggagatgcctgtggcagaaaatggggagagagatggacaaggctgggcaagtcatcagatcatgatgcaaggctgatctgagtgaaggaaagagggagaaaaggtagttggacatattctaggctgccatgcagttaaggagtgttcagctagggcattgggggtcctggagccagtgtcaactgacataggacaggaatgagccttagtatctttgccatgaccagttgttggtacgtggcctcaccacaaacacagtgatggatttcagagcccagcagctgaggccgatggtcagttatgctctcatggttaaaggtcttccaggcacattctcatgacagccacgatatatttttgtaagaaattctaccaaggcaaaatatgattaagataggtagccaaaacaaacaaaaaagaaagaaaagccgcaaattcctccctgcttgctctttatgcatgctcctttgcaatgtgattttgctattagctccatcaagagatgggtctccttgaatctgagcttgaccacgtgaattgctttgaccactggagcattcacaaacatggcacaacggaggcttgaaaaatgcatgtgccttgggacttgccctctcttgttacttttggaaccagagacctccatgcaatgagcctagactagcctcctagaagatgaggacaagaagaagcagaaatcaagcaccttcccaccaccaggcatgtgagtgaggccatcctagactgtccagccccagccaagctgtcagtgaccacagagaccagctaagccaaactaaaaccgaaaggactgtgggaaaacctatagtactgtgagaaaccataaatgcttgttgttttaattcactcagttttgggacagtgtgttatgtagtaaaaactaattgatatcatttatgtccattttatagatggaggaactgaaacctggagacatgagaaagcccctcaatgaatggaagtctcaaggtgttcattggtcttcctcagagcctcctacagcaagctgggcttgatcggaaggctctgagtttgggggtagctttactcatttgtgttatttgcctaaaccctggagtctactgagatcaagacccccgaatttgatcattaataaatctcttttggatgaataatataaaggtgttaggaggcccttctaggccattgaagccactagaacagaagtcaaggaattctcaatcttcaaagcatgggaaatgaggggtacagggattctccctagcccagttagaaactccttcaggcaggacgtaaaatttatatttctcttctattcttcttcactactgtgctagtcttataagtctattgttcattcattcaacaaatacttattgagtgtgccaagaaaaaagcaaagatctttgccctcatagagtttactttctaggagggaaatagaaaataagcagaataaataagagaaatatatggtgtaccagataatgatgtgtgctaggaattaaaaataaa

SEQ ID NO: 9603 - DNA, 390 bp, Homo sapiens
cagcaacccgctacccttcccctcacccagctttcttctccacctcccatcccaagcccttcttcaatccccaagaacatctcacccagtttattcatagtaccatcttaaaaataatttctatttttttctgtttaggaaattaatacatgttctctgtagaaaatatagaaagcacagaaaagcatcaccattcactgataaccagtgttagtagtttggtacatgtccttcttttcttttttctatagatatattttatgtgtattttatacatatatgcataggtattttttatttttattatttttttaagagaccatgtctcgctctgtcacccaggctggagtgcagtggttcaatcatagctcaccacagccttgaactcct

SEQ ID NO: 9604 - DNA, 301 bp, Homo sapiens
agcgagggcagctcgcttttgaggcagggattgctgaatgaggggagtggctttccaagttaggcgtttaggggaagaataccaactgtcagggacgaatgagagaacaggccaagcagccctggagggccaagtgaggaggcctctgttggagtgcctgaaatgtctggcttcgggaccttggattctttaaatgatgcaatctcctggcttctgcagagttgaaatcaaggcttagatccccaaaccatctgtgagcctggatacttatgcatggaagttaaagtttacagtgactcta

SEQ ID NO: 9605 - DNA, 301 bp, Homo sapiens; identical to SEQ ID NO: 9604

SEQ ID NO: 9606 - DNA, 390 bp, Homo sapiens; identical to SEQ ID NO: 9603

SEQ ID NO: 9607 - DNA, 1109 bp, Homo sapiens
ctgctcttaacctaaaactaaatacacaaaatgtggcgtcaaaaaaccctttacttcactttcctattaaatgtctcgtttagcctgtacttttccttttcgctttggtacttttttacaccattccccccacccccatccccccacccctactctcgcgcttcccaacgccaccaagattgtcttgataagaactccaggttctcccacgaaccgttctgatactattaattaaaagcagtggcctcaggcagagggctcaggaagtagggagggcgcgggcccgcgcgcacaacctcagggaaaaggtctttatgatttcagcatccagagaccctatttctgaggacaactccgcacccatgtcctggtacatgaaaccatcaccaaacgcgaacgggaagtgtcctcttcctgcctaggtgctgctggggcgctgccactcctgctgaccgggttcagaacccgatttttcgcaaccgcggtggcacccacgccggagtccttacctccccgcgcgggctcaatcagtggggattaccgcccacccttaccccagtttacacgcaggaaggggggaaaaagggaagaaaattaaaagctcatgcagttctcctcccattcttttctagatttgggcacagctcggtgacaccttcaaagctactcgtatagaaaggaccgcgggcgggacgcggccaccggggctcaggttaaatttaatctatagctgagctactcgctcctccaactcacccagtggaccagtgtttgacccagggggcgaaacaacggataaagcagcctccgccagaatttcaaaaactccctggaggccactgaatgttttatgcatcagaagggaagtctgggattccggtcactgtggctaggaggggggagggctcggccagcagggtgagggtgggggcggaggcggtttcagccttaagccatccaggcctcgggtttatggcccggggctgcttctggccgcggctctctaccttgttgccccggcctctttcaaaaaagcagaggttttttgctccctggcgcagcccaaagcgagggcacagattgtcggagctctaaagctgccgactcga

SEQ ID NO: 9608 - DNA, 1109 bp, Homo sapiens
ctgctcttaacctaaaactaaatacacaaaatgtggcgtcaaaaaaccctttacttcactttcctattaaatgtctcgtttagcctgtacttttccttttcgctttggtacttttttacaccattccccccacccccatccccccatccctactctcgcgcttcccaacgccaccaagattgtcttgataagaactccaggttctcccacgaaccgttctgatactattaattaaaagcagtggcctcaggcagagggctcaggaagtagggagggcgcgggcccgcgcgcacaacctcagggaaaaggtctttatgatttcagcatccagagaccctatttctgaggacaactccgcacccatgtcctggtacatgaaaccatcaccaaacgcgaacgggaagtgtcctcttcctgcctaggtgctgctggggcgctgccactcctgctgaccgggttcagaacccgatttttcgcaaccgcggtggcacccacgccggagtccttacctccccgcgcgggctcaatcagtggggattaccgcccacccttaccccagtttacacgcaggaaggggggaaaaagggaagaaaattaaaagctcatgcagttctcctcccattcttttctagatttgggcacagctcggtgacaccttcaaagccactcgtatagaaaggaccgcgggcgggacgcggccaccggggctcaggttaaatttaatctatagctgagctactcgctcctccaactcacccagtggaccagtgtttgacccagggggcgaaacaacggataaagcagcctccgccagaatttcaaaaactccctggaggccactgaatgttttatgcatcagaagggaagtctgggattccggtcactgtggctaggaggggggagggctcggccagcagggtgagggtgggggcggaggcggtttcagccttaagccatccaggcctcgggtttatggcccggggctgcttctggccgcggctctctaccttgttgccccggcctctttcaaaaaagcagaggttttttgctccctggcgcagcccaaagcgagggcacagattgtcggagctctaaagctgccgactcga

SEQ ID NO: 9609 - DNA, 557 bp, Homo sapiens
gttggctgttttagaaatgaggacaaaggagagagatcatatactatttttcttaaaatcgacctttttgaacaaaacatattctttggttcctcattgcccacgcggtttgcaaaccgtgtcaagaaagtggcctctgttcatgtcgctcatgggaaaccatccagacacggcagaggcaaaagagttacaattaacgggttatatttattatgcaaatctttcataggtgtgttgtttacagatcacctgtggacattttctttaaaaatatttccagatacttggagaatgaaggtctattctatgccaaaatatgaatgtatagtttccataaaacacaaagtctggagacaagttcttcatcctcattcacagaagctttaatgacacctgacatctcttgttctcagcagagaaataatattttaattcaatagtctcagtttattccactgttaatctgcgatgtaagtgggttgggttttggataatcaattcatttctggtatgtggtagaatcgctgatctaccaggaaataatcacatgttctgtg

SEQ ID NO: 9610 - DNA, 557 bp, Homo sapiens; identical to SEQ ID NO: 9609

SEQ ID NO: 9611 - DNA, 456 bp, Homo sapiens
gcttgccttgtggcactggcagcagcagccaaccacagtggcagatgcagatgagaaatgtcaatggggctacagggatgtggagatgcaggggctattgggccccagggcagaatgcaatctggtggctggctctcaaaatggtactgtgctgtagctgcttagggctcggggagttcatgagacccagcatgagctccctgtctggagcagtgccattatgaggtctctaggaagctcctcatgttagtctcagggcctgtgagggttgaggagcattcccattgataggattgcaggagtcttcaatggaaatatggaccactgggggtctctcactctttctccacattgagaaacctctctgcgctcccagctaatcctggctgagcaggatgcctggcttcctgctccttccttgccttggatgtttcctgtcacttctctgttgaatgc

SEQ ID NO: 9612 - DNA, 260 bp, Homo sapiens
tgagatggagtctcgctctgtcacccaggctggagtgcagtggcacgatctcagctcactgcaagctccaccccctgggttcacaccattctcctgcctcagcctccccagtagctgggactataggcccccgccaccatgcccggctaattttttgtatttttagtagagacggagtttcaccattttagccaggatggtctcgatctcccaacctcgtgatctgcccacctcagcctcccaaagtgctgggattacag

SEQ ID NO: 9613 - DNA, 16747 bp, Homo sapiens
  SITE (1512): n equals a,t,g, or c
  SITE (1513): n equals a,t,g, or c
  SITE (1514): n equals a,t,g, or c
  SITE (1515): n equals a,t,g, or c
  SITE (1516): n equals a,t,g, or c
  SITE (1517): n equals a,t,g, or c
  SITE (1518): n equals a,t,g, or c
  SITE (1519): n equals a,t,g, or c
  SITE (1520): n equals a,t,g, or c
  SITE (1521): n equals a,t,g, or c
  SITE (1522): n equals a,t,g, or c
  SITE (1523): n equals a,t,g, or c
  SITE (1524): n equals a,t,g, or c
  SITE (1525): n equals a,t,g, or c
  SITE (1526): n equals a,t,g, or c
  SITE (1527): n equals a,t,g, or c
  SITE (1528): n equals a,t,g, or c
  SITE (1529): n equals a,t,g, or c
  SITE (1530): n equals a,t,g, or c
  SITE (1531): n equals a,t,g, or c
  SITE (1532): n equals a,t,g, or c
  SITE (1533): n equals a,t,g, or c
  SITE (1534): n equals a,t,g, or c
  SITE (1535): n equals a,t,g, or c
  SITE (1536): n equals a,t,g, or c
  SITE (1537): n equals a,t,g, or c
  SITE (1538): n equals a,t,g, or c
  SITE (1539): n equals a,t,g, or c
  SITE (1540): n equals a,t,g, or c
  SITE (1541): n equals a,t,g, or c
  SITE (1542): n equals a,t,g, or c
  SITE (1543): n equals a,t,g, or c
  SITE (1544): n equals a,t,g, or c
  SITE (1545): n equals a,t,g, or c
  SITE (1546): n equals a,t,g, or c
  SITE (1547): n equals a,t,g, or c
  SITE (1548): n equals a,t,g, or c
  SITE (1549): n equals a,t,g, or c
  SITE (1550): n equals a,t,g, or c
  SITE (1551): n equals a,t,g, or c
  SITE (1552): n equals a,t,g, or c
  SITE (1553): n equals a,t,g, or c
  SITE (1554): n equals a,t,g, or c
  SITE (1555): n equals a,t,g, or c
  SITE (1556): n equals a,t,g, or c
  SITE (1557): n equals a,t,g, or c
  SITE (1558): n equals a,t,g, or c
  SITE (1559): n equals a,t,g, or c
  SITE (1560): n equals a,t,g, or c
  SITE (1561): n equals a,t,g, or c
  SITE (1562): n equals a,t,g, or c
  SITE (1563): n equals a,t,g, or c
  SITE (1564): n equals a,t,g, or c
  SITE (1565): n equals a,t,g, or c
  SITE (1566): n equals a,t,g, or c
  SITE (1567): n equals a,t,g, or c
  SITE (1568): n equals a,t,g, or c
  SITE (1569): n equals a,t,g, or c
  SITE (1570): n equals a,t,g, or c
  SITE (1571): n equals a,t,g, or c
  SITE (1572): n equals a,t,g, or c
  SITE (1573): n equals a,t,g, or c
  SITE (1574): n equals a,t,g, or c
  SITE (1575): n equals a,t,g, or c
  SITE (1576): n equals a,t,g, or c
  SITE (1577): n equals a,t,g, or c
  SITE (1578): n equals a,t,g, or c
  SITE (1579): n equals a,t,g, or c
  SITE (1580): n equals a,t,g, or c
  SITE (1581): n equals a,t,g, or c
  SITE (1582): n equals a,t,g, or c
  SITE (1583): n equals a,t,g, or c
  SITE (1584): n equals a,t,g, or c
  SITE (1585): n equals a,t,g, or c
  SITE (1586): n equals a,t,g, or c
  SITE (1587): n equals a,t,g, or c
  SITE (1588): n equals a,t,g, or c
  SITE (1589): n equals a,t,g, or c
  SITE (1590): n equals a,t,g, or c
  SITE (1591): n equals a,t,g, or c
  SITE (1592): n equals a,t,g, or c
  SITE (1593): n equals a,t,g, or c
  SITE (1594): n equals a,t,g, or c
  SITE (1595): n equals a,t,g, or c
  SITE (1596): n equals a,t,g, or c
  SITE (1597): n equals a,t,g, or c
  SITE (1598): n equals a,t,g, or c
  SITE (1599): n equals a,t,g, or c
  SITE (1600): n equals a,t,g, or c
  SITE (1601): n equals a,t,g, or c
  SITE (1602): n equals a,t,g, or c
  SITE (1603): n equals a,t,g, or c
  SITE (1604): n equals a,t,g, or c
  SITE (1605): n equals a,t,g, or c
  SITE (1606): n equals a,t,g, or c
  SITE (1607): n equals a,t,g, or c
  SITE (1608): n equals a,t,g, or c
  SITE (1609): n equals a,t,g, or c
  SITE (1610): n equals a,t,g, or c
  SITE (1611): n equals a,t,g, or c
  SITE (1612): n equals a,t,g, or c
  SITE (1613): n equals a,t,g, or c
  SITE (1614): n equals a,t,g, or c
  SITE (1615): n equals a,t,g, or c
  SITE (1616): n equals a,t,g, or c
  SITE (1617): n equals a,t,g, or c
  SITE (1618): n equals a,t,g, or c
  SITE (1619): n equals a,t,g, or c
  SITE (1620): n equals a,t,g, or c
  SITE (1621): n equals a,t,g, or c
  SITE (1622): n equals a,t,g, or c
  SITE (1623): n equals a,t,g, or c
  SITE (1624): n equals a,t,g, or c
  SITE (1625): n equals a,t,g, or c
  SITE (1626): n equals a,t,g, or c
  SITE (1627): n equals a,t,g, or c
  SITE (1628): n equals a,t,g, or c
  SITE (1629): n equals a,t,g, or c
  SITE (1630): n equals a,t,g, or c
  SITE (1631): n equals a,t,g, or c
  SITE (1632): n equals a,t,g, or c
  SITE (1633): n equals a,t,g, or c
  SITE (1634): n equals a,t,g, or c
  SITE (1635): n equals a,t,g, or c
  SITE (1636): n equals a,t,g, or c
  SITE (1637): n equals a,t,g, or c
  SITE (1638): n equals a,t,g, or c
  SITE (1639): n equals a,t,g, or c
  SITE (1640): n equals a,t,g, or c
  SITE (1641): n equals a,t,g, or c
  SITE (1642): n equals a,t,g, or c
  SITE (1643): n equals a,t,g, or c
  SITE (1644): n equals a,t,g, or c
  SITE (1645): n equals a,t,g, or c
  SITE (1646): n equals a,t,g, or c
  SITE (1647): n equals a,t,g, or c
  SITE (1648): n equals a,t,g, or c
  SITE (1649): n equals a,t,g, or c
  SITE (1650): n equals a,t,g, or c
  SITE (1651): n equals a,t,g, or c
  SITE (1652): n equals a,t,g, or c
  SITE (1653): n equals a,t,g, or c
  SITE (1654): n equals a,t,g, or c
  SITE (1655): n equals a,t,g, or c
  SITE (1656): n equals a,t,g, or c
  SITE (1657): n equals a,t,g, or c
  SITE (1658): n equals a,t,g, or c
  SITE (1659): n equals a,t,g, or c
  SITE (1660): n equals a,t,g, or c
  SITE (1661): n equals a,t,g, or c
  SITE (1662): n equals a,t,g, or c
  SITE (1663): n equals a,t,g, or c
  SITE (1664): n equals a,t,g, or c
  SITE (1665): n equals a,t,g, or c
  SITE (1666): n equals a,t,g, or c
  SITE (1667): n equals a,t,g, or c
  SITE (1668): n equals a,t,g, or c
  SITE (1669): n equals a,t,g, or c
  SITE (1670): n equals a,t,g, or c
  SITE (1671): n equals a,t,g, or c
  SITE (1672): n equals a,t,g, or c
  SITE (1673): n equals a,t,g, or c
  SITE (1674): n equals a,t,g, or c
  SITE (1675): n equals a,t,g, or c
  SITE (1676): n equals a,t,g, or c
  SITE (1677): n equals a,t,g, or c
  SITE (1678): n equals a,t,g, or c
  SITE (1679): n equals a,t,g, or c
  SITE (1680): n equals a,t,g, or c
  SITE (1681): n equals a,t,g, or c
  SITE (1682): n equals a,t,g, or c
  SITE (1683): n equals a,t,g, or c
  SITE (1684): n equals a,t,g, or c
  SITE (1685): n equals a,t,g, or c
  SITE (1686): n equals a,t,g, or c
  SITE (1687): n equals a,t,g, or c
  SITE (1688): n equals a,t,g, or c
  SITE (1689): n equals a,t,g, or c
  SITE (1690): n equals a,t,g, or c
  SITE (1691): n equals a,t,g, or c
  SITE (1692): n equals a,t,g, or c
  SITE (1693): n equals a,t,g, or c
  SITE (1694): n equals a,t,g, or c
  SITE (1695): n equals a,t,g, or c
  SITE (1696): n equals a,t,g, or c
  SITE (1697): n equals a,t,g, or c
  SITE (1698): n equals a,t,g, or c
  SITE (1699): n equals a,t,g, or c
  SITE (1700): n equals a,t,g, or c
  SITE (1701): n equals a,t,g, or c
  SITE (1702): n equals a,t,g, or c
  SITE (1703): n equals a,t,g, or c
  SITE (1704): n equals a,t,g, or c
  SITE (1705): n equals a,t,g, or c
  SITE (1706): n equals a,t,g, or c
  SITE (1707): n equals a,t,g, or c
  SITE (1708): n equals a,t,g, or c
  SITE (1709): n equals a,t,g, or c
  SITE (1710): n equals a,t,g, or c
  SITE (1711): n equals a,t,g, or c
  SITE (1712): n equals a,t,g, or c
  SITE (1713): n equals a,t,g, or c
  SITE (1714): n equals a,t,g, or c
  SITE (1715): n equals a,t,g, or c
  SITE (1716): n equals a,t,g, or c
  SITE (1717): n equals a,t,g, or c
  SITE (1718): n equals a,t,g, or c
  SITE (1719): n equals a,t,g, or c
  SITE (1720): n equals a,t,g, or c
  SITE (1721): n equals a,t,g, or c
  SITE (1722): n equals a,t,g, or c
  SITE (1723): n equals a,t,g, or c
  SITE (1724): n equals a,t,g, or c
  SITE (1725): n equals a,t,g, or c
  SITE (1726): n equals a,t,g, or c
  SITE (1727): n equals a,t,g, or c
  SITE (1728): n equals a,t,g, or c
  SITE (1729): n equals a,t,g, or c
  SITE (1730): n equals a,t,g, or c
  SITE (1731): n equals a,t,g, or c
  SITE (1732): n equals a,t,g, or c
  SITE (1733): n equals a,t,g, or c
  SITE (1734): n equals a,t,g, or c
  SITE (1735): n equals a,t,g, or c
  SITE (1736): n equals a,t,g, or c
  SITE (1737): n equals a,t,g, or c
  SITE (1738): n equals a,t,g, or c
  SITE (1739): n equals a,t,g, or c
  SITE (1740): n equals a,t,g, or c
  SITE (1741): n equals a,t,g, or c
  SITE (1742): n equals a,t,g, or c
  SITE (1743): n equals a,t,g, or c
  SITE (1744): n equals a,t,g, or c
  SITE (1745): n equals a,t,g, or c
  SITE (1746): n equals a,t,g, or c
  SITE (1747): n equals a,t,g, or c
  SITE (1748): n equals a,t,g, or c
  SITE (1749): n equals a,t,g, or c
  SITE (1750): n equals a,t,g, or c
  SITE (1751): n equals a,t,g, or c
  SITE (1752): n equals a,t,g, or c
  SITE (1753): n equals a,t,g, or c
  SITE (1754): n equals a,t,g, or c
  SITE (1755): n equals a,t,g, or c
  SITE (1756): n equals a,t,g, or c
  SITE (1757): n equals a,t,g, or c
  SITE (1758): n equals a,t,g, or c
  SITE (1759): n equals a,t,g, or c
  SITE (1760): n equals a,t,g, or c
  SITE (1761): n equals a,t,g, or c
  SITE (1762): n equals a,t,g, or c
  SITE (1763): n equals a,t,g, or c
  SITE (1764): n equals a,t,g, or c
  SITE (1765): n equals a,t,g, or c
  SITE (1766): n equals a,t,g, or c
  SITE (1767): n equals a,t,g, or c
  SITE (1768): n equals a,t,g, or c
  SITE (1769): n equals a,t,g, or c
  SITE (1770): n equals a,t,g, or c
  SITE (1771): n equals a,t,g, or c
  SITE (1772): n equals a,t,g, or c
  SITE (1773): n equals a,t,g, or c
  SITE (1774): n equals a,t,g, or c
  SITE (1775): n equals a,t,g, or c
  SITE (1776): n equals a,t,g, or c
  SITE (1777): n equals a,t,g, or c
  SITE (1778): n equals a,t,g, or c
  SITE (1779): n equals a,t,g, or c
  SITE (1780): n equals a,t,g, or c
  SITE (1781): n equals a,t,g, or c
  SITE (1782): n equals a,t,g, or c
  SITE (1783): n equals a,t,g, or c
  SITE (1784): n equals a,t,g, or c
  SITE (1785): n equals a,t,g, or c
  SITE (1786): n equals a,t,g, or c
  SITE (1787): n equals a,t,g, or c
  SITE (1788): n equals a,t,g, or c
  SITE (1789): n equals a,t,g, or c
  SITE (1790): n equals a,t,g, or c
  SITE (1791): n equals a,t,g, or c
  SITE (1792): n equals a,t,g, or c
  SITE (1793): n equals a,t,g, or c
  SITE (1794): n equals a,t,g, or c
  SITE (1795): n equals a,t,g, or c
  SITE (1796): n equals a,t,g, or c
  SITE (1797): n equals a,t,g, or c
  SITE (1798): n equals a,t,g, or c
  SITE (1799): n equals a,t,g, or c
  SITE (1800): n equals a,t,g, or c
  SITE (1801): n equals a,t,g, or c
  SITE (1802): n equals a,t,g, or c
  SITE (1803): n equals a,t,g, or c
  SITE (1804): n equals a,t,g, or c
  SITE (1805): n equals a,t,g, or c
  SITE (1806): n equals a,t,g, or c
  SITE (1807): n equals a,t,g, or c
  SITE (1808): n equals a,t,g, or c
  SITE (1809): n equals a,t,g, or c
  SITE (1810): n equals a,t,g, or c
  SITE (1811): n equals a,t,g, or c
  SITE (1812): n equals a,t,g, or c
  SITE (1813): n equals a,t,g, or c
  SITE (1814): n equals a,t,g, or c
  SITE (1815): n equals a,t,g, or c
  SITE (1816): n equals a,t,g, or c
  SITE (1817): n equals a,t,g, or c
  SITE (1818): n equals a,t,g, or c
  SITE (1819): n equals a,t,g, or c
  SITE (1820): n equals a,t,g, or c
  SITE (1821): n equals a,t,g, or c
  SITE (1822): n equals a,t,g, or c
  SITE (1823): n equals a,t,g, or c
  SITE (1824): n equals a,t,g, or c
  SITE (1825): n equals a,t,g, or c
  SITE (1826): n equals a,t,g, or c
  SITE (1827): n equals a,t,g, or c
  SITE (1828): n equals a,t,g, or c
  SITE (1829): n equals a,t,g, or c
  SITE (1830): n equals a,t,g, or c
  SITE (1831): n equals a,t,g, or c
  SITE (1832): n equals a,t,g, or c
  SITE (1833): n equals a,t,g, or c
  SITE (1834): n equals a,t,g, or c
  SITE (1835): n equals a,t,g, or c
  SITE (1836): n equals a,t,g, or c
  SITE (1837): n equals a,t,g, or c
  SITE (1838): n equals a,t,g, or c
  SITE (1839): n equals a,t,g, or c
  SITE (1840): n equals a,t,g, or c
  SITE (1841): n equals a,t,g, or c
  SITE (1842): n equals a,t,g, or c
  SITE (1843): n equals a,t,g, or c
  SITE (1844): n equals a,t,g, or c
  SITE (1845): n equals a,t,g, or c
  SITE (1846): n equals a,t,g, or c
  SITE (1847): n equals a,t,g, or c
  SITE (1848): n equals a,t,g, or c
  SITE (1849): n equals a,t,g, or c
  SITE (1850): n equals a,t,g, or c
  SITE (1851): n equals a,t,g, or c
  SITE (1852): n equals a,t,g, or c
  SITE (1853): n equals a,t,g, or c
  SITE (1854): n equals a,t,g, or c
  SITE (1855): n equals a,t,g, or c
  SITE (1856): n equals a,t,g, or c
  SITE (1857): n equals a,t,g, or c
  SITE (1858): n equals a,t,g, or c
  SITE (1859): n equals a,t,g, or c
  SITE (1860): n equals a,t,g, or c
  SITE (1861): n equals a,t,g, or c
  SITE (1862): n equals a,t,g, or c
  SITE (1863): n equals a,t,g, or c
  SITE (1864): n equals a,t,g, or c
  SITE (1865): n equals a,t,g, or c
  SITE (1866): n equals a,t,g, or c
  SITE (1867): n equals a,t,g, or c
  SITE (1868): n equals a,t,g, or c
  SITE (1869): n equals a,t,g, or c
  SITE (1870): n equals a,t,g, or c
  SITE (1871): n equals a,t,g, or c
  SITE (1872): n equals a,t,g, or c
  SITE (1873): n equals a,t,g, or c
  SITE (1874): n equals a,t,g, or c
  SITE (1875): n equals a,t,g, or c
  SITE (1876): n equals a,t,g, or c
  SITE (1877): n equals a,t,g, or c
  SITE (1878): n equals a,t,g, or c
  SITE (1879): n equals a,t,g, or c
  SITE (1880): n equals a,t,g, or c
  SITE (1881): n equals a,t,g, or c
  SITE (1882): n equals a,t,g, or c
  SITE (1883): n equals a,t,g, or c
  SITE (1884): n equals a,t,g, or c
  SITE (1885): n equals a,t,g, or c
  SITE (1886): n equals a,t,g, or c
  SITE (1887): n equals a,t,g, or c
  SITE (1888): n equals a,t,g, or c
  SITE (1889): n equals a,t,g, or c
  SITE (1890): n equals a,t,g, or c
  SITE (1891): n equals a,t,g, or c
  SITE (1892): n equals a,t,g, or c
  SITE (1893): n equals a,t,g, or c
  SITE (1894): n equals a,t,g, or c
  SITE (1895): n equals a,t,g, or c
  SITE (1896): n equals a,t,g, or c
  SITE (1897): n equals a,t,g, or c
  SITE (1898): n equals a,t,g, or c
  SITE (1899): n equals a,t,g, or c
  SITE (1900): n equals a,t,g, or c
  SITE (1901): n equals a,t,g, or c
  SITE (1902): n equals a,t,g, or c
  SITE (1903): n equals a,t,g, or c
  SITE (1904): n equals a,t,g, or c
  SITE (1905): n equals a,t,g, or c
  SITE (1906): n equals a,t,g, or c
  SITE (1907): n equals a,t,g, or c
  SITE (1908): n equals a,t,g, or c
  SITE (1909): n equals a,t,g, or c
  SITE (1910): n equals a,t,g, or c
  SITE (1911): n equals a,t,g, or c
  SITE (1912): n equals a,t,g, or c
  SITE (1913): n equals a,t,g, or c
  SITE (1914): n equals a,t,g, or c
  SITE (1915): n equals a,t,g, or c
  SITE (1916): n equals a,t,g, or c
  SITE (1917): n equals a,t,g, or c
  SITE (1918): n equals a,t,g, or c
  SITE (1919): n equals a,t,g, or c
  SITE (1920): n equals a,t,g, or c
  SITE (1921): n equals a,t,g, or c
  SITE (1922): n equals a,t,g, or c
  SITE (1923): n equals a,t,g, or c
  SITE (1924): n equals a,t,g, or c
  SITE (1925): n equals a,t,g, or c
  SITE (1926): n equals a,t,g, or c
  SITE (1927): n equals a,t,g, or c
  SITE (1928): n equals a,t,g, or c
  SITE (1929): n equals a,t,g, or c
  SITE (1930): n equals a,t,g, or c
  SITE (1931): n equals a,t,g, or c
  SITE (1932): n equals a,t,g, or c
  SITE (1933): n equals a,t,g, or c
  SITE (1934): n equals a,t,g, or c
  SITE (1935): n equals a,t,g, or c
  SITE (1936): n equals a,t,g, or c
  SITE (1937): n equals a,t,g, or c
  SITE (1938): n equals a,t,g, or c
  SITE (1939): n equals a,t,g, or c
  SITE (1940): n equals a,t,g, or c
  SITE (1941): n equals a,t,g, or c
  SITE (1942): n equals a,t,g, or c
  SITE (1943): n equals a,t,g, or c
  SITE (1944): n equals a,t,g, or c
  SITE (1945): n equals a,t,g, or c
  SITE (1946): n equals a,t,g, or c
  SITE (1947): n equals a,t,g, or c
  SITE (1948): n equals a,t,g, or c
  SITE (1949): n equals a,t,g, or c
  SITE (1950): n equals a,t,g, or c
  SITE (1951): n equals a,t,g, or c
  SITE (1952): n equals a,t,g, or c
  SITE (1953): n equals a,t,g, or c
  SITE (1954): n equals a,t,g, or c
  SITE (1955): n equals a,t,g, or c
  SITE (1956): n equals a,t,g, or c
  SITE (1957): n equals a,t,g, or c
  SITE (1958): n equals a,t,g, or c
  SITE (1959): n equals a,t,g, or c
  SITE (1960): n equals a,t,g, or c
  SITE (1961): n equals a,t,g, or c
  SITE (1962): n equals a,t,g, or c
  SITE (1963): n equals a,t,g, or c
  SITE (1964): n equals a,t,g, or c
  SITE (1965): n equals a,t,g, or c
  SITE (1966): n equals a,t,g, or c
  SITE (1967): n equals a,t,g, or c
  SITE (1968): n equals a,t,g, or c
  SITE (1969): n equals a,t,g, or c
  SITE (1970): n equals a,t,g, or c
  SITE (1971): n equals a,t,g, or c
  SITE (1972): n equals a,t,g, or c
  SITE (1973): n equals a,t,g, or c
  SITE (1974): n equals a,t,g, or c
  SITE (1975): n equals a,t,g, or c
  SITE (1976): n equals a,t,g, or c
  SITE (1977): n equals a,t,g, or c
  SITE (1978): n equals a,t,g, or c
  SITE (1979): n equals a,t,g, or c
  SITE (1980): n equals a,t,g, or c
  SITE (1981): n equals a,t,g, or c
  SITE (1982): n equals a,t,g, or c
  SITE (1983): n equals a,t,g, or c
  SITE (1984): n equals a,t,g, or c
  SITE (1985): n equals a,t,g, or c
  SITE (1986): n equals a,t,g, or c
  SITE (1987): n equals a,t,g, or c
  SITE (1988): n equals a,t,g, or c
  SITE (1989): n equals a,t,g, or c
  SITE (1990): n equals a,t,g, or c
  SITE (1991): n equals a,t,g, or c
  SITE (1992): n equals a,t,g, or c
  SITE (1993): n equals a,t,g, or c
  SITE (1994): n equals a,t,g, or c
  SITE (1995): n equals a,t,g, or c
  SITE (1996): n equals a,t,g, or c
  SITE (1997): n equals a,t,g, or c
  SITE (1998): n equals a,t,g, or c
  SITE (1999): n equals a,t,g, or c
  SITE (2000): n equals a,t,g, or c
  SITE (2001): n equals a,t,g, or c
  SITE (2002): n equals a,t,g, or c
  SITE (2003): n equals a,t,g, or c
  SITE (2004): n equals a,t,g, or c
  SITE (2005): n equals a,t,g, or c
  SITE (2006): n equals a,t,g, or c
  SITE (2007): n equals a,t,g, or c
  SITE (2008): n equals a,t,g, or c
  SITE (2009): n equals a,t,g, or c
  SITE (2010): n equals a,t,g, or c
  SITE (2011): n equals a,t,g, or c
  SITE (2012): n equals a,t,g, or c
  SITE (2013): n equals a,t,g, or c
  SITE (2014): n equals a,t,g, or c
  SITE (2015): n equals a,t,g, or c
  SITE (2016): n equals a,t,g, or c
  SITE (2017): n equals a,t,g, or c
  SITE (2018): n equals a,t,g, or c
  SITE (2019): n equals a,t,g, or c
  SITE (2020): n equals a,t,g, or c
  SITE (2021): n equals a,t,g, or c
  SITE (2022): n equals a,t,g, or c
  SITE (2023): n equals a,t,g, or c
  SITE (2024): n equals a,t,g, or c
  SITE (2025): n equals a,t,g, or c
  SITE (2026): n equals a,t,g, or c
  SITE (2027): n equals a,t,g, or c
  SITE (2028): n equals a,t,g, or c
  SITE (2029): n equals a,t,g, or c
  SITE (2030): n equals a,t,g, or c
  SITE (2031): n equals a,t,g, or c
  SITE (2032): n equals a,t,g, or c
  SITE (2033): n equals a,t,g, or c
  SITE (2034): n equals a,t,g, or c
  SITE (2035): n equals a,t,g, or c
  SITE (2036): n equals a,t,g, or c
  SITE (2037): n equals a,t,g, or c
  SITE (2038): n equals a,t,g, or c
  SITE (2039): n equals a,t,g, or c
  SITE (2040): n equals a,t,g, or c
  SITE (2041): n equals a,t,g, or c
  SITE (2042): n equals a,t,g, or c
  SITE (2043): n equals a,t,g, or c
  SITE (2044): n equals a,t,g, or c
  SITE (2045): n equals a,t,g, or c
  SITE (2046): n equals a,t,g, or c
  SITE (2047): n equals a,t,g, or c
  SITE (2048): n equals a,t,g, or c
  SITE (2049): n equals a,t,g, or c
  SITE (2050): n equals a,t,g, or c
  SITE (2051): n equals a,t,g, or c
  SITE (2052): n equals a,t,g, or c
  SITE (2053): n equals a,t,g, or c
  SITE (2054): n equals a,t,g, or c
  SITE (2055): n equals a,t,g, or c
  SITE (2056): n equals a,t,g, or c
  SITE (2057): n equals a,t,g, or c
  SITE (2058): n equals a,t,g, or c
  SITE (2059): n equals a,t,g, or c
  SITE (2060): n equals a,t,g, or c
  SITE (2061): n equals a,t,g, or c
  SITE (2062): n equals a,t,g, or c
  SITE (2063): n equals a,t,g, or c
  SITE (2064): n equals a,t,g, or c
  SITE (2065): n equals a,t,g, or c
  SITE (2066): n equals a,t,g, or c
  SITE (2067): n equals a,t,g, or c
  SITE (2068): n equals a,t,g, or c
  SITE (2069): n equals a,t,g, or c
  SITE (2070): n equals a,t,g, or c
  SITE (2071): n equals a,t,g, or c
  SITE (2072): n equals a,t,g, or c
  SITE (2073): n equals a,t,g, or c
  SITE (2074): n equals a,t,g, or c
  SITE (2075): n equals a,t,g, or c
  SITE (2076): n equals a,t,g, or c
  SITE (2077): n equals a,t,g, or c
  SITE (2078): n equals a,t,g, or c
  SITE (2079): n equals a,t,g, or c
  SITE (2080): n equals a,t,g, or c
  SITE (2081): n equals a,t,g, or c
  SITE (2082): n equals a,t,g, or c
  SITE (2083): n equals a,t,g, or c
  SITE (2084): n equals a,t,g, or c
  SITE (2085): n equals a,t,g, or c
  SITE (2086): n equals a,t,g, or c
  SITE (2087): n equals a,t,g, or c
  SITE (2088): n equals a,t,g, or c
  SITE (2089): n equals a,t,g, or c
  SITE (2090): n equals a,t,g, or c
  SITE (2091): n equals a,t,g, or c
  SITE (2092): n equals a,t,g, or c
  SITE (2093): n equals a,t,g, or c
  SITE (2094): n equals a,t,g, or c
  SITE (2095): n equals a,t,g, or c
  SITE (2096): n equals a,t,g, or c
  SITE (2097): n equals a,t,g, or c
  SITE (2098): n equals a,t,g, or c
  SITE (2099): n equals a,t,g, or c
  SITE (2100): n equals a,t,g, or c
  SITE (2101): n equals a,t,g, or c
  SITE (2102): n equals a,t,g, or c
  SITE (2103): n equals a,t,g, or c
  SITE (2104): n equals a,t,g, or c
  SITE (2105): n equals a,t,g, or c
  SITE (2106): n equals a,t,g, or c
  SITE (2107): n equals a,t,g, or c
  SITE (2108): n equals a,t,g, or c
  SITE (2109): n equals a,t,g, or c
  SITE (2110): n equals a,t,g, or c
  SITE (2111): n equals a,t,g, or c
  SITE (2112): n equals a,t,g, or c
  SITE (2113): n equals a,t,g, or c
  SITE (2114): n equals a,t,g, or c
  SITE (2115): n equals a,t,g, or c
  SITE (2116): n equals a,t,g, or c
  SITE (2117): n equals a,t,g, or c
  SITE (2118): n equals a,t,g, or c
  SITE (2119): n equals a,t,g, or c
  SITE (2120): n equals a,t,g, or c
  SITE (2121): n equals a,t,g, or c
  SITE (2122): n equals a,t,g, or c
  SITE (2123): n equals a,t,g, or c
  SITE (2124): n equals a,t,g, or c
  SITE (2125): n equals a,t,g, or c
  SITE (2126): n equals a,t,g, or c
  SITE (2127): n equals a,t,g, or c
  SITE (2128): n equals a,t,g, or c
  SITE (2129): n equals a,t,g, or c
  SITE (2130): n equals a,t,g, or c
  SITE (2131): n equals a,t,g, or c
  SITE (2132): n equals a,t,g, or c
  SITE (2133): n equals a,t,g, or c
  SITE (2134): n equals a,t,g, or c
  SITE (2135): n equals a,t,g, or c
  SITE (2136): n equals a,t,g, or c
  SITE (2137): n equals a,t,g, or c
  SITE (2138): n equals a,t,g, or c
  SITE (2139): n equals a,t,g, or c
  SITE (2140): n equals a,t,g, or c
  SITE (2141): n equals a,t,g, or c
  SITE (2142): n equals a,t,g, or c
  SITE (2143): n equals a,t,g, or c
  SITE (2144): n equals a,t,g, or c
  SITE (2145): n equals a,t,g, or c
  SITE (2146): n equals a,t,g, or c
  SITE (2147): n equals a,t,g, or c
  SITE (2148): n equals a,t,g, or c
  SITE (2149): n equals a,t,g, or c
  SITE (2150): n equals a,t,g, or c
  SITE (2151): n equals a,t,g, or c
  SITE (2152): n equals a,t,g, or c
  SITE (2153): n equals a,t,g, or c
  SITE (2154): n equals a,t,g, or c
  SITE (2155): n equals a,t,g, or c
  SITE (2156): n equals a,t,g, or c
  SITE (2157): n equals a,t,g, or c
  SITE (2158): n equals a,t,g, or c
  SITE (2159): n equals a,t,g, or c
  SITE (2160): n equals a,t,g, or c
  SITE (2161): n equals a,t,g, or c
  SITE (2162): n equals a,t,g, or c
  SITE (2163): n equals a,t,g, or c
  SITE (2164): n equals a,t,g, or c
  SITE (2165): n equals a,t,g, or c
  SITE (2166): n equals a,t,g, or c
  SITE (2167): n equals a,t,g, or c
  SITE (2168): n equals a,t,g, or c
  SITE (2169): n equals a,t,g, or c
  SITE (2170): n equals a,t,g, or c
  SITE (2171): n equals a,t,g, or c
  SITE (2172): n equals a,t,g, or c
  SITE (2173): n equals a,t,g, or c
  SITE (2174): n equals a,t,g, or c
  SITE (2175): n equals a,t,g, or c
  SITE (2176): n equals a,t,g, or c
  SITE (2177): n equals a,t,g, or c
  SITE (2178): n equals a,t,g, or c
  SITE (2179): n equals a,t,g, or c
  SITE (2180): n equals a,t,g, or c
  SITE (2181): n equals a,t,g, or c
  SITE (2182): n equals a,t,g, or c
  SITE (2183): n equals a,t,g, or c
  SITE (2184): n equals a,t,g, or c
  SITE (2185): n equals a,t,g, or c
  SITE (2186): n equals a,t,g, or c
  SITE (2187): n equals a,t,g, or c
  SITE (2188): n equals a,t,g, or c
  SITE (2189): n equals a,t,g, or c
  SITE (2190): n equals a,t,g, or c
  SITE (2191): n equals a,t,g, or c
  SITE (2192): n equals a,t,g, or c
  SITE (2193): n equals a,t,g, or c
  SITE (2194): n equals a,t,g, or c
  SITE (2195): n equals a,t,g, or c
  SITE (2196): n equals a,t,g, or c
  SITE (2197): n equals a,t,g, or c
  SITE (2198): n equals a,t,g, or c
  SITE (2199): n equals a,t,g, or c
  SITE (2200): n equals a,t,g, or c
  SITE (2201): n equals a,t,g, or c
  SITE (2202): n equals a,t,g, or c
  SITE (2203): n equals a,t,g, or c
  SITE (2204): n equals a,t,g, or c
  SITE (2205): n equals a,t,g, or c
  SITE (2206): n equals a,t,g, or c
  SITE (2207): n equals a,t,g, or c
  SITE (2208): n equals a,t,g, or c
  SITE (2209): n equals a,t,g, or c
  SITE (2210): n equals a,t,g, or c
  SITE (2211): n equals a,t,g, or c
  SITE (2212): n equals a,t,g, or c
  SITE (2213): n equals a,t,g, or c
  SITE (2214): n equals a,t,g, or c
  SITE (2215): n equals a,t,g, or c
  SITE (2216): n equals a,t,g, or c
  SITE (2217): n equals a,t,g, or c
  SITE (2218): n equals a,t,g, or c
  SITE (2219): n equals a,t,g, or c
  SITE (2220): n equals a,t,g, or c
  SITE (2221): n equals a,t,g, or c
  SITE (2222): n equals a,t,g, or c
  SITE (2223): n equals a,t,g, or c
  SITE (2224): n equals a,t,g, or c
  SITE (2225): n equals a,t,g, or c
  SITE (2226): n equals a,t,g, or c
  SITE (2227): n equals a,t,g, or c
  SITE (2228): n equals a,t,g, or c
  SITE (2229): n equals a,t,g, or c
  SITE (2230): n equals a,t,g, or c
  SITE (2231): n equals a,t,g, or c
  SITE (2232): n equals a,t,g, or c
  SITE (2233): n equals a,t,g, or c
  SITE (2234): n equals a,t,g, or c
  SITE (2235): n equals a,t,g, or c
  SITE (2236): n equals a,t,g, or c
  SITE (2237): n equals a,t,g, or c
  SITE (2238): n equals a,t,g, or c
  SITE (2239): n equals a,t,g, or c
  SITE (2240): n equals a,t,g, or c
  SITE (2241): n equals a,t,g, or c
  SITE (2242): n equals a,t,g, or c
  SITE (2243): n equals a,t,g, or c
  SITE (2244): n equals a,t,g, or c
  SITE (2245): n equals a,t,g, or c
  SITE (2246): n equals a,t,g, or c
  SITE (2247): n equals a,t,g, or c
  SITE (2248): n equals a,t,g, or c
  SITE (2249): n equals a,t,g, or c
  SITE (2250): n equals a,t,g, or c
  SITE (2251): n equals a,t,g, or c
  SITE (2252): n equals a,t,g, or c
  SITE (2253): n equals a,t,g, or c
  SITE (2254): n equals a,t,g, or c
  SITE (2255): n equals a,t,g, or c
  SITE (2256): n equals a,t,g, or c
  SITE (2257): n equals a,t,g, or c
  SITE (2258): n equals a,t,g, or c
  SITE (2259): n equals a,t,g, or c
  SITE (2260): n equals a,t,g, or c
  SITE (2261): n equals a,t,g, or c
  SITE (2262): n equals a,t,g, or c
  SITE (2263): n equals a,t,g, or c
  SITE (2264): n equals a,t,g, or c
  SITE (2265): n equals a,t,g, or c
  SITE (2266): n equals a,t,g, or c
  SITE (2267): n equals a,t,g, or c
  SITE (2268): n equals a,t,g, or c
  SITE (2269): n equals a,t,g, or c
  SITE (2270): n equals a,t,g, or c
  SITE (2271): n equals a,t,g, or c
  SITE (2272): n equals a,t,g, or c
  SITE (2273): n equals a,t,g, or c
  SITE (2274): n equals a,t,g, or c
  SITE (2275): n equals a,t,g, or c
  SITE (2276): n equals a,t,g, or c
  SITE (2277): n equals a,t,g, or c
  SITE (2278): n equals a,t,g, or c
  SITE (2279): n equals a,t,g, or c
  SITE (2280): n equals a,t,g, or c
  SITE (2281): n equals a,t,g, or c
  SITE (2282): n equals a,t,g, or c
  SITE (2283): n equals a,t,g, or c
  SITE (2284): n equals a,t,g, or c
  SITE (2285): n equals a,t,g, or c
  SITE (2286): n equals a,t,g, or c
  SITE (2287): n equals a,t,g, or c
  SITE (2288): n equals a,t,g, or c
  SITE (2289): n equals a,t,g, or c
  SITE (2290): n equals a,t,g, or c
  SITE (2291): n equals a,t,g, or c
  SITE (2292): n equals a,t,g, or c
  SITE (2293): n equals a,t,g, or c
  SITE (2294): n equals a,t,g, or c
  SITE (2295): n equals a,t,g, or c
  SITE (2296): n equals a,t,g, or c
  SITE (2297): n equals a,t,g, or c
  SITE (2298): n equals a,t,g, or c
  SITE (2299): n equals a,t,g, or c
  SITE (2300): n equals a,t,g, or c
  SITE (2301): n equals a,t,g, or c
  SITE (2302): n equals a,t,g, or c
  SITE (2303): n equals a,t,g, or c
  SITE (2304): n equals a,t,g, or c
  SITE (2305): n equals a,t,g, or c
  SITE (2306): n equals a,t,g, or c
  SITE (2307): n equals a,t,g, or c
  SITE (2308): n equals a,t,g, or c
  SITE (2309): n equals a,t,g, or c
  SITE (2310): n equals a,t,g, or c
  SITE (2311): n equals a,t,g, or c
  SITE (2312): n equals a,t,g, or c
  SITE (2313): n equals a,t,g, or c
  SITE (2314): n equals a,t,g, or c
  SITE (2315): n equals a,t,g, or c
  SITE (2316): n equals a,t,g, or c
  SITE (2317): n equals a,t,g, or c
  SITE (2318): n equals a,t,g, or c
  SITE (2319): n equals a,t,g, or c
  SITE (2320): n equals a,t,g, or c
  SITE (2321): n equals a,t,g, or c
  SITE (2322): n equals a,t,g, or c
  SITE (2323): n equals a,t,g, or c
  SITE (2324): n equals a,t,g, or c
  SITE (2325): n equals a,t,g, or c
  SITE (2326): n equals a,t,g, or c
  SITE (2327): n equals a,t,g, or c
  SITE (2328): n equals a,t,g, or c
  SITE (2329): n equals a,t,g, or c
  SITE (2330): n equals a,t,g, or c
  SITE (2331): n equals a,t,g, or c
  SITE (2332): n equals a,t,g, or c
  SITE (2333): n equals a,t,g, or c
  SITE (2334): n equals a,t,g, or c
  SITE (2335): n equals a,t,g, or c
  SITE (2336): n equals a,t,g, or c
  SITE (2337): n equals a,t,g, or c
  SITE (2338): n equals a,t,g, or c
  SITE (2339): n equals a,t,g, or c
  SITE (2340): n equals a,t,g, or c
  SITE (2341): n equals a,t,g, or c
  SITE (2342): n equals a,t,g, or c
  SITE (2343): n equals a,t,g, or c
  SITE (2344): n equals a,t,g, or c
  SITE (2345): n equals a,t,g, or c
  SITE (2346): n equals a,t,g, or c
  SITE (2347): n equals a,t,g, or c
  SITE (2348): n equals a,t,g, or c
  SITE (2349): n equals a,t,g, or c
  SITE (2350): n equals a,t,g, or c
  SITE (2351): n equals a,t,g, or c
  SITE (2352): n equals a,t,g, or c
  SITE (2353): n equals a,t,g, or c
  SITE (2354): n equals a,t,g, or c
  SITE (2355): n equals a,t,g, or c
  SITE (2356): n equals a,t,g, or c
  SITE (2357): n equals a,t,g, or c
  SITE (2358): n equals a,t,g, or c
  SITE (2359): n equals a,t,g, or c
  SITE (2360): n equals a,t,g, or c
  SITE (2361): n equals a,t,g, or c
  SITE (2362): n equals a,t,g, or c
  SITE (2363): n equals a,t,g, or c
  SITE (2364): n equals a,t,g, or c
  SITE (2365): n equals a,t,g, or c
  SITE (2366): n equals a,t,g, or c
  SITE (2367): n equals a,t,g, or c
  SITE (2368): n equals a,t,g, or c
  SITE (2369): n equals a,t,g, or c
  SITE (2370): n equals a,t,g, or c
  SITE (2371): n equals a,t,g, or c
  SITE (2372): n equals a,t,g, or c
  SITE (2373): n equals a,t,g, or c
  SITE (2374): n equals a,t,g, or c
  SITE (2375): n equals a,t,g, or c
  SITE (2376): n equals a,t,g, or c
  SITE (2377): n equals a,t,g, or c
  SITE (2378): n equals a,t,g, or c
  SITE (2379): n equals a,t,g, or c
  SITE (2380): n equals a,t,g, or c
  SITE (2381): n equals a,t,g, or c
  SITE (2382): n equals a,t,g, or c
  SITE (2383): n equals a,t,g, or c
  SITE (2384): n equals a,t,g, or c
  SITE (2385): n equals a,t,g, or c
  SITE (2386): n equals a,t,g, or c
  SITE (2387): n equals a,t,g, or c
  SITE (2388): n equals a,t,g, or c
  SITE (2389): n equals a,t,g, or c
  SITE (2390): n equals a,t,g, or c
  SITE (2391): n equals a,t,g, or c
  SITE (2392): n equals a,t,g, or c
  SITE (2393): n equals a,t,g, or c
  SITE (2394): n equals a,t,g, or c
  SITE (2395): n equals a,t,g, or c
  SITE (2396): n equals a,t,g, or c
  SITE (2397): n equals a,t,g, or c
  SITE (2398): n equals a,t,g, or c
  SITE (2399): n equals a,t,g, or c
  SITE (2400): n equals a,t,g, or c
  SITE (2401): n equals a,t,g, or c
  SITE (2402): n equals a,t,g, or c
  SITE (2403): n equals a,t,g, or c
  SITE (2404): n equals a,t,g, or c
  SITE (2405): n equals a,t,g, or c
  SITE (2406): n equals a,t,g, or c
  SITE (2407): n equals a,t,g, or c
  SITE (2408): n equals a,t,g, or c
  SITE (2409): n equals a,t,g, or c
  SITE (2410): n equals a,t,g, or c
  SITE (2411): n equals a,t,g, or c
  SITE (2412): n equals a,t,g, or c
  SITE (2413): n equals a,t,g, or c
  SITE (2414): n equals a,t,g, or c
  SITE (2415): n equals a,t,g, or c
  SITE (2416): n equals a,t,g, or c
  SITE (2417): n equals a,t,g, or c
  SITE (2418): n equals a,t,g, or c
  SITE (2419): n equals a,t,g, or c
  SITE (2420): n equals a,t,g, or c
  SITE (2421): n equals a,t,g, or c
  SITE (2422): n equals a,t,g, or c
  SITE (2423): n equals a,t,g, or c
  SITE (2424): n equals a,t,g, or c
  SITE (2425): n equals a,t,g, or c
  SITE (2426): n equals a,t,g, or c
  SITE (2427): n equals a,t,g, or c
  SITE (2428): n equals a,t,g, or c
  SITE (2429): n equals a,t,g, or c
  SITE (2430): n equals a,t,g, or c
  SITE (2431): n equals a,t,g, or c
  SITE (2432): n equals a,t,g, or c
  SITE (2433): n equals a,t,g, or c
  SITE (2434): n equals a,t,g, or c
  SITE (2435): n equals a,t,g, or c
  SITE (2436): n equals a,t,g, or c
  SITE (2437): n equals a,t,g, or c
  SITE (2438): n equals a,t,g, or c
  SITE (2439): n equals a,t,g, or c
  SITE (2440): n equals a,t,g, or c
  SITE (2441): n equals a,t,g, or c
  SITE (2442): n equals a,t,g, or c
  SITE (2443): n equals a,t,g, or c
  SITE (2444): n equals a,t,g, or c
  SITE (2445): n equals a,t,g, or c
  SITE (2446): n equals a,t,g, or c
  SITE (2447): n equals a,t,g, or c
  SITE (2448): n equals a,t,g, or c
  SITE (2449): n equals a,t,g, or c
  SITE (2450): n equals a,t,g, or c
  SITE (2451): n equals a,t,g, or c
  SITE (2452): n equals a,t,g, or c
  SITE (2453): n equals a,t,g, or c
  SITE (2454): n equals a,t,g, or c
  SITE (2455): n equals a,t,g, or c
  SITE (2456): n equals a,t,g, or c
  SITE (2457): n equals a,t,g, or c
  SITE (2458): n equals a,t,g, or c
  SITE (2459): n equals a,t,g, or c
  SITE (2460): n equals a,t,g, or c
  SITE (2461): n equals a,t,g, or c
  SITE (2462): n equals a,t,g, or c
  SITE (2463): n equals a,t,g, or c
  SITE (2464): n equals a,t,g, or c
  SITE (2465): n equals a,t,g, or c
  SITE (2466): n equals a,t,g, or c
  SITE (2467): n equals a,t,g, or c
  SITE (2468): n equals a,t,g, or c
  SITE (2469): n equals a,t,g, or c
  SITE (2470): n equals a,t,g, or c
  SITE (2471): n equals a,t,g, or c
  SITE (2472): n equals a,t,g, or c
  SITE (2473): n equals a,t,g, or c
  SITE (2474): n equals a,t,g, or c
  SITE (2475): n equals a,t,g, or c
  SITE (2476): n equals a,t,g, or c
  SITE (2477): n equals a,t,g, or c
  SITE (2478): n equals a,t,g, or c
  SITE (2479): n equals a,t,g, or c
  SITE (2480): n equals a,t,g, or c
  SITE (2481): n equals a,t,g, or c
  SITE (2482): n equals a,t,g, or c
  SITE (2483): n equals a,t,g, or c
  SITE (2484): n equals a,t,g, or c
  SITE (2485): n equals a,t,g, or c
  SITE (2486): n equals a,t,g, or c
  SITE (2487): n equals a,t,g, or c
  SITE (2488): n equals a,t,g, or c
  SITE (2489): n equals a,t,g, or c
  SITE (2490): n equals a,t,g, or c
  SITE (2491): n equals a,t,g, or c
  SITE (2492): n equals a,t,g, or c
  SITE (2493): n equals a,t,g, or c
  SITE (2494): n equals a,t,g, or c
  SITE (2495): n equals a,t,g, or c
  SITE (2496): n equals a,t,g, or c
  SITE (2497): n equals a,t,g, or c
  SITE (2498): n equals a,t,g, or c
  SITE (2499): n equals a,t,g, or c
  SITE (2500): n equals a,t,g, or c
  SITE (2501): n equals a,t,g, or c
  SITE (2502): n equals a,t,g, or c
  SITE (2503): n equals a,t,g, or c
  SITE (2504): n equals a,t,g, or c
  SITE (2505): n equals a,t,g, or c
  SITE (2506): n equals a,t,g, or c
  SITE (2507): n equals a,t,g, or c
  SITE (2508): n equals a,t,g, or c
  SITE (2509): n equals a,t,g, or c
  SITE (2510): n equals a,t,g, or c
  SITE (2511): n equals a,t,g, or c
  SITE (2512): n equals a,t,g, or c
  SITE (2513): n equals a,t,g, or c
  SITE (2514): n equals a,t,g, or c
  SITE (2515): n equals a,t,g, or c
  SITE (2516): n equals a,t,g, or c
  SITE (2517): n equals a,t,g, or c
  SITE (2518): n equals a,t,g, or c
  SITE (2519): n equals a,t,g, or c
  SITE (2520): n equals a,t,g, or c
  SITE (2521): n equals a,t,g, or c
  SITE (2522): n equals a,t,g, or c
  SITE (2523): n equals a,t,g, or c
  SITE (2524): n equals a,t,g, or c
  SITE (2525): n equals a,t,g, or c
  SITE (2526): n equals a,t,g, or c
  SITE (2527): n equals a,t,g, or c
  SITE (2528): n equals a,t,g, or c
  SITE (2529): n equals a,t,g, or c
  SITE (2530): n equals a,t,g, or c
  SITE (2531): n equals a,t,g, or c
  SITE (2532): n equals a,t,g, or c
  SITE (2533): n equals a,t,g, or c
  SITE (2534): n equals a,t,g, or c
  SITE (2535): n equals a,t,g, or c
  SITE (2536): n equals a,t,g, or c
  SITE (2537): n equals a,t,g, or c
  SITE (2538): n equals a,t,g, or c
  SITE (2539): n equals a,t,g, or c
  SITE (2540): n equals a,t,g, or c
  SITE (2541): n equals a,t,g, or c
  SITE (2542): n equals a,t,g, or c
  SITE (2543): n equals a,t,g, or c
  SITE (2544): n equals a,t,g, or c
  SITE (2545): n equals a,t,g, or c
  SITE (2546): n equals a,t,g, or c
  SITE (2547): n equals a,t,g, or c
  SITE (2548): n equals a,t,g, or c
  SITE (2549): n equals a,t,g, or c
  SITE (2550): n equals a,t,g, or c
  SITE (2551): n equals a,t,g, or c
  SITE (2552): n equals a,t,g, or c
  SITE (2553): n equals a,t,g, or c
  SITE (2554): n equals a,t,g, or c
  SITE (2555): n equals a,t,g, or c
  SITE (2556): n equals a,t,g, or c
  SITE (2557): n equals a,t,g, or c
  SITE (2558): n equals a,t,g, or c
  SITE (2559): n equals a,t,g, or c
  SITE (2560): n equals a,t,g, or c
  SITE (2561): n equals a,t,g, or c
  SITE (2562): n equals a,t,g, or c
  SITE (2563): n equals a,t,g, or c
  SITE (2564): n equals a,t,g, or c
  SITE (2565): n equals a,t,g, or c
  SITE (2566): n equals a,t,g, or c
  SITE (2567): n equals a,t,g, or c
  SITE (2568): n equals a,t,g, or c
  SITE (2569): n equals a,t,g, or c
  SITE (2570): n equals a,t,g, or c
  SITE (2571): n equals a,t,g, or c
  SITE (2572): n equals a,t,g, or c
  SITE (2573): n equals a,t,g, or c
  SITE (2574): n equals a,t,g, or c
  SITE (2575): n equals a,t,g, or c
  SITE (2576): n equals a,t,g, or c
  SITE (2577): n equals a,t,g, or c
  SITE (2578): n equals a,t,g, or c
  SITE (2579): n equals a,t,g, or c
  SITE (2580): n equals a,t,g, or c
  SITE (2581): n equals a,t,g, or c
  SITE (2582): n equals a,t,g, or c
  SITE (2583): n equals a,t,g, or c
  SITE (2584): n equals a,t,g, or c
  SITE (2585): n equals a,t,g, or c
  SITE (2586): n equals a,t,g, or c
  SITE (2587): n equals a,t,g, or c
  SITE (2588): n equals a,t,g, or c
  SITE (2589): n equals a,t,g, or c
  SITE (2590): n equals a,t,g, or c
  SITE (2591): n equals a,t,g, or c
  SITE (2592): n equals a,t,g, or c
  SITE (2593): n equals a,t,g, or c
  SITE (2594): n equals a,t,g, or c
  SITE (2595): n equals a,t,g, or c
  SITE (2596): n equals a,t,g, or c
  SITE (2597): n equals a,t,g, or c
  SITE (2598): n equals a,t,g, or c
  SITE (2599): n equals a,t,g, or c
  SITE (2600): n equals a,t,g, or c
  SITE (2601): n equals a,t,g, or c
  SITE (2602): n equals a,t,g, or c
  SITE (2603): n equals a,t,g, or c
  SITE (2604): n equals a,t,g, or c
  SITE (2605): n equals a,t,g, or c
  SITE (2606): n equals a,t,g, or c
  SITE (2607): n equals a,t,g, or c
  SITE (2608): n equals a,t,g, or c
  SITE (2609): n equals a,t,g, or c
  SITE (2610): n equals a,t,g, or c
  SITE (2611): n equals a,t,g, or c
  SITE (2612): n equals a,t,g, or c
  SITE (2613): n equals a,t,g, or c
  SITE (2614): n equals a,t,g, or c
  SITE (2615): n equals a,t,g, or c
  SITE (2616): n equals a,t,g, or c
  SITE (2617): n equals a,t,g, or c
  SITE (2618): n equals a,t,g, or c
  SITE (2619): n equals a,t,g, or c
  SITE (2620): n equals a,t,g, or c
  SITE (2621): n equals a,t,g, or c
  SITE (2622): n equals a,t,g, or c
  SITE (2623): n equals a,t,g, or c
  SITE (2624): n equals a,t,g, or c
  SITE (2625): n equals a,t,g, or c
  SITE (2626): n equals a,t,g, or c
  SITE (2627): n equals a,t,g, or c
  SITE (2628): n equals a,t,g, or c
  SITE (2629): n equals a,t,g, or c
  SITE (2630): n equals a,t,g, or c
  SITE (2631): n equals a,t,g, or c
  SITE (2632): n equals a,t,g, or c
  SITE (2633): n equals a,t,g, or c
  SITE (2634): n equals a,t,g, or c
  SITE (2635): n equals a,t,g, or c
  SITE (2636): n equals a,t,g, or c
  SITE (2637): n equals a,t,g, or c
  SITE (2638): n equals a,t,g, or c
  SITE (2639): n equals a,t,g, or c
  SITE (2640): n equals a,t,g, or c
  SITE (2641): n equals a,t,g, or c
  SITE (2642): n equals a,t,g, or c
  SITE (2643): n equals a,t,g, or c
  SITE (2644): n equals a,t,g, or c
  SITE (2645): n equals a,t,g, or c
  SITE (2646): n equals a,t,g, or c
  SITE (2647): n equals a,t,g, or c
  SITE (2648): n equals a,t,g, or c
  SITE (2649): n equals a,t,g, or c
  SITE (2650): n equals a,t,g, or c
  SITE (2651): n equals a,t,g, or c
  SITE (2652): n equals a,t,g, or c
  SITE (2653): n equals a,t,g, or c
  SITE (2654): n equals a,t,g, or c
  SITE (2655): n equals a,t,g, or c
  SITE (2656): n equals a,t,g, or c
  SITE (2657): n equals a,t,g, or c
  SITE (2658): n equals a,t,g, or c
  SITE (2659): n equals a,t,g, or c
  SITE (2660): n equals a,t,g, or c
  SITE (2661): n equals a,t,g, or c
  SITE (2662): n equals a,t,g, or c
  SITE (2663): n equals a,t,g, or c
  SITE (2664): n equals a,t,g, or c
  SITE (2665): n equals a,t,g, or c
  SITE (2666): n equals a,t,g, or c
  SITE (2667): n equals a,t,g, or c
  SITE (2668): n equals a,t,g, or c
  SITE (2669): n equals a,t,g, or c
  SITE (2670): n equals a,t,g, or c
  SITE (2671): n equals a,t,g, or c
  SITE (2672): n equals a,t,g, or c
  SITE (2673): n equals a,t,g, or c
  SITE (2674): n equals a,t,g, or c
  SITE (2675): n equals a,t,g, or c
  SITE (2676): n equals a,t,g, or c
  SITE (2677): n equals a,t,g, or c
  SITE (2678): n equals a,t,g, or c
  SITE (2679): n equals a,t,g, or c
  SITE (2680): n equals a,t,g, or c
  SITE (2681): n equals a,t,g, or c
  SITE (2682): n equals a,t,g, or c
  SITE (2683): n equals a,t,g, or c
  SITE (2684): n equals a,t,g, or c
  SITE (2685): n equals a,t,g, or c
  SITE (2686): n equals a,t,g, or c
  SITE (2687): n equals a,t,g, or c
  SITE (2688): n equals a,t,g, or c
  SITE (2689): n equals a,t,g, or c
  SITE (2690): n equals a,t,g, or c
  SITE (2691): n equals a,t,g, or c
  SITE (2692): n equals a,t,g, or c
  SITE (2693): n equals a,t,g, or c
  SITE (2694): n equals a,t,g, or c
  SITE (2695): n equals a,t,g, or c
  SITE (2696): n equals a,t,g, or c
  SITE (2697): n equals a,t,g, or c
  SITE (2698): n equals a,t,g, or c
  SITE (2699): n equals a,t,g, or c
  SITE (2700): n equals a,t,g, or c
  SITE (2701): n equals a,t,g, or c
  SITE (2702): n equals a,t,g, or c
  SITE (2703): n equals a,t,g, or c
  SITE (2704): n equals a,t,g, or c
  SITE (2705): n equals a,t,g, or c
  SITE (2706): n equals a,t,g, or c
  SITE (2707): n equals a,t,g, or c
  SITE (2708): n equals a,t,g, or c
  SITE (2709): n equals a,t,g, or c
  SITE (2710): n equals a,t,g, or c
  SITE (2711): n equals a,t,g, or c
ttttttttttttttgagatggagtctcgctctgtccccaggctggagtgcagtggcacgatctcagctcactgcaacctccgtctcccgggttcacgccattctcctgcctcagcttcctacgtagctgggactacaggcgcccgccaccatgcccagctaattttttttgtatttttagtagcgacggggtttcaccgtgttagccaggatggtctcgatctcctgacctcatgatctgcccgcctcagcctcccaaagtgctgggattacaggcatgagccaccgcgcccggccaaaccaatgtatttcttaaatgtatttgattgatgtctgtgcctccctaaaatgtataaaaccaagctgcactcctaccaccttgggcacatgttctcaggacctcctgagcgctgtgtcatgggccatggtcactcatttcgctcagaataaatctcttcaaatagtttatagactttgattctttttgtccacaaggatagtttgaaatcagccatgatgacagtatttacaacatagaaagcagggctttttcccctagagatctagttgttaagcattcaccagcacaagactataaaatgagtttaggctgggcgcggtggctcaggcctataatcccaacactttgggaggccgaggctggtggatcacttgaggtcaggagttagagaccagcctggccaacatggtgaaactctgtctctactaaaattacaaaaaattagctgggcatggtggcgggtgcctgtaatcccagctacttgggaggctgaggcagaagaattgcctgaacccaagagatggaggttgtagtgagccaagactgcgccactgcactctagcctgggcaacacgagcggaactccgcctcaaaaaaaaaaaaaaaaattggagggagatgagattgtaaatgtaaatatatagacatcattttataggaaatagtgagtcctgaagacctctatgatgggttaattggggaagatgttcatatttctgagtcagaaaaatatttacagacaattttgctgtcagttcagaggatggagaacagaatggaggcagaaagggcattgagaaggtggtggcattatttcaggtgagaggtaagacagtatcagtagaggtgaaagaaggtaaaggacacatgccaaagattaaatcaaggataaatattgaaggtaattgaggtttttgctcggggcacgccactagttaagtaatatagttggacaggcagttttggagataagatcctgttgaatttcttgctgttaaggctttctgaggatttctcagtggaaattttgtaaggttatagttttgggtggaaattctggtttacgaatcgtggtagctgaagccaagaacaagaataatcttgatcaaagggtatgtaagtcatgaggaaaggaaaaagaagcttaaatgagaaagggtggataaacaggagagacaagatggaaagagcattttttttttttttttttgnnnnnnnnnnnnnnnnnnnnnnnnnnnnnnnnnnnnnnnnnnnnnnnnnnnnnnnnnnnnnnnnnnnnnnnnnnnnnnnnnnnnnnnnnnnnnnnnnnnnnnnnnnnnnnnnnnnnnnnnnnnnnnnnnnnnnnnnnnnnnnnnnnnnnnnnnnnnnnnnnnnnnnnnnnnnnnnnnnnnnnnnnnnnnnnnnnnnnnnnnnnnnnnnnnnnnnnnnnnnnnnnnnnnnnnnnnnnnnnnnnnnnnnnnnnnnnnnnnnnnnnnnnnnnnnnnnnnnnnnnnnnnnnnnnnnnnnnnnnnnnnnnnnnnnnnnnnnnnnnnnnnnnnnnnnnnnnnnnnnnnnnnnnnnnnnnnnnnnnnnnnnnnnnnnnnnnnnnnnnnnnnnnnnnnnnnnnnnnnnnnnnnnnnnnnnnnnnnnnnnnnnnnnnnnnnnnnnnnnnnnnnnnnnnnnnnnnnnnnnnnnnnnnnnnnnnnnnnnnnnnnnnnnnnnnnnnnnnnnnnnnnnnnnnnnnnnnnnnnnnnnnnnnnnnnnnnnnnnnnnnnnnnnnnnnnnnnnnnnnnnnnnnnnnnnnnnnnnnnnnnnnnnnnnnnnnnnnnnnnnnnnnnnnnnnnnnnnnnnnnnnnnnnnnnnnnnnnnnnnnnnnnnnnnnnnnnnnnnnnnnnnnnnnnnnnnnnnnnnnnnnnnnnnnnnnnnnnnnnnnnnnnnnnnnnnnnnnnnnnnnnnnnnnnnnnnnnnnnnnnnnnnnnnnnnnnnnnnnnnnnnnnnnnnnnnnnnnnnnnnnnnnnnnnnnnnnnnnnnnnnnnnnnnnnnnnnnnnnnnnnnnnnnnnnnnnnnnnnnnnnnnnnnnnnnnnnnnnnnnnnnnnnnnnnnnnnnnnnnnnnnnnnnnnnnnnnnnnnnnnnnnnnnnnnnnnnnnnnnnnnnnnnnnnnnnnnnnnnnnnnnnnnnnnnnnnnnnnnnnnnnnnnnnnnnnnnnnnnnnnnnnnnnnnnnnnnnnnnnnnnnnnnnnnnnnnnnnnnnnnnnnnnnnnnnnnnnnnnnnnnnnnnnnnnnnnnnnnnnnnnnnnnnnnnnnnnnnnnnnnnnnnnnnnnnnnnnnnnnnnnnnnnnnnnnnnnnnnnnnnnnnnnnnnnnnnnnnnnnnnnnnnnnnnnnnnnnnnnnnnnnnnnnnnnnnnnnnnnnnnnnnnnnnnnnnnnnnnnnnggtggctcaggcctataatcccaacactttgggaggctgaggtgggtggatttcttgagcccaggggttcaagaccagcttgggcaatatggtgaaaccctgcctgactctataaaaaaatacaaaaattagccaggagtggtggtttgatcctgtagacccagctacttaggaggctgaggagggaggattgcttgagtccggcaggtcaaggctgcagtgaacaatgatcaagccactgcactccagcttgagcgacagtgagacactgtctcaataaaaacccaaaaaaccaacaaaacaaaccaattgtaactgctactagttggaacatacattcaaggaaacttaaatctatgtcttcagggttgcagttctcaaacttggctcaaagaaactttccactgtgaaaataagtaactctggctgtacgtggtggcccatgcctgtaatcccaccactctgagagaatgaggcaggaggattgcttgaacacaggagttgaagaccagcctgggcaactcggtgaaacctagtctctacaaacaataaaaaaaaaattaggtgtggcgactcacacctgaggtcccaactactggggaggctgaggcaggaggatcacttgatctcacaggctgcagtgagttgagatcatgccactgcaattcagcctgggcatcagagaaagaccctgtctcagttttttaaaaaataaaataactccaaatatgaattgttggaactttaaaatattcttagccttaaaggaatgggattacagcacctgagtcaaaaaaaaaaaaaaaaagggcaattataacctaggcagctgtagcctttgtttctctgattatagattagccttattctttacctacattgttttgtaaaatgttgtaaataactaaagagctccagggaagcctctttatttgtttgtttgtttgagacagggtctcgctctgtcactcaggctggagtgcagtggcacaatctcttctcattgcaacctccaattcccaggattgtccctctaccttcctaccccaacccttcttcatggagctcacctgggccttgccccgcctcagccccacacttctactgattataaagagataccccccttatttgtctgactttggaatctttacctctggcccacagccatcctgggctctgcccccttttgtacacaaagcctttgtcttcttaggaaaatgaccaggttctgcccataaaagtatcctacctgaaagggaggtggagagagagtgcctcatggaaaatcacagaaacacatttctttgcatctgaatgcttccagtacctcactttgtcagcaaacctactctgggttagaccccagcatccttagcctttttgtgccgtggccttctttggtatctgaggaagcccatggactgctcagaatagatttttttttttaagtgcacaaaataaaatacagagagcaatggaaataaattatatcaaaataaagtttatgaaaatatttgtgatattacatgatatgctttattggcacattaaataacaagatccaaagttaggtctaattactataattttgaggtaatgatgagcaaaaatgctatcccgagatgtctgcaacagctgcagtgtaatatgaaaatatctgtgatttctgttggtaacaaagtaacaggtgctgctaacactaatgaggtttgttcctagcaacattcgccatggaaggaaaagctcaatttcaattaaagtttagagaaaatcaagatgcaatcaccctcctcccatctttctcaattttttaaattattttttatttatttttaggcatggtcttgctctgttgcccaggctggagtgcagtggcacaatcatggctcactgcagcctcaacctcctgggctcaagcaatcctcccacctcagcctcctaagtagctggaaccacaggtgtgcaccaccacacctggctgatttttaaagatttattaatttttttaaattttgagacagagtttcacccttgtcgcccaggctggagtgcagtggcgcgatctcggctcactgtaacctccgcctcccaggttcaagtgattatcctgcctcggcctcccaagtagctgggattacaggcacgtgccaccgtgcccagctaatttttgtatttttagtagagatggggtttcaccatgttgcccaggctggtcttgaactcctgatctcaggtgatccaccggcctcagcctcccgaagtgttgggattacaggcgtgagccacagagcccggtctttttttttttcttagtagagatggggtcttgcctccctcccgggtaccatcatacctgctagtgtggggtcttgcctccctcccgggtaccgtcatacctgctagcgtgtgactgaaggcagtgtccctggccccagctgaaggaccatagccagccagtgggctcaggcaccttggcctgttgctcctaggggtcgcctatgctattcagccaaggggatgacagtgcctgctggcttggctgagctccagccaggcttcccccaccactgactctcgctcttcttttcctggcaggaagggcccagcctcatctatgcgacctgtagccccccaaccagctgaggctcccctcttagacttgtaaatctatggccactggcatctggctgcctgcactccctgcttcccccagggtcctgggctttctgaccacccaggggggacttgggcactccctccagccatgcatcccttttagcttcatcctcttggttcaagcaatgttctttgtctgtcaggcctggtggctgttgtgtagggctccccaaagcgaggggtggccctgggccagtgggttggaagacagggtgacaagtgggaagcccgagggggctgagtttcggtctgaactgtgggtgcactgcctagatgccgtgtgacaggccagcatgtgtggggtggggagggccgccgcagcccccaggcattacctgtgaagctccggctcctccatcttcctcccctttcccttttagcccctcttttccaggaatcttgccacatccacacttgtgtcctcccctccctggccctcccaccactgctgcagtgcgttgcgcttgccttaccagctctctcctcacttttctctctcccgttttctctctgctttctctccaactgccagccaatggggtcaggcaaatccatcccatcctgagagccccagggccctcttctacctctaaacagatccctcctcttctcagagaccttcctttccaagcctgcctggacgactgttctgtgacttgacagtggctcccctagccccaaaaccagcccccttcatctgtgatggtctgttgtagtggtgagctgacacatccaggcataacctttggtgaaaacttgtgccccctctgtggtacacccctgccctgttctataaatactcatatatatatacatatacacacacacatatatgtatatatatgcatatatatacatacacacatatgtgtatatatacgtgtgtgtgtgtgtacatatatgtatacactcctacacatggccgactgcctcgcctctagcgctgggaatcagtcaccgtgctgtccttgtggagtcttgtgacccaactacaagagaacactgtcccccaacaatccccatccaaagtccatcacctccagtgagcctccctgtcatgcctggcctgtggacagccagtccccaccatccctcctgccgcccgacaagcttgggggtgctgtgcagacagctgtgtggcccgacagtctctaccagtcctgctgtcccttggctgggaataaaacccatttctaagtgacggggaatgtgtcctctgctggttgcgttctctgtggagctcaggggaggggaagggtcaacccattaccagggtgctattgggagtggtaaaaaggccacatcctttccaagggacgcttcctggaaagcctccggagcttagcaggctctcatcctgtgaagccggctctggccactagggggcagggccatgaactcagattggaggaagcctgtggggcagctggcaatctagagggacagacagaacaggccaccaggtgcagacaggcgagggaggcaggagaacaaaatggaagacaactgggctggatggaagtcagtgaccttggatgctggcacctgccttacttgccactgctagatcaggcttccgagcctgttagccgtccaggccccatggtcacccataggtgccatggcagttcctgtggaattccccaggtgttaccaggcagcatacaggtaacaggcctggaaggtccccaataccccagctggacatgctcactttggggctccctgttcagtggcacaaactccatgacccagtgagggaaacaggaatacaccaggccaagcagtatatggctaaatacattccaaaataaaaagcaaaataaacaggagtcgcatcaccacagtgccacgaccccatctctgccccttcccctggcctatgctatcaataaataagttttccagccccaaataactatcagaacttcctacccatatgccagctccaacctctgctatgtatgacacaggaggtggccctaccactggaatatacaaaatgttacacggatatagtatgtacactaaggggggccactccagagcctgtgccctcacctggtctacattagccccattgtcctgcctcagccgcctctctgagtaagaagatgggagcccccctgaggaaaaaattgctttggtgagagttaaggaggccattaggcctcctccaaacaagccaattctataagcctctgactcttaaaacaataatcatcgtccagaaatttaaggagtcagctctggccaaggtggcaaagggtctgcatgtttgcctccccctgattagacacgggtcttattttgctattgtgagggtaaaggggtgactgggaaggggtggctgggacatgatggggacggagcctctggccccacacttctccaggctttgctgacagctgcccgcttttattttattcacacttttatccttttttatacttttcataactttttttttgagacagtttcactcttgttgcccaggctggagtgcaatggcacaatctcggcccactgcaacctctgcctccctggttcaagcaattctcctgcttcagcctccccagtagctgggattagaggcatgcaccaccacgcctggctaattttgtatttttagtagagacggggtttctccgtgttggtcagactgctctcaaactccagacctcaggtgatccacccacctcagcctcccaaagtgctgggattataggcgtgagccaccatgtctggcttcataacttctcataacttttataccataacttttatcccataacatttttaatcctataactttttataatcccatacattttttttaaaatcccatacctttttaaaattttttatttttttatttagtggccttttagattatggtgatcttcacctcatctccacctgtctccccacattagacaggggtcttatgcttgctactgtgagggtaaagggttgactgggaaggggtggtagggacatggtaggggcagagcctccagccccacttccccaggttttgctgacagtggccggcttttagatgatggtgatcttcacctcattgttctcatcagtctggtacaaaaaaggaatgcaagggctgctgcccaagcctgggtgctcctggaggttctgcatctcatgaagcagttgcatgatctgctgctcagtggggttgtcacagggagaatgcttccccgcctctccttgtgcagactccccactgctggcaaggctcacctcacaaagatctttggagagagggaggcagggtgctgtgggagccctcccctgctcctgcgtgcccactgtgcctgaggactctactcactaccctggcttgtcagtagccccaagctactggggggcgggggcccctggagtgggctcatcagcagggttctgggcagctgccaggaatctgctatgccacttgttgcagtcgtccacaagccacgccagctccagcagcttcacctggagggaggggtgctcagctgctctgcctgtgtctgagaccatccccaaccccaccccctctaccctccaccctccacccctacagagatgttccacgccctaccttcacctctcccttgtcctgggccagcctgctgatgcactcctcctccttccgcactgccctctggctctggtacagtgcgatgtactctcctgcaggaggacaggactcagacgctggggcccctctgaccaatgtgcagctctctttgccgtgccctggcttcccactccccgatggtgtctgtctctctccagacagctagatgcagcaatgttccagttcctcaaccctctccttcaagtccaccttctctcctgcatgagctccataaagcggctctggagccaaaataatggggtcacattaaggcagcgaccttcctgccccaacccttcttggcccatgccaggaaagactcacccacagcttctccatggccccctgcagggcctggtgggtctccccacacatgggatcacccccagttcttggggctggggctgctgcctcaggttccttctgggccgaggccaacagatgagccaggcgctggcagtgcactccttcagctgcccacatagccgtgcctgctcctcctcggcactagctacagctgagttgaaaaatgccacctgcaggcaagaggtacgcattcttatgggggatacacaggatgaacggggcagggaggtggagagcaggccttgccttggggggcctcagaggatgcacctgttagtcacaggtgaaatggtgtctgaccactggctcccagggaaggggtgagggaccagagaaatcagaaggccaggaacccaagagcagaagggggtctgggagggaccacagagggaggcagcaaaggtggggcagggggagtcaggctcaccatggccttctggctctctagatcctccgggatgcttggcatgggctgaggcacctcctcctcctcctcactgtccatctcctgttgggggtggccagagaggtcctcagacaacccaacaagggcagagtgggcccacctctgcccccaccctcactgtgtaaccctaggccagcccctccctagtggggaatgagcagctgttctttattttgaaacagtctcattctatcatccaggctggagtgcagtggcatgatctgagctcactgaaacctctgcctcctgggttcaagcaattctctgcctcagcctcccgagtggctgggattataggcgcccgccaccacacccggctaatttttgtgttttcagtagagacggggtttcaccatcttggccaggtcggtcttgattgaactcctgacctcgtgatccacccacctcaggctcccaaagtgctgagattacaggcatgagccaccgtgcccggcctctttattttttaaagagccaagatcttgctatgttgcccaggtgcagtcccactaccaataggcatgggagttccgacctgctccatttctgacctgggccagttcacccacccttaggcaacctaacctggtggtcccctgctcccagaaggtcaccatattggtgccaaacttagtgtggacacctggttggcataatgaccagctgttctaaaagtctgtttcagctcctcaatcctatgctgctaacagttcccgtttcctcctggggctctctcctcttcctgtgagcagtctccggtaccttccccagggagagccatgaggctcaactgggcctgaggctgctggttctgctggctgatagcttccaggtgctcctaaggggccaagaaagggagtgagaaggcacaaaggttgccaggtcgttaccctcagggccctgccctgagcaactccctcacctgggtctcccgcaactcttggcagcccatcttggccacagctttgctttgagctttctgctgctgcagccggtccacgagctgggtctgcagcagtaactggttgtgcagctcctcctcctcagaggtcagctgctgataggtgaccacctgctgctgataggtggccacatactgctgcagatgacccaggtactggtcctgctgctgctgcagactctgagcctcctggctcttcagctccacctgcagaaagaccctgggcatgagggcaggtggtggctggcccataaatagggtagcaaggtcactgtgtggctctgttgcctacccaggcccctggccccttggctccaggcctaaatgactgcctccctttcccagagtcccatgcctccttccccagctgcaggggtctgtcctgcagaccccagccgcacagcagatgaataacatactcacaccgatattcagtgacagagcagctaaggggccgggccatgcacagaaagagttgtggcggccacaggccttaactggctggccctcatggcatttattcagcacagacttaatgacaaaggctttgagtcaacacacctgtgggtaattaactccccctgcccccaggtagagagcaatcatgcacctgcggataatcaaaggttggtcttaggaccacatgagtaaacaagctattcagataaactcccccacattcccatgttatttgctctattgctatcaactcaaggtaaaggggattagaggtaaaaaggatttcagccaaatcctttactgaagctatgcaaaccttctggccttccaagaaggtttgtgtctatatcctgtaacttcatcttacaattttccaaccacactgactgatcccctaaatctccccattttctgttttttttgcattcagtcttgttcattggagagtacaggtgtgcgcagcaacaggtctgtcaggcatggtggtcattgctcttattccggctttgcatcctaaaattagtaaataacataagacaaacatgagtataattagcaacattcttttctaatcaaggagtgacccaccaccccccgcccccaggagcggtggtctatccaggagagataatctcacacacccttccatatggctgtttgttgggtgtgtagatctacagtttgaagggattctaaaattgtatttttaagttgccttatgtctgctgttaaattgtcatgaaaggttccccagaggtgttgtttcacctcatcccaactatgcattgactgattccatggtagagaagtgacacagatatgtttatgctcccagtcacagtttaattgctgttggaatgccagtgcatcttgtcgctcccccacatattccaaaggcagcctcgagggcttgcagatgtgcaagaatcttttgatctataccttgctgtaagagaagttcattagaaacatttctggccaaattatctacaaaagcagctgtttgtactgattcagtaatagatgctacagccacactagcagttgctaggatgactatggctgagactatgaaggctgtaagtgtgcctatgaatctttcgggtctgacctgggacagggcacgatctaaagtgggaagggaagaggaaccttgccaaccgcatgtcaaattgactggtgggaatgcctcagattgtctccttaataccacgactctagtaatatttataattagatatattgtaattagtaatacatgaggtgaaccaaggctgtccctgcacctgggtcacaaacatggagttttggggtataacagaaatattagttcccacaaggaaaacatatggatgggtagtgcaaatcaggcactgatcagtgtgattatgaataaaggttgtagtatagttgtgactggaattatgatatgtccaatgccaggtgtcaaaggaggtgctaagatgtcccaggcaccacaaagtgtcttggggtggcatggactttacttggggtctggaatatcctatccccccataggcccaaatcataggggaatgggacgtggctatgaaactgtgattggtgccatgatggatgaggacattagtaaggctgccctgcaagtggctgtgggggctccagtctaagatgttataattgcctaactggagcatatgggcttattccccatgacagacctcccagctaaagtggaatccattactttcccggctttgttctttaacacaggaaggaatgtttgggaaagtggcattgattgcatcgcccggtttgaggctacctgcagctaggaatgttaaggcatctcctttgccatgatgtagccataattgtgtttgggcaggtacacagggttagaacctttataacttacacacagtgggaggatagtggaatgatatgtagtgttacctggcaccttagtttaatgtgtgccattaatgagggaccccactgggggtaaatctatccctcctagccaagcagttatgttattaaaggctgagaaggaggtgtctgcccaggtgacagggtgaaagaaaggtggatctaaaatatgagcccaatagagtgcaccaggtacaggttgcagacaaagcaagagcatatgaagtatcaataccctatgcgagttgcaatgtacaacagagagcatagcaagcaacaaattatctggagtgaatggtgtctgtgtctggagcaggattcattcagcctcctcagttgccgccttcagcatcccccaggtaatgtccagagcttgttgccgtccgaggacactgcattatccagggttgtgagtcctgtagggtcagttccttcatttctaggttgggtcctagtcacgtcatggtatggtttgatgcgtcgtgctggaatccaaagaggacctgagggggtgtgaacacaagcatatcctcttccccaagttaacaattcatttggaccacatcatacattactgttcacatatttccataaaactgcagttttatgtcttgagaggttttagcaaagtgcttttctacaatggactgaaatttgtcatctaaattttaaaaattaagggtaaataaggcttgtgccaataatgctgcagggtccttacccatactccccttttttgttttttgagcatatttttaagggtggagtgggcacattctactatggcttgtccttgggggttatacgggatgcctgtggaatgttggatgttccacatgtgacaaaattgttgaaattgtgagctggcataagctagatcattattagttttaatttttgtgggttgccccataaatgcaaaagttaaaagaagatgtttagtgacatatccagtagactctccaggaagggcatttgcactaattaaatcaatggatacatgtacgtatctaagttttccaaattcagggatgtgtgtaacgtctgtttgccataacttattaggttcccatcctctagggttgaaggagggtatgtgcctgtgagctggcaatctcggcattgcaggataatttgtttagccagcctctgggtaagttgaaattgtttagacaagtttctccagttttggtggaaaaattgatgcgattgtgtggcttggtcaagcactgatgtcataacctgaaggtctgcttcatcattgccataagccagtgggccaggcagtcagctgtggccctgaatataataaaaataggatgtgtacactgatctagcaattgctgaagtcaaagagcacacagggtgggctccagagtggacttaattagggctgtctcaaggttctgcagtaaataaacagagtaagccaagtaactaacaatattgaggggctgagtggaaaaagtttccaaagccaatatcaaggccccaccctcagctctctgagtgttagtaaatccagatcgattgatggaattatgtggtctccaccagactgccacttttccatgtttactagaaccatccgtaaacagtgttaaagcattaggtatgggggagtgaactatcggtggcctgaatatatgactttactgattaactggatatagggagatagtgttttggtctcggtatgtgagcaaaaaatccattctagaaagcatagctctggggccatttgtcctattaaccctgtaggggagtgtttagtggggaaaataaaaataaacaattgaacagaatattctggatctatgagatttagttgtctttgagaaatagcctgttctatttcttccatcttttttttttttttttttttttttttgctgcaggggttaaatatctgggagaatccagggctgtgttaccctttaagatagaaaacaggttttgcagcttataagtaggaatgcccaaggtggggtgaagccagttaaaattacctagtaatttctgataatcatttaaggtgtgtaagttgctagtatttaatttaaccttttgaggtcttactgaccaggaagtatgtacccaagatacttccaaggagaggacatttgtgctttttcaggtgcaatgattaaaccacttagctgtgcattctttatgacagaggtatataaacttaaaagcactggctccactggggctgctagtagaatatcatccataaaatgaataaccttgcaatgaggaaattcttttctactggggaacaaagcttgatttacatgatactgacacatggcagcactgtttagcattccttgaggaagcactttccaatgaaatcggcaagctgacctttcaatattgatagctggtattgtaaatgcaaatttttctgtcttgctttgccaggggaatagtgtaaaagcaacagtggccattattagaaagaggtgttttaaattcttaaattgtacttaaatcttagcagagaattataatctgggatgtcgcttgtatacaaggaacacatgaaattttgccatgggccacccgcggagccagagagtctagccggcgggtcccggggcggcggtcatgttgcgcttgctcaggcgctgctttttgtctgtgccaccttttgtctgtgctgctccctcaccctgctgccgctgggcggaccttcgtgcacgcctcctgcccctccctatcaggccagctctggtgtgctgcgcctggctccttgtcactgctgcctctgtgcaggctgagttcctggaagcacttgctggctccaggtctgcgagcttcctttgctgccaagtatttccttctgcctaccacccatttggccacgcggtttcagcctctaatgctttttcttaactttttataaatgttaaaagaaatgggtttatatacccaattgccctgtcaatcttgtattaccaggcaggctaagagctccccacttaatgcctcttgcctaagaaagggtcccatagctgtagcatagctcttgtcttttttcctatttattggaggagggggctcaggcaaaacctccatttcctctttgttattttggcctggcgatattggggctgagggaaaaggaggtggtaaagcaggtgacggttcctcctccttcccctttttaggctcttctgtgtataatggagccagggctgccctgactaaggcccatagcattaaagatgatactgggacccattgcccttgcacatgatgctgattaagatttctccccacttgttcccagagctctacgtctagcgttcctttttctgggaactatgggttatgtgagacaacagtttgcattaggtcccttaattgagcctgtgaaaatgaggctccactagttttaagcagctgcttcaatacttttatatactgttcctgttgagctgataactgttgtcccatgatgaaaccctagcctgaacaatccccgccaaacttggaaattccgagcgggcatcaatgacttactgacttattgactgtgcagt

SEQ ID NO: 9614 - DNA, 38771 bp, Homo sapiens; identical to SEQ ID NO: 7561
  SITE (7892): n equals a,t,g, or c
  SITE (7893): n equals a,t,g, or c
  SITE (7894): n equals a,t,g, or c
  SITE (7895): n equals a,t,g, or c
  SITE (7896): n equals a,t,g, or c
  SITE (7897): n equals a,t,g, or c
  SITE (7898): n equals a,t,g, or c
  SITE (7899): n equals a,t,g, or c
  SITE (7900): n equals a,t,g, or c
  SITE (7901): n equals a,t,g, or c
  SITE (7902): n equals a,t,g, or c
  SITE (7903): n equals a,t,g, or c
  SITE (7904): n equals a,t,g, or c
  SITE (7905): n equals a,t,g, or c
  SITE (7906): n equals a,t,g, or c
  SITE (7907): n equals a,t,g, or c
  SITE (7908): n equals a,t,g, or c
  SITE (7909): n equals a,t,g, or c
  SITE (7910): n equals a,t,g, or c
  SITE (7911): n equals a,t,g, or c
  SITE (7912): n equals a,t,g, or c
  SITE (7913): n equals a,t,g, or c
  SITE (7914): n equals a,t,g, or c
  SITE (7915): n equals a,t,g, or c
  SITE (7916): n equals a,t,g, or c
  SITE (7917): n equals a,t,g, or c
  SITE (7918): n equals a,t,g, or c
  SITE (7919): n equals a,t,g, or c
  SITE (7920): n equals a,t,g, or c
  SITE (7921): n equals a,t,g, or c
  SITE (7922): n equals a,t,g, or c
  SITE (7923): n equals a,t,g, or c
  SITE (7924): n equals a,t,g, or c
  SITE (7925): n equals a,t,g, or c
  SITE (7926): n equals a,t,g, or c
  SITE (7927): n equals a,t,g, or c
  SITE (7928): n equals a,t,g, or c
  SITE (7929): n equals a,t,g, or c
  SITE (7930): n equals a,t,g, or c
  SITE (7931): n equals a,t,g, or c
  SITE (7932): n equals a,t,g, or c
  SITE (7933): n equals a,t,g, or c
  SITE (7934): n equals a,t,g, or c
  SITE (7935): n equals a,t,g, or c
  SITE (7936): n equals a,t,g, or c
  SITE (7937): n equals a,t,g, or c
  SITE (7938): n equals a,t,g, or c
  SITE (7939): n equals a,t,g, or c
  SITE (7940): n equals a,t,g, or c
  SITE (7941): n equals a,t,g, or c
  SITE (7942): n equals a,t,g, or c
  SITE (7943): n equals a,t,g, or c
  SITE (7944): n equals a,t,g, or c
  SITE (7945): n equals a,t,g, or c
  SITE (7946): n equals a,t,g, or c
  SITE (7947): n equals a,t,g, or c
  SITE (7948): n equals a,t,g, or c
  SITE (7949): n equals a,t,g, or c
  SITE (7950): n equals a,t,g, or c
  SITE (7951): n equals a,t,g, or c
  SITE (7952): n equals a,t,g, or c
  SITE (7953): n equals a,t,g, or c
  SITE (7954): n equals a,t,g, or c
  SITE (7955): n equals a,t,g, or c
  SITE (7956): n equals a,t,g, or c
  SITE (7957): n equals a,t,g, or c
  SITE (7958): n equals a,t,g, or c
  SITE (7959): n equals a,t,g, or c
  SITE (7960): n equals a,t,g, or c
  SITE (7961): n equals a,t,g, or c
  SITE (7962): n equals a,t,g, or c
  SITE (7963): n equals a,t,g, or c
  SITE (7964): n equals a,t,g, or c
  SITE (7965): n equals a,t,g, or c
  SITE (7966): n equals a,t,g, or c
  SITE (7967): n equals a,t,g, or c
  SITE (7968): n equals a,t,g, or c
  SITE (7969): n equals a,t,g, or c
  SITE (7970): n equals a,t,g, or c
  SITE (7971): n equals a,t,g, or c
  SITE (7972): n equals a,t,g, or c
  SITE (7973): n equals a,t,g, or c
  SITE (7974): n equals a,t,g, or c
  SITE (7975): n equals a,t,g, or c
  SITE (7976): n equals a,t,g, or c
  SITE (7977): n equals a,t,g, or c
  SITE (7978): n equals a,t,g, or c
  SITE (7979): n equals a,t,g, or c
  SITE (7980): n equals a,t,g, or c
  SITE (7981): n equals a,t,g, or c
  SITE (7982): n equals a,t,g, or c
  SITE (7983): n equals a,t,g, or c
  SITE (7984): n equals a,t,g, or c
  SITE (7985): n equals a,t,g, or c
  SITE (7986): n equals a,t,g, or c
  SITE (7987): n equals a,t,g, or c
  SITE (7988): n equals a,t,g, or c
  SITE (7989): n equals a,t,g, or c
  SITE (7990): n equals a,t,g, or c
  SITE (7991): n equals a,t,g, or c
  SITE (7992): n equals a,t,g, or c
  SITE (7993): n equals a,t,g, or c
  SITE (7994): n equals a,t,g, or c
  SITE (7995): n equals a,t,g, or c
  SITE (7996): n equals a,t,g, or c
  SITE (7997): n equals a,t,g, or c
  SITE (7998): n equals a,t,g, or c
  SITE (7999): n equals a,t,g, or c
  SITE (8000): n equals a,t,g, or c
  SITE (8001): n equals a,t,g, or c
  SITE (8002): n equals a,t,g, or c
  SITE (8003): n equals a,t,g, or c
  SITE (8004): n equals a,t,g, or c
  SITE (8005): n equals a,t,g, or c
  SITE (8006): n equals a,t,g, or c
  SITE (8007): n equals a,t,g, or c
  SITE (8008): n equals a,t,g, or c
  SITE (8009): n equals a,t,g, or c
  SITE (8010): n equals a,t,g, or c
  SITE (8011): n equals a,t,g, or c
  SITE (8012): n equals a,t,g, or c
  SITE (8013): n equals a,t,g, or c
  SITE (8014): n equals a,t,g, or c
  SITE (8015): n equals a,t,g, or c
  SITE (8016): n equals a,t,g, or c
  SITE (8017): n equals a,t,g, or c
  SITE (8018): n equals a,t,g, or c
  SITE (8019): n equals a,t,g, or c
  SITE (8020): n equals a,t,g, or c
  SITE (8021): n equals a,t,g, or c
  SITE (8022): n equals a,t,g, or c
  SITE (8023): n equals a,t,g, or c
  SITE (8024): n equals a,t,g, or c
  SITE (8025): n equals a,t,g, or c
  SITE (8026): n equals a,t,g, or c
  SITE (8027): n equals a,t,g, or c
  SITE (8028): n equals a,t,g, or c
  SITE (8029): n equals a,t,g, or c
  SITE (8030): n equals a,t,g, or c
  SITE (8031): n equals a,t,g, or c
  SITE (8032): n equals a,t,g, or c
  SITE (8033): n equals a,t,g, or c
  SITE (8034): n equals a,t,g, or c
  SITE (8035): n equals a,t,g, or c
  SITE (8036): n equals a,t,g, or c
  SITE (8037): n equals a,t,g, or c
  SITE (8038): n equals a,t,g, or c
  SITE (8039): n equals a,t,g, or c
  SITE (8040): n equals a,t,g, or c
  SITE (8041): n equals a,t,g, or c
  SITE (8042): n equals a,t,g, or c
  SITE (8043): n equals a,t,g, or c
  SITE (8044): n equals a,t,g, or c
  SITE (8045): n equals a,t,g, or c
  SITE (8046): n equals a,t,g, or c
  SITE (8047): n equals a,t,g, or c
  SITE (8048): n equals a,t,g, or c
  SITE (8049): n equals a,t,g, or c
  SITE (8050): n equals a,t,g, or c
  SITE (8051): n equals a,t,g, or c
  SITE (8052): n equals a,t,g, or c
  SITE (8053): n equals a,t,g, or c
  SITE (8054): n equals a,t,g, or c
  SITE (8055): n equals a,t,g, or c
  SITE (8056): n equals a,t,g, or c
  SITE (8057): n equals a,t,g, or c
  SITE (8058): n equals a,t,g, or c
  SITE (8059): n equals a,t,g, or c
  SITE (8060): n equals a,t,g, or c
  SITE (8061): n equals a,t,g, or c
  SITE (8062): n equals a,t,g, or c
  SITE (8063): n equals a,t,g, or c
  SITE (8064): n equals a,t,g, or c
  SITE (8065): n equals a,t,g, or c
  SITE (8066): n equals a,t,g, or c
  SITE (8067): n equals a,t,g, or c
  SITE (8068): n equals a,t,g, or c
  SITE (8069): n equals a,t,g, or c
  SITE (8070): n equals a,t,g, or c
  SITE (8071): n equals a,t,g, or c
  SITE (8072): n equals a,t,g, or c
  SITE (8073): n equals a,t,g, or c
  SITE (8074): n equals a,t,g, or c
  SITE (8075): n equals a,t,g, or c
  SITE (8076): n equals a,t,g, or c
  SITE (8077): n equals a,t,g, or c
  SITE (8078): n equals a,t,g, or c
  SITE (8079): n equals a,t,g, or c
  SITE (8080): n equals a,t,g, or c
  SITE (8081): n equals a,t,g, or c
  SITE (8082): n equals a,t,g, or c
  SITE (8083): n equals a,t,g, or c
  SITE (8084): n equals a,t,g, or c
  SITE (8085): n equals a,t,g, or c
  SITE (8086): n equals a,t,g, or c
  SITE (8087): n equals a,t,g, or c
  SITE (8088): n equals a,t,g, or c
  SITE (8089): n equals a,t,g, or c
  SITE (8090): n equals a,t,g, or c
  SITE (8091): n equals a,t,g, or c
  SITE (8092): n equals a,t,g, or c
  SITE (8093): n equals a,t,g, or c
  SITE (8094): n equals a,t,g, or c
  SITE (8095): n equals a,t,g, or c
  SITE (8096): n equals a,t,g, or c
  SITE (8097): n equals a,t,g, or c
  SITE (8098): n equals a,t,g, or c
  SITE (8099): n equals a,t,g, or c
  SITE (8100): n equals a,t,g, or c
  SITE (8101): n equals a,t,g, or c
  SITE (8102): n equals a,t,g, or c
  SITE (8103): n equals a,t,g, or c
  SITE (8104): n equals a,t,g, or c
  SITE (8105): n equals a,t,g, or c
  SITE (8106): n equals a,t,g, or c
  SITE (8107): n equals a,t,g, or c
  SITE (8108): n equals a,t,g, or c
  SITE (8109): n equals a,t,g, or c
  SITE (8110): n equals a,t,g, or c
  SITE (8111): n equals a,t,g, or c
  SITE (8112): n equals a,t,g, or c
  SITE (8113): n equals a,t,g, or c
  SITE (8114): n equals a,t,g, or c
  SITE (8115): n equals a,t,g, or c
  SITE (8116): n equals a,t,g, or c
  SITE (8117): n equals a,t,g, or c
  SITE (8118): n equals a,t,g, or c
  SITE (8119): n equals a,t,g, or c
  SITE (8120): n equals a,t,g, or c
  SITE (8121): n equals a,t,g, or c
  SITE (8122): n equals a,t,g, or c
  SITE (8123): n equals a,t,g, or c
  SITE (8124): n equals a,t,g, or c
  SITE (8125): n equals a,t,g, or c
  SITE (8126): n equals a,t,g, or c
  SITE (8127): n equals a,t,g, or c
  SITE (8128): n equals a,t,g, or c
  SITE (8129): n equals a,t,g, or c
  SITE (8130): n equals a,t,g, or c
  SITE (8131): n equals a,t,g, or c
  SITE (8132): n equals a,t,g, or c
  SITE (8133): n equals a,t,g, or c
  SITE (8134): n equals a,t,g, or c
  SITE (8135): n equals a,t,g, or c
  SITE (8136): n equals a,t,g, or c
  SITE (8137): n equals a,t,g, or c
  SITE (8138): n equals a,t,g, or c
  SITE (8139): n equals a,t,g, or c
  SITE (8140): n equals a,t,g, or c
  SITE (8141): n equals a,t,g, or c
  SITE (8142): n equals a,t,g, or c
  SITE (8143): n equals a,t,g, or c
  SITE (8144): n equals a,t,g, or c
  SITE (8145): n equals a,t,g, or c
  SITE (8146): n equals a,t,g, or c
  SITE (8147): n equals a,t,g, or c
  SITE (8148): n equals a,t,g, or c
  SITE (8149): n equals a,t,g, or c
  SITE (8150): n equals a,t,g, or c
  SITE (8151): n equals a,t,g, or c
  SITE (8152): n equals a,t,g, or c
  SITE (8153): n equals a,t,g, or c
  SITE (8154): n equals a,t,g, or c
  SITE (8155): n equals a,t,g, or c
  SITE (8156): n equals a,t,g, or c
  SITE (8157): n equals a,t,g, or c
  SITE (8158): n equals a,t,g, or c
  SITE (8159): n equals a,t,g, or c
  SITE (8160): n equals a,t,g, or c
  SITE (8161): n equals a,t,g, or c
  SITE (8162): n equals a,t,g, or c
  SITE (8163): n equals a,t,g, or c
  SITE (8164): n equals a,t,g, or c
  SITE (8165): n equals a,t,g, or c
  SITE (8166): n equals a,t,g, or c
  SITE (8167): n equals a,t,g, or c
  SITE (8168): n equals a,t,g, or c
  SITE (8169): n equals a,t,g, or c
  SITE (8170): n equals a,t,g, or c
  SITE (8171): n equals a,t,g, or c
  SITE (8172): n equals a,t,g, or c
  SITE (8173): n equals a,t,g, or c
  SITE (8174): n equals a,t,g, or c
  SITE (8175): n equals a,t,g, or c
  SITE (8176): n equals a,t,g, or c
  SITE (8177): n equals a,t,g, or c
  SITE (8178): n equals a,t,g, or c
  SITE (8179): n equals a,t,g, or c
  SITE (8180): n equals a,t,g, or c
  SITE (8181): n equals a,t,g, or c
  SITE (8182): n equals a,t,g, or c
  SITE (8183): n equals a,t,g, or c
  SITE (8184): n equals a,t,g, or c
  SITE (8185): n equals a,t,g, or c
  SITE (8186): n equals a,t,g, or c
  SITE (8187): n equals a,t,g, or c
  SITE (8188): n equals a,t,g, or c
  SITE (8189): n equals a,t,g, or c
  SITE (8190): n equals a,t,g, or c
  SITE (8191): n equals a,t,g, or c
  SITE (8192): n equals a,t,g, or c
  SITE (8193): n equals a,t,g, or c
  SITE (8194): n equals a,t,g, or c
  SITE (8195): n equals a,t,g, or c
  SITE (8196): n equals a,t,g, or c
  SITE (8197): n equals a,t,g, or c
  SITE (8198): n equals a,t,g, or c
  SITE (8199): n equals a,t,g, or c
  SITE (8200): n equals a,t,g, or c
  SITE (8201): n equals a,t,g, or c
  SITE (8202): n equals a,t,g, or c
  SITE (8203): n equals a,t,g, or c
  SITE (8204): n equals a,t,g, or c
  SITE (8205): n equals a,t,g, or c
  SITE (8206): n equals a,t,g, or c
  SITE (8207): n equals a,t,g, or c
  SITE (8208): n equals a,t,g, or c
  SITE (8209): n equals a,t,g, or c
  SITE (8210): n equals a,t,g, or c
  SITE (8211): n equals a,t,g, or c
  SITE (8212): n equals a,t,g, or c
  SITE (8213): n equals a,t,g, or c
  SITE (8214): n equals a,t,g, or c
  SITE (8215): n equals a,t,g, or c
  SITE (8216): n equals a,t,g, or c
  SITE (8217): n equals a,t,g, or c
  SITE (8218): n equals a,t,g, or c
  SITE (8219): n equals a,t,g, or c
  SITE (8220): n equals a,t,g, or c
  SITE (8221): n equals a,t,g, or c
  SITE (8222): n equals a,t,g, or c
  SITE (8223): n equals a,t,g, or c
  SITE (8224): n equals a,t,g, or c
  SITE (8225): n equals a,t,g, or c
  SITE (8226): n equals a,t,g, or c
  SITE (8227): n equals a,t,g, or c
  SITE (8228): n equals a,t,g, or c
  SITE (8229): n equals a,t,g, or c
  SITE (8230): n equals a,t,g, or c
  SITE (8231): n equals a,t,g, or c
  SITE (8232): n equals a,t,g, or c
  SITE (8233): n equals a,t,g, or c
  SITE (8234): n equals a,t,g, or c
  SITE (8235): n equals a,t,g, or c
  SITE (8236): n equals a,t,g, or c
  SITE (8237): n equals a,t,g, or c
  SITE (8238): n equals a,t,g, or c
  SITE (8239): n equals a,t,g, or c
  SITE (8240): n equals a,t,g, or c
  SITE (8241): n equals a,t,g, or c
  SITE (8242): n equals a,t,g, or c
  SITE (8243): n equals a,t,g, or c
  SITE (8244): n equals a,t,g, or c
  SITE (8245): n equals a,t,g, or c
  SITE (8246): n equals a,t,g, or c
  SITE (8247): n equals a,t,g, or c
  SITE (8248): n equals a,t,g, or c
  SITE (8249): n equals a,t,g, or c
  SITE (8250): n equals a,t,g, or c
  SITE (8251): n equals a,t,g, or c
  SITE (8252): n equals a,t,g, or c
  SITE (8253): n equals a,t,g, or c
  SITE (8254): n equals a,t,g, or c
  SITE (8255): n equals a,t,g, or c
  SITE (8256): n equals a,t,g, or c
  SITE (8257): n equals a,t,g, or c
  SITE (8258): n equals a,t,g, or c
  SITE (8259): n equals a,t,g, or c
  SITE (8260): n equals a,t,g, or c
  SITE (8261): n equals a,t,g, or c
  SITE (8262): n equals a,t,g, or c
  SITE (8263): n equals a,t,g, or c
  SITE (8264): n equals a,t,g, or c
  SITE (8265): n equals a,t,g, or c
  SITE (8266): n equals a,t,g, or c
  SITE (8267): n equals a,t,g, or c
  SITE (8268): n equals a,t,g, or c
  SITE (8269): n equals a,t,g, or c
  SITE (8270): n equals a,t,g, or c
  SITE (8271): n equals a,t,g, or c
  SITE (8272): n equals a,t,g, or c
  SITE (8273): n equals a,t,g, or c
  SITE (8274): n equals a,t,g, or c
  SITE (8275): n equals a,t,g, or c
  SITE (8276): n equals a,t,g, or c
  SITE (8277): n equals a,t,g, or c
  SITE (8278): n equals a,t,g, or c
  SITE (8279): n equals a,t,g, or c
  SITE (8280): n equals a,t,g, or c
  SITE (8281): n equals a,t,g, or c
  SITE (8282): n equals a,t,g, or c
  SITE (8283): n equals a,t,g, or c
  SITE (8284): n equals a,t,g, or c
  SITE (8285): n equals a,t,g, or c
  SITE (8286): n equals a,t,g, or c
  SITE (8287): n equals a,t,g, or c
  SITE (8288): n equals a,t,g, or c
  SITE (8289): n equals a,t,g, or c
  SITE (8290): n equals a,t,g, or c
  SITE (8291): n equals a,t,g, or c
  SITE (8292): n equals a,t,g, or c
  SITE (8293): n equals a,t,g, or c
  SITE (8294): n equals a,t,g, or c
  SITE (8295): n equals a,t,g, or c
  SITE (8296): n equals a,t,g, or c
  SITE (8297): n equals a,t,g, or c
  SITE (8298): n equals a,t,g, or c
  SITE (8299): n equals a,t,g, or c
  SITE (8300): n equals a,t,g, or c
  SITE (8301): n equals a,t,g, or c
  SITE (8302): n equals a,t,g, or c
  SITE (8303): n equals a,t,g, or c
  SITE (8304): n equals a,t,g, or c
  SITE (8305): n equals a,t,g, or c
  SITE (8306): n equals a,t,g, or c
  SITE (8307): n equals a,t,g, or c
  SITE (8308): n equals a,t,g, or c
  SITE (8309): n equals a,t,g, or c
  SITE (8310): n equals a,t,g, or c
  SITE (8311): n equals a,t,g, or c
  SITE (8312): n equals a,t,g, or c
  SITE (8313): n equals a,t,g, or c
  SITE (8314): n equals a,t,g, or c
  SITE (8315): n equals a,t,g, or c
  SITE (8316): n equals a,t,g, or c
  SITE (8317): n equals a,t,g, or c
  SITE (8318): n equals a,t,g, or c
  SITE (8319): n equals a,t,g, or c
  SITE (8320): n equals a,t,g, or c
  SITE (8321): n equals a,t,g, or c
  SITE (8322): n equals a,t,g, or c
  SITE (8323): n equals a,t,g, or c
  SITE (8324): n equals a,t,g, or c
  SITE (8325): n equals a,t,g, or c
  SITE (8326): n equals a,t,g, or c
  SITE (8327): n equals a,t,g, or c
  SITE (8328): n equals a,t,g, or c
  SITE (8329): n equals a,t,g, or c
  SITE (8330): n equals a,t,g, or c
  SITE (8331): n equals a,t,g, or c
  SITE (8332): n equals a,t,g, or c
  SITE (8333): n equals a,t,g, or c
  SITE (8334): n equals a,t,g, or c
  SITE (8335): n equals a,t,g, or c
  SITE (8336): n equals a,t,g, or c
  SITE (8337): n equals a,t,g, or c
  SITE (8338): n equals a,t,g, or c
  SITE (8339): n equals a,t,g, or c
  SITE (8340): n equals a,t,g, or c
  SITE (8341): n equals a,t,g, or c
  SITE (8342): n equals a,t,g, or c
  SITE (8343): n equals a,t,g, or c
  SITE (8344): n equals a,t,g, or c
  SITE (8345): n equals a,t,g, or c
  SITE (8346): n equals a,t,g, or c
  SITE (8347): n equals a,t,g, or c
  SITE (8348): n equals a,t,g, or c
  SITE (8349): n equals a,t,g, or c
  SITE (8350): n equals a,t,g, or c
  SITE (8351): n equals a,t,g, or c
  SITE (8352): n equals a,t,g, or c
  SITE (8353): n equals a,t,g, or c
  SITE (8354): n equals a,t,g, or c
  SITE (8355): n equals a,t,g, or c
  SITE (8356): n equals a,t,g, or c
  SITE (8357): n equals a,t,g, or c
  SITE (8358): n equals a,t,g, or c
  SITE (8359): n equals a,t,g, or c
  SITE (8360): n equals a,t,g, or c
  SITE (8361): n equals a,t,g, or c
  SITE (8362): n equals a,t,g, or c
  SITE (8363): n equals a,t,g, or c
  SITE (8364): n equals a,t,g, or c
  SITE (8365): n equals a,t,g, or c
  SITE (8366): n equals a,t,g, or c
  SITE (8367): n equals a,t,g, or c
  SITE (8368): n equals a,t,g, or c
  SITE (8369): n equals a,t,g, or c
  SITE (8370): n equals a,t,g, or c
  SITE (8371): n equals a,t,g, or c
  SITE (8372): n equals a,t,g, or c
  SITE (8373): n equals a,t,g, or c
  SITE (8374): n equals a,t,g, or c
  SITE (8375): n equals a,t,g, or c
  SITE (8376): n equals a,t,g, or c
  SITE (8377): n equals a,t,g, or c
  SITE (8378): n equals a,t,g, or c
  SITE (8379): n equals a,t,g, or c
  SITE (8380): n equals a,t,g, or c
  SITE (8381): n equals a,t,g, or c
  SITE (8382): n equals a,t,g, or c
  SITE (8383): n equals a,t,g, or c
  SITE (8384): n equals a,t,g, or c
  SITE (8385): n equals a,t,g, or c
  SITE (8386): n equals a,t,g, or c
  SITE (8387): n equals a,t,g, or c
  SITE (8388): n equals a,t,g, or c
  SITE (8389): n equals a,t,g, or c
  SITE (8390): n equals a,t,g, or c
  SITE (8391): n equals a,t,g, or c
  SITE (8392): n equals a,t,g, or c
  SITE (8393): n equals a,t,g, or c
  SITE (8394): n equals a,t,g, or c
  SITE (8395): n equals a,t,g, or c
  SITE (8396): n equals a,t,g, or c
  SITE (8397): n equals a,t,g, or c
  SITE (8398): n equals a,t,g, or c
  SITE (8399): n equals a,t,g, or c
  SITE (8400): n equals a,t,g, or c
  SITE (8401): n equals a,t,g, or c
  SITE (8402): n equals a,t,g, or c
  SITE (8403): n equals a,t,g, or c
  SITE (8404): n equals a,t,g, or c
  SITE (8405): n equals a,t,g, or c
  SITE (8406): n equals a,t,g, or c
  SITE (8407): n equals a,t,g, or c
  SITE (8408): n equals a,t,g, or c
  SITE (8409): n equals a,t,g, or c
  SITE (8410): n equals a,t,g, or c
  SITE (8411): n equals a,t,g, or c
  SITE (8412): n equals a,t,g, or c
  SITE (8413): n equals a,t,g, or c
  SITE (8414): n equals a,t,g, or c
  SITE (8415): n equals a,t,g, or c
  SITE (8416): n equals a,t,g, or c
  SITE (8417): n equals a,t,g, or c
  SITE (8418): n equals a,t,g, or c
  SITE (8419): n equals a,t,g, or c
  SITE (8420): n equals a,t,g, or c
  SITE (8421): n equals a,t,g, or c
  SITE (8422): n equals a,t,g, or c
  SITE (8423): n equals a,t,g, or c
  SITE (8424): n equals a,t,g, or c
  SITE (8425): n equals a,t,g, or c
  SITE (8426): n equals a,t,g, or c
  SITE (8427): n equals a,t,g, or c
  SITE (8428): n equals a,t,g, or c
  SITE (8429): n equals a,t,g, or c
  SITE (8430): n equals a,t,g, or c
  SITE (8431): n equals a,t,g, or c
  SITE (8432): n equals a,t,g, or c
  SITE (8433): n equals a,t,g, or c
  SITE (8434): n equals a,t,g, or c
  SITE (8435): n equals a,t,g, or c
  SITE (8436): n equals a,t,g, or c
  SITE (8437): n equals a,t,g, or c
  SITE (8438): n equals a,t,g, or c
  SITE (8439): n equals a,t,g, or c
  SITE (8440): n equals a,t,g, or c
  SITE (8441): n equals a,t,g, or c
  SITE (8442): n equals a,t,g, or c
  SITE (8443): n equals a,t,g, or c
  SITE (8444): n equals a,t,g, or c
  SITE (8445): n equals a,t,g, or c
  SITE (8446): n equals a,t,g, or c
  SITE (8447): n equals a,t,g, or c
  SITE (8448): n equals a,t,g, or c
  SITE (8449): n equals a,t,g, or c
  SITE (8450): n equals a,t,g, or c
  SITE (8451): n equals a,t,g, or c
  SITE (8452): n equals a,t,g, or c
  SITE (8453): n equals a,t,g, or c
  SITE (8454): n equals a,t,g, or c
  SITE (8455): n equals a,t,g, or c
  SITE (8456): n equals a,t,g, or c
  SITE (8457): n equals a,t,g, or c
  SITE (8458): n equals a,t,g, or c
  SITE (8459): n equals a,t,g, or c
  SITE (8460): n equals a,t,g, or c
  SITE (8461): n equals a,t,g, or c
  SITE (8462): n equals a,t,g, or c
  SITE (8463): n equals a,t,g, or c
  SITE (8464): n equals a,t,g, or c
  SITE (8465): n equals a,t,g, or c
  SITE (8466): n equals a,t,g, or c
  SITE (8467): n equals a,t,g, or c
  SITE (8468): n equals a,t,g, or c
  SITE (8469): n equals a,t,g, or c
  SITE (8470): n equals a,t,g, or c
  SITE (8471): n equals a,t,g, or c
  SITE (8472): n equals a,t,g, or c
  SITE (8473): n equals a,t,g, or c
  SITE (8474): n equals a,t,g, or c
  SITE (8475): n equals a,t,g, or c
  SITE (8476): n equals a,t,g, or c
  SITE (8477): n equals a,t,g, or c
  SITE (8478): n equals a,t,g, or c
  SITE (8479): n equals a,t,g, or c
  SITE (8480): n equals a,t,g, or c
  SITE (8481): n equals a,t,g, or c
  SITE (8482): n equals a,t,g, or c
  SITE (8483): n equals a,t,g, or c
  SITE (8484): n equals a,t,g, or c
  SITE (8485): n equals a,t,g, or c
  SITE (8486): n equals a,t,g, or c
  SITE (8487): n equals a,t,g, or c
  SITE (8488): n equals a,t,g, or c
  SITE (8489): n equals a,t,g, or c
  SITE (8490): n equals a,t,g, or c
  SITE (8491): n equals a,t,g, or c
  SITE (8492): n equals a,t,g, or c
  SITE (8493): n equals a,t,g, or c
  SITE (8494): n equals a,t,g, or c
  SITE (8495): n equals a,t,g, or c
  SITE (8496): n equals a,t,g, or c
  SITE (8497): n equals a,t,g, or c
  SITE (8498): n equals a,t,g, or c
  SITE (8499): n equals a,t,g, or c
  SITE (8500): n equals a,t,g, or c
  SITE (8501): n equals a,t,g, or c
  SITE (8502): n equals a,t,g, or c
  SITE (8503): n equals a,t,g, or c
  SITE (8504): n equals a,t,g, or c
  SITE (8505): n equals a,t,g, or c
  SITE (8506): n equals a,t,g, or c
  SITE (8507): n equals a,t,g, or c
  SITE (8508): n equals a,t,g, or c
  SITE (8509): n equals a,t,g, or c
  SITE (8510): n equals a,t,g, or c
  SITE (8511): n equals a,t,g, or c
  SITE (8512): n equals a,t,g, or c
  SITE (8513): n equals a,t,g, or c
  SITE (8514): n equals a,t,g, or c
  SITE (8515): n equals a,t,g, or c
  SITE (8516): n equals a,t,g, or c
  SITE (8517): n equals a,t,g, or c
  SITE (8518): n equals a,t,g, or c
  SITE (8519): n equals a,t,g, or c
  SITE (8520): n equals a,t,g, or c
  SITE (8521): n equals a,t,g, or c
  SITE (8522): n equals a,t,g, or c
  SITE (8523): n equals a,t,g, or c
  SITE (8524): n equals a,t,g, or c
  SITE (8525): n equals a,t,g, or c
  SITE (8526): n equals a,t,g, or c
  SITE (8527): n equals a,t,g, or c
  SITE (8528): n equals a,t,g, or c
  SITE (8529): n equals a,t,g, or c
  SITE (8530): n equals a,t,g, or c
  SITE (8531): n equals a,t,g, or c
  SITE (8532): n equals a,t,g, or c
  SITE (8533): n equals a,t,g, or c
  SITE (8534): n equals a,t,g, or c
  SITE (8535): n equals a,t,g, or c
  SITE (8536): n equals a,t,g, or c
  SITE (8537): n equals a,t,g, or c
  SITE (8538): n equals a,t,g, or c
  SITE (8539): n equals a,t,g, or c
  SITE (8540): n equals a,t,g, or c
  SITE (8541): n equals a,t,g, or c
  SITE (8542): n equals a,t,g, or c
  SITE (8543): n equals a,t,g, or c
  SITE (8544): n equals a,t,g, or c
  SITE (8545): n equals a,t,g, or c
  SITE (8546): n equals a,t,g, or c
  SITE (8547): n equals a,t,g, or c
  SITE (8548): n equals a,t,g, or c
  SITE (8549): n equals a,t,g, or c
  SITE (8550): n equals a,t,g, or c
  SITE (8551): n equals a,t,g, or c
  SITE (8552): n equals a,t,g, or c
  SITE (8553): n equals a,t,g, or c
  SITE (8554): n equals a,t,g, or c
  SITE (8555): n equals a,t,g, or c
  SITE (8556): n equals a,t,g, or c
  SITE (8557): n equals a,t,g, or c
  SITE (8558): n equals a,t,g, or c
  SITE (8559): n equals a,t,g, or c
  SITE (8560): n equals a,t,g, or c
  SITE (8561): n equals a,t,g, or c
  SITE (8562): n equals a,t,g, or c
  SITE (8563): n equals a,t,g, or c
  SITE (8564): n equals a,t,g, or c
  SITE (8565): n equals a,t,g, or c
  SITE (8566): n equals a,t,g, or c
  SITE (8567): n equals a,t,g, or c
  SITE (8568): n equals a,t,g, or c
  SITE (8569): n equals a,t,g, or c
  SITE (8570): n equals a,t,g, or c
  SITE (8571): n equals a,t,g, or c
  SITE (8572): n equals a,t,g, or c
  SITE (8573): n equals a,t,g, or c
  SITE (8574): n equals a,t,g, or c
  SITE (8575): n equals a,t,g, or c
  SITE (8576): n equals a,t,g, or c
  SITE (8577): n equals a,t,g, or c
  SITE (8578): n equals a,t,g, or c
  SITE (8579): n equals a,t,g, or c
  SITE (8580): n equals a,t,g, or c
  SITE (8581): n equals a,t,g, or c
  SITE (8582): n equals a,t,g, or c
  SITE (8583): n equals a,t,g, or c
  SITE (8584): n equals a,t,g, or c
  SITE (8585): n equals a,t,g, or c
  SITE (8586): n equals a,t,g, or c
  SITE (8587): n equals a,t,g, or c
  SITE (8588): n equals a,t,g, or c
  SITE (8589): n equals a,t,g, or c
  SITE (8590): n equals a,t,g, or c
  SITE (8591): n equals a,t,g, or c
  SITE (8592): n equals a,t,g, or c
  SITE (8593): n equals a,t,g, or c
  SITE (8594): n equals a,t,g, or c
  SITE (8595): n equals a,t,g, or c
  SITE (8596): n equals a,t,g, or c
  SITE (8597): n equals a,t,g, or c
  SITE (8598): n equals a,t,g, or c
  SITE (8599): n equals a,t,g, or c
  SITE (8600): n equals a,t,g, or c
  SITE (8601): n equals a,t,g, or c
  SITE (8602): n equals a,t,g, or c
  SITE (8603): n equals a,t,g, or c
  SITE (8604): n equals a,t,g, or c
  SITE (8605): n equals a,t,g, or c
  SITE (8606): n equals a,t,g, or c
  SITE (8607): n equals a,t,g, or c
  SITE (8608): n equals a,t,g, or c
  SITE (8609): n equals a,t,g, or c
  SITE (8610): n equals a,t,g, or c
  SITE (8611): n equals a,t,g, or c
  SITE (8612): n equals a,t,g, or c
  SITE (8613): n equals a,t,g, or c
  SITE (8614): n equals a,t,g, or c
  SITE (8615): n equals a,t,g, or c
  SITE (8616): n equals a,t,g, or c
  SITE (8617): n equals a,t,g, or c
  SITE (8618): n equals a,t,g, or c
  SITE (8619): n equals a,t,g, or c
  SITE (8620): n equals a,t,g, or c
  SITE (8621): n equals a,t,g, or c
  SITE (8622): n equals a,t,g, or c
  SITE (8623): n equals a,t,g, or c
  SITE (8624): n equals a,t,g, or c
  SITE (8625): n equals a,t,g, or c
  SITE (8626): n equals a,t,g, or c
  SITE (8627): n equals a,t,g, or c
  SITE (8628): n equals a,t,g, or c
  SITE (8629): n equals a,t,g, or c
  SITE (8630): n equals a,t,g, or c
  SITE (8631): n equals a,t,g, or c
  SITE (8632): n equals a,t,g, or c
  SITE (8633): n equals a,t,g, or c
  SITE (8634): n equals a,t,g, or c
  SITE (8635): n equals a,t,g, or c
  SITE (8636): n equals a,t,g, or c
  SITE (8637): n equals a,t,g, or c
  SITE (8638): n equals a,t,g, or c
  SITE (8639): n equals a,t,g, or c
  SITE (8640): n equals a,t,g, or c
  SITE (8641): n equals a,t,g, or c
  SITE (8642): n equals a,t,g, or c
  SITE (8643): n equals a,t,g, or c
  SITE (8644): n equals a,t,g, or c
  SITE (8645): n equals a,t,g, or c
  SITE (8646): n equals a,t,g, or c
  SITE (8647): n equals a,t,g, or c
  SITE (8648): n equals a,t,g, or c
  SITE (8649): n equals a,t,g, or c
  SITE (8650): n equals a,t,g, or c
  SITE (8651): n equals a,t,g, or c
  SITE (8652): n equals a,t,g, or c
  SITE (8653): n equals a,t,g, or c
  SITE (8654): n equals a,t,g, or c
  SITE (8655): n equals a,t,g, or c
  SITE (8656): n equals a,t,g, or c
  SITE (8657): n equals a,t,g, or c
  SITE (8658): n equals a,t,g, or c
  SITE (8659): n equals a,t,g, or c
  SITE (8660): n equals a,t,g, or c
  SITE (8661): n equals a,t,g, or c
  SITE (8662): n equals a,t,g, or c
  SITE (8663): n equals a,t,g, or c
  SITE (8664): n equals a,t,g, or c
  SITE (8665): n equals a,t,g, or c
  SITE (8666): n equals a,t,g, or c
  SITE (8667): n equals a,t,g, or c
  SITE (8668): n equals a,t,g, or c
  SITE (8669): n equals a,t,g, or c
  SITE (8670): n equals a,t,g, or c
  SITE (8671): n equals a,t,g, or c
  SITE (8672): n equals a,t,g, or c
  SITE (8673): n equals a,t,g, or c
  SITE (8674): n equals a,t,g, or c
  SITE (8675): n equals a,t,g, or c
  SITE (8676): n equals a,t,g, or c
  SITE (8677): n equals a,t,g, or c
  SITE (8678): n equals a,t,g, or c
  SITE (8679): n equals a,t,g, or c
  SITE (8680): n equals a,t,g, or c
  SITE (8681): n equals a,t,g, or c
  SITE (8682): n equals a,t,g, or c
  SITE (8683): n equals a,t,g, or c
  SITE (8684): n equals a,t,g, or c
  SITE (8685): n equals a,t,g, or c
  SITE (8686): n equals a,t,g, or c
  SITE (8687): n equals a,t,g, or c
  SITE (8688): n equals a,t,g, or c
  SITE (8689): n equals a,t,g, or c
  SITE (8690): n equals a,t,g, or c
  SITE (8691): n equals a,t,g, or c
  SITE (8692): n equals a,t,g, or c
  SITE (8693): n equals a,t,g, or c
  SITE (8694): n equals a,t,g, or c
  SITE (8695): n equals a,t,g, or c
  SITE (8696): n equals a,t,g, or c
  SITE (8697): n equals a,t,g, or c
  SITE (8698): n equals a,t,g, or c
  SITE (8699): n equals a,t,g, or c
  SITE (8700): n equals a,t,g, or c
  SITE (8701): n equals a,t,g, or c
  SITE (8702): n equals a,t,g, or c
  SITE (8703): n equals a,t,g, or c
  SITE (8704): n equals a,t,g, or c
  SITE (8705): n equals a,t,g, or c
  SITE (8706): n equals a,t,g, or c
  SITE (8707): n equals a,t,g, or c
  SITE (8708): n equals a,t,g, or c
  SITE (8709): n equals a,t,g, or c
  SITE (8710): n equals a,t,g, or c
  SITE (8711): n equals a,t,g, or c
  SITE (8712): n equals a,t,g, or c
  SITE (8713): n equals a,t,g, or c
  SITE (8714): n equals a,t,g, or c
  SITE (8715): n equals a,t,g, or c
  SITE (8716): n equals a,t,g, or c
  SITE (8717): n equals a,t,g, or c
  SITE (8718): n equals a,t,g, or c
  SITE (8719): n equals a,t,g, or c
  SITE (8720): n equals a,t,g, or c
  SITE (8721): n equals a,t,g, or c
  SITE (8722): n equals a,t,g, or c
  SITE (8723): n equals a,t,g, or c
  SITE (8724): n equals a,t,g, or c
  SITE (8725): n equals a,t,g, or c
  SITE (8726): n equals a,t,g, or c
  SITE (8727): n equals a,t,g, or c
  SITE (8728): n equals a,t,g, or c
  SITE (8729): n equals a,t,g, or c
  SITE (8730): n equals a,t,g, or c
  SITE (8731): n equals a,t,g, or c
  SITE (8732): n equals a,t,g, or c
  SITE (8733): n equals a,t,g, or c
  SITE (8734): n equals a,t,g, or c
  SITE (8735): n equals a,t,g, or c
  SITE (8736): n equals a,t,g, or c
  SITE (8737): n equals a,t,g, or c
  SITE (8738): n equals a,t,g, or c
  SITE (8739): n equals a,t,g, or c
  SITE (8740): n equals a,t,g, or c
  SITE (8741): n equals a,t,g, or c
  SITE (8742): n equals a,t,g, or c
  SITE (8743): n equals a,t,g, or c
  SITE (8744): n equals a,t,g, or c
  SITE (8745): n equals a,t,g, or c
  SITE (8746): n equals a,t,g, or c
  SITE (8747): n equals a,t,g, or c
  SITE (8748): n equals a,t,g, or c
  SITE (8749): n equals a,t,g, or c
  SITE (8750): n equals a,t,g, or c
  SITE (8751): n equals a,t,g, or c
  SITE (8752): n equals a,t,g, or c
  SITE (8753): n equals a,t,g, or c
  SITE (8754): n equals a,t,g, or c
  SITE (8755): n equals a,t,g, or c
  SITE (8756): n equals a,t,g, or c
  SITE (8757): n equals a,t,g, or c
  SITE (8758): n equals a,t,g, or c
  SITE (8759): n equals a,t,g, or c
  SITE (8760): n equals a,t,g, or c
  SITE (8761): n equals a,t,g, or c
  SITE (8762): n equals a,t,g, or c
  SITE (8763): n equals a,t,g, or c
  SITE (8764): n equals a,t,g, or c
  SITE (8765): n equals a,t,g, or c
  SITE (8766): n equals a,t,g, or c
  SITE (8767): n equals a,t,g, or c
  SITE (8768): n equals a,t,g, or c
  SITE (8769): n equals a,t,g, or c
  SITE (8770): n equals a,t,g, or c
  SITE (8771): n equals a,t,g, or c
  SITE (8772): n equals a,t,g, or c
  SITE (8773): n equals a,t,g, or c
  SITE (8774): n equals a,t,g, or c
  SITE (8775): n equals a,t,g, or c
  SITE (8776): n equals a,t,g, or c
  SITE (8777): n equals a,t,g, or c
  SITE (8778): n equals a,t,g, or c
  SITE (8779): n equals a,t,g, or c
  SITE (8780): n equals a,t,g, or c
  SITE (8781): n equals a,t,g, or c
  SITE (8782): n equals a,t,g, or c
  SITE (8783): n equals a,t,g, or c
  SITE (8784): n equals a,t,g, or c
  SITE (8785): n equals a,t,g, or c
  SITE (8786): n equals a,t,g, or c
  SITE (8787): n equals a,t,g, or c
  SITE (8788): n equals a,t,g, or c
  SITE (8789): n equals a,t,g, or c
  SITE (8790): n equals a,t,g, or c
  SITE (8791): n equals a,t,g, or c
  SITE (8792): n equals a,t,g, or c
  SITE (8793): n equals a,t,g, or c
  SITE (8794): n equals a,t,g, or c
  SITE (8795): n equals a,t,g, or c
  SITE (8796): n equals a,t,g, or c
  SITE (8797): n equals a,t,g, or c
  SITE (8798): n equals a,t,g, or c
  SITE (8799): n equals a,t,g, or c
  SITE (8800): n equals a,t,g, or c
  SITE (8801): n equals a,t,g, or c
  SITE (8802): n equals a,t,g, or c
  SITE (8803): n equals a,t,g, or c
  SITE (8804): n equals a,t,g, or c
  SITE (8805): n equals a,t,g, or c
  SITE (8806): n equals a,t,g, or c
  SITE (8807): n equals a,t,g, or c
  SITE (8808): n equals a,t,g, or c
  SITE (8809): n equals a,t,g, or c
  SITE (8810): n equals a,t,g, or c
  SITE (8811): n equals a,t,g, or c
  SITE (8812): n equals a,t,g, or c
  SITE (8813): n equals a,t,g, or c
  SITE (8814): n equals a,t,g, or c
  SITE (8815): n equals a,t,g, or c
  SITE (8816): n equals a,t,g, or c
  SITE (8817): n equals a,t,g, or c
  SITE (8818): n equals a,t,g, or c
  SITE (8819): n equals a,t,g, or c
  SITE (8820): n equals a,t,g, or c
  SITE (8821): n equals a,t,g, or c
  SITE (8822): n equals a,t,g, or c
  SITE (8823): n equals a,t,g, or c
  SITE (8824): n equals a,t,g, or c
  SITE (8825): n equals a,t,g, or c
  SITE (8826): n equals a,t,g, or c
  SITE (8827): n equals a,t,g, or c
  SITE (8828): n equals a,t,g, or c
  SITE (8829): n equals a,t,g, or c
  SITE (8830): n equals a,t,g, or c
  SITE (8831): n equals a,t,g, or c
  SITE (8832): n equals a,t,g, or c
  SITE (8833): n equals a,t,g, or c
  SITE (8834): n equals a,t,g, or c
  SITE (8835): n equals a,t,g, or c
  SITE (8836): n equals a,t,g, or c
  SITE (8837): n equals a,t,g, or c
  SITE (8838): n equals a,t,g, or c
  SITE (8839): n equals a,t,g, or c
  SITE (8840): n equals a,t,g, or c
  SITE (8841): n equals a,t,g, or c
  SITE (8842): n equals a,t,g, or c
  SITE (8843): n equals a,t,g, or c
  SITE (8844): n equals a,t,g, or c
  SITE (8845): n equals a,t,g, or c
  SITE (8846): n equals a,t,g, or c
  SITE (8847): n equals a,t,g, or c
  SITE (8848): n equals a,t,g, or c
  SITE (8849): n equals a,t,g, or c
  SITE (8850): n equals a,t,g, or c
  SITE (8851): n equals a,t,g, or c
  SITE (8852): n equals a,t,g, or c
  SITE (8853): n equals a,t,g, or c
  SITE (8854): n equals a,t,g, or c
  SITE (8855): n equals a,t,g, or c
  SITE (8856): n equals a,t,g, or c
  SITE (8857): n equals a,t,g, or c
  SITE (8858): n equals a,t,g, or c
  SITE (8859): n equals a,t,g, or c
  SITE (8860): n equals a,t,g, or c
  SITE (8861): n equals a,t,g, or c
  SITE (8862): n equals a,t,g, or c
  SITE (8863): n equals a,t,g, or c
  SITE (8864): n equals a,t,g, or c
  SITE (8865): n equals a,t,g, or c
  SITE (8866): n equals a,t,g, or c
  SITE (8867): n equals a,t,g, or c
  SITE (8868): n equals a,t,g, or c
  SITE (8869): n equals a,t,g, or c
  SITE (8870): n equals a,t,g, or c
  SITE (8871): n equals a,t,g, or c
  SITE (8872): n equals a,t,g, or c
  SITE (8873): n equals a,t,g, or c
  SITE (8874): n equals a,t,g, or c
  SITE (8875): n equals a,t,g, or c
  SITE (8876): n equals a,t,g, or c
  SITE (8877): n equals a,t,g, or c
  SITE (8878): n equals a,t,g, or c
  SITE (8879): n equals a,t,g, or c
  SITE (8880): n equals a,t,g, or c
  SITE (8881): n equals a,t,g, or c
  SITE (8882): n equals a,t,g, or c
  SITE (8883): n equals a,t,g, or c
  SITE (8884): n equals a,t,g, or c
  SITE (8885): n equals a,t,g, or c
  SITE (8886): n equals a,t,g, or c
  SITE (8887): n equals a,t,g, or c
  SITE (8888): n equals a,t,g, or c
  SITE (8889): n equals a,t,g, or c
  SITE (8890): n equals a,t,g, or c
  SITE (8891): n equals a,t,g, or c
  SITE (8892): n equals a,t,g, or c
  SITE (8893): n equals a,t,g, or c
  SITE (8894): n equals a,t,g, or c
  SITE (8895): n equals a,t,g, or c
  SITE (8896): n equals a,t,g, or c
  SITE (8897): n equals a,t,g, or c
  SITE (8898): n equals a,t,g, or c
  SITE (8899): n equals a,t,g, or c
  SITE (8900): n equals a,t,g, or c
  SITE (8901): n equals a,t,g, or c
  SITE (8902): n equals a,t,g, or c
  SITE (8903): n equals a,t,g, or c
  SITE (8904): n equals a,t,g, or c
  SITE (8905): n equals a,t,g, or c
  SITE (8906): n equals a,t,g, or c
  SITE (8907): n equals a,t,g, or c
  SITE (8908): n equals a,t,g, or c
  SITE (8909): n equals a,t,g, or c
  SITE (8910): n equals a,t,g, or c
  SITE (8911): n equals a,t,g, or c
  SITE (8912): n equals a,t,g, or c
  SITE (8913): n equals a,t,g, or c
  SITE (8914): n equals a,t,g, or c
  SITE (8915): n equals a,t,g, or c
  SITE (8916): n equals a,t,g, or c
  SITE (8917): n equals a,t,g, or c
  SITE (8918): n equals a,t,g, or c
  SITE (8919): n equals a,t,g, or c
  SITE (8920): n equals a,t,g, or c
  SITE (8921): n equals a,t,g, or c
  SITE (8922): n equals a,t,g, or c
  SITE (8923): n equals a,t,g, or c
  SITE (8924): n equals a,t,g, or c
  SITE (8925): n equals a,t,g, or c
  SITE (8926): n equals a,t,g, or c
  SITE (8927): n equals a,t,g, or c
  SITE (8928): n equals a,t,g, or c
  SITE (8929): n equals a,t,g, or c
  SITE (8930): n equals a,t,g, or c
  SITE (8931): n equals a,t,g, or c
  SITE (8932): n equals a,t,g, or c
  SITE (8933): n equals a,t,g, or c
  SITE (8934): n equals a,t,g, or c
  SITE (8935): n equals a,t,g, or c
  SITE (8936): n equals a,t,g, or c
  SITE (8937): n equals a,t,g, or c
  SITE (8938): n equals a,t,g, or c
  SITE (8939): n equals a,t,g, or c
  SITE (8940): n equals a,t,g, or c
  SITE (8941): n equals a,t,g, or c
  SITE (8942): n equals a,t,g, or c
  SITE (8943): n equals a,t,g, or c
  SITE (8944): n equals a,t,g, or c
  SITE (8945): n equals a,t,g, or c
  SITE (8946): n equals a,t,g, or c
  SITE (8947): n equals a,t,g, or c
  SITE (8948): n equals a,t,g, or c
  SITE (8949): n equals a,t,g, or c
  SITE (8950): n equals a,t,g, or c
  SITE (8951): n equals a,t,g, or c
  SITE (8952): n equals a,t,g, or c
  SITE (8953): n equals a,t,g, or c
  SITE (8954): n equals a,t,g, or c
  SITE (8955): n equals a,t,g, or c
  SITE (8956): n equals a,t,g, or c
  SITE (8957): n equals a,t,g, or c
  SITE (8958): n equals a,t,g, or c
  SITE (8959): n equals a,t,g, or c
  SITE (8960): n equals a,t,g, or c
  SITE (8961): n equals a,t,g, or c
  SITE (8962): n equals a,t,g, or c
  SITE (8963): n equals a,t,g, or c
  SITE (8964): n equals a,t,g, or c
  SITE (8965): n equals a,t,g, or c
  SITE (8966): n equals a,t,g, or c
  SITE (8967): n equals a,t,g, or c
  SITE (8968): n equals a,t,g, or c
  SITE (8969): n equals a,t,g, or c
  SITE (8970): n equals a,t,g, or c
  SITE (8971): n equals a,t,g, or c
  SITE (8972): n equals a,t,g, or c
  SITE (8973): n equals a,t,g, or c
  SITE (8974): n equals a,t,g, or c
  SITE (8975): n equals a,t,g, or c
  SITE (8976): n equals a,t,g, or c
  SITE (8977): n equals a,t,g, or c
  SITE (8978): n equals a,t,g, or c
  SITE (8979): n equals a,t,g, or c
  SITE (8980): n equals a,t,g, or c
  SITE (8981): n equals a,t,g, or c
  SITE (8982): n equals a,t,g, or c
  SITE (8983): n equals a,t,g, or c
  SITE (8984): n equals a,t,g, or c
  SITE (8985): n equals a,t,g, or c
  SITE (8986): n equals a,t,g, or c
  SITE (8987): n equals a,t,g, or c
  SITE (8988): n equals a,t,g, or c
  SITE (8989): n equals a,t,g, or c
  SITE (8990): n equals a,t,g, or c
  SITE (8991): n equals a,t,g, or c
  SITE (8992): n equals a,t,g, or c
  SITE (8993): n equals a,t,g, or c
  SITE (8994): n equals a,t,g, or c
  SITE (8995): n equals a,t,g, or c
  SITE (8996): n equals a,t,g, or c
  SITE (8997): n equals a,t,g, or c
  SITE (8998): n equals a,t,g, or c
  SITE (8999): n equals a,t,g, or c
  SITE (9000): n equals a,t,g, or c
  SITE (9001): n equals a,t,g, or c
  SITE (9002): n equals a,t,g, or c
  SITE (9003): n equals a,t,g, or c
  SITE (9004): n equals a,t,g, or c
  SITE (9005): n equals a,t,g, or c
  SITE (9006): n equals a,t,g, or c
  SITE (9007): n equals a,t,g, or c
  SITE (9008): n equals a,t,g, or c
  SITE (9009): n equals a,t,g, or c
  SITE (9010): n equals a,t,g, or c
  SITE (9011): n equals a,t,g, or c
  SITE (9012): n equals a,t,g, or c
  SITE (9013): n equals a,t,g, or c
  SITE (9014): n equals a,t,g, or c
  SITE (9015): n equals a,t,g, or c
  SITE (9016): n equals a,t,g, or c
  SITE (9017): n equals a,t,g, or c
  SITE (9018): n equals a,t,g, or c
  SITE (9019): n equals a,t,g, or c
  SITE (9020): n equals a,t,g, or c
  SITE (9021): n equals a,t,g, or c
  SITE (9022): n equals a,t,g, or c
  SITE (9023): n equals a,t,g, or c
  SITE (9024): n equals a,t,g, or c
  SITE (9025): n equals a,t,g, or c
  SITE (9026): n equals a,t,g, or c
  SITE (9027): n equals a,t,g, or c
  SITE (9028): n equals a,t,g, or c
  SITE (9029): n equals a,t,g, or c
  SITE (9030): n equals a,t,g, or c
  SITE (9031): n equals a,t,g, or c
  SITE (9032): n equals a,t,g, or c
  SITE (9033): n equals a,t,g, or c
  SITE (9034): n equals a,t,g, or c
  SITE (9035): n equals a,t,g, or c
  SITE (9036): n equals a,t,g, or c
  SITE (9037): n equals a,t,g, or c
  SITE (9038): n equals a,t,g, or c
  SITE (9039): n equals a,t,g, or c
  SITE (9040): n equals a,t,g, or c
  SITE (9041): n equals a,t,g, or c
  SITE (9042): n equals a,t,g, or c
  SITE (9043): n equals a,t,g, or c
  SITE (9044): n equals a,t,g, or c
  SITE (9045): n equals a,t,g, or c
  SITE (9046): n equals a,t,g, or c
  SITE (9047): n equals a,t,g, or c
  SITE (9048): n equals a,t,g, or c
  SITE (9049): n equals a,t,g, or c
  SITE (9050): n equals a,t,g, or c
  SITE (9051): n equals a,t,g, or c
  SITE (9052): n equals a,t,g, or c
  SITE (9053): n equals a,t,g, or c
  SITE (9054): n equals a,t,g, or c
  SITE (9055): n equals a,t,g, or c
  SITE (9056): n equals a,t,g, or c
  SITE (9057): n equals a,t,g, or c
  SITE (9058): n equals a,t,g, or c
  SITE (9059): n equals a,t,g, or c
  SITE (9060): n equals a,t,g, or c
  SITE (9061): n equals a,t,g, or c
  SITE (9062): n equals a,t,g, or c
  SITE (9063): n equals a,t,g, or c
  SITE (9064): n equals a,t,g, or c
  SITE (9065): n equals a,t,g, or c
  SITE (9066): n equals a,t,g, or c
  SITE (9067): n equals a,t,g, or c
  SITE (9068): n equals a,t,g, or c
  SITE (9069): n equals a,t,g, or c
  SITE (9070): n equals a,t,g, or c
  SITE (9071): n equals a,t,g, or c
  SITE (9072): n equals a,t,g, or c
  SITE (9073): n equals a,t,g, or c
  SITE (9074): n equals a,t,g, or c
  SITE (9075): n equals a,t,g, or c
  SITE (9076): n equals a,t,g, or c
  SITE (9077): n equals a,t,g, or c
  SITE (9078): n equals a,t,g, or c
  SITE (9079): n equals a,t,g, or c
  SITE (9080): n equals a,t,g, or c
  SITE (9081): n equals a,t,g, or c
  SITE (9082): n equals a,t,g, or c
  SITE (9083): n equals a,t,g, or c
  SITE (9084): n equals a,t,g, or c
  SITE (9085): n equals a,t,g, or c
  SITE (9086): n equals a,t,g, or c
  SITE (9087): n equals a,t,g, or c
  SITE (9088): n equals a,t,g, or c
  SITE (9089): n equals a,t,g, or c
  SITE (9090): n equals a,t,g, or c
  SITE (9091): n equals a,t,g, or c
  SITE (9092): n equals a,t,g, or c
  SITE (9093): n equals a,t,g, or c
  SITE (9094): n equals a,t,g, or c
  SITE (9095): n equals a,t,g, or c
  SITE (9096): n equals a,t,g, or c
  SITE (9097): n equals a,t,g, or c
  SITE (9098): n equals a,t,g, or c
  SITE (9099): n equals a,t,g, or c
  SITE (9100): n equals a,t,g, or c
  SITE (9101): n equals a,t,g, or c
  SITE (9102): n equals a,t,g, or c
  SITE (9103): n equals a,t,g, or c
  SITE (9104): n equals a,t,g, or c
  SITE (9105): n equals a,t,g, or c
  SITE (9106): n equals a,t,g, or c
  SITE (9107): n equals a,t,g, or c
  SITE (9108): n equals a,t,g, or c
  SITE (9109): n equals a,t,g, or c
  SITE (9110): n equals a,t,g, or c
  SITE (9111): n equals a,t,g, or c
  SITE (9112): n equals a,t,g, or c
  SITE (9113): n equals a,t,g, or c
  SITE (9114): n equals a,t,g, or c
  SITE (9115): n equals a,t,g, or c
  SITE (9116): n equals a,t,g, or c
  SITE (9117): n equals a,t,g, or c
  SITE (9118): n equals a,t,g, or c
  SITE (9119): n equals a,t,g, or c
  SITE (9120): n equals a,t,g, or c
  SITE (9121): n equals a,t,g, or c
  SITE (9122): n equals a,t,g, or c
  SITE (9123): n equals a,t,g, or c
  SITE (9124): n equals a,t,g, or c
  SITE (9125): n equals a,t,g, or c
  SITE (9126): n equals a,t,g, or c
  SITE (9127): n equals a,t,g, or c
  SITE (9128): n equals a,t,g, or c
  SITE (9129): n equals a,t,g, or c
  SITE (9130): n equals a,t,g, or c
  SITE (9131): n equals a,t,g, or c
  SITE (9132): n equals a,t,g, or c
  SITE (9133): n equals a,t,g, or c
  SITE (9134): n equals a,t,g, or c
  SITE (9135): n equals a,t,g, or c
  SITE (9136): n equals a,t,g, or c
  SITE (9137): n equals a,t,g, or c
  SITE (9138): n equals a,t,g, or c
  SITE (9139): n equals a,t,g, or c
  SITE (9140): n equals a,t,g, or c
  SITE (9141): n equals a,t,g, or c
  SITE (9142): n equals a,t,g, or c
  SITE (9143): n equals a,t,g, or c
  SITE (9144): n equals a,t,g, or c
  SITE (9145): n equals a,t,g, or c
  SITE (9146): n equals a,t,g, or c
  SITE (9147): n equals a,t,g, or c
  SITE (9148): n equals a,t,g, or c
  SITE (9149): n equals a,t,g, or c
  SITE (9150): n equals a,t,g, or c
  SITE (9151): n equals a,t,g, or c
  SITE (9152): n equals a,t,g, or c
  SITE (9153): n equals a,t,g, or c
  SITE (9154): n equals a,t,g, or c
  SITE (9155): n equals a,t,g, or c
  SITE (9156): n equals a,t,g, or c
  SITE (9157): n equals a,t,g, or c
  SITE (9158): n equals a,t,g, or c
  SITE (9159): n equals a,t,g, or c
  SITE (9160): n equals a,t,g, or c
  SITE (9161): n equals a,t,g, or c
  SITE (9162): n equals a,t,g, or c
  SITE (9163): n equals a,t,g, or c
  SITE (9164): n equals a,t,g, or c
  SITE (9165): n equals a,t,g, or c
  SITE (9166): n equals a,t,g, or c
  SITE (9167): n equals a,t,g, or c
  SITE (9168): n equals a,t,g, or c
  SITE (9169): n equals a,t,g, or c
  SITE (9170): n equals a,t,g, or c
  SITE (9171): n equals a,t,g, or c
  SITE (9172): n equals a,t,g, or c
  SITE (9173): n equals a,t,g, or c
  SITE (9174): n equals a,t,g, or c
  SITE (9175): n equals a,t,g, or c
  SITE (9176): n equals a,t,g, or c
  SITE (9177): n equals a,t,g, or c
  SITE (9178): n equals a,t,g, or c
  SITE (9179): n equals a,t,g, or c
  SITE (9180): n equals a,t,g, or c
  SITE (9181): n equals a,t,g, or c
  SITE (9182): n equals a,t,g, or c
  SITE (9183): n equals a,t,g, or c
  SITE (9184): n equals a,t,g, or c
  SITE (9185): n equals a,t,g, or c
  SITE (9186): n equals a,t,g, or c
  SITE (9187): n equals a,t,g, or c
  SITE (9188): n equals a,t,g, or c
  SITE (9189): n equals a,t,g, or c
  SITE (9190): n equals a,t,g, or c
  SITE (9191): n equals a,t,g, or c
  SITE (9192): n equals a,t,g, or c
  SITE (9193): n equals a,t,g, or c
  SITE (9194): n equals a,t,g, or c
  SITE (9195): n equals a,t,g, or c
  SITE (9196): n equals a,t,g, or c
  SITE (9197): n equals a,t,g, or c
  SITE (9198): n equals a,t,g, or c
  SITE (9199): n equals a,t,g, or c
  SITE (9200): n equals a,t,g, or c
  SITE (9201): n equals a,t,g, or c
  SITE (9202): n equals a,t,g, or c
  SITE (9203): n equals a,t,g, or c
  SITE (9204): n equals a,t,g, or c
  SITE (9205): n equals a,t,g, or c
  SITE (9206): n equals a,t,g, or c
  SITE (9207): n equals a,t,g, or c
  SITE (9208): n equals a,t,g, or c
  SITE (9209): n equals a,t,g, or c
  SITE (9210): n equals a,t,g, or c
  SITE (9211): n equals a,t,g, or c
  SITE (9212): n equals a,t,g, or c
  SITE (9213): n equals a,t,g, or c
  SITE (9214): n equals a,t,g, or c
  SITE (9215): n equals a,t,g, or c
  SITE (9216): n equals a,t,g, or c
  SITE (9217): n equals a,t,g, or c
  SITE (9218): n equals a,t,g, or c
  SITE (9219): n equals a,t,g, or c
  SITE (9220): n equals a,t,g, or c
  SITE (9221): n equals a,t,g, or c
  SITE (9222): n equals a,t,g, or c
  SITE (9223): n equals a,t,g, or c
  SITE (9224): n equals a,t,g, or c
  SITE (9225): n equals a,t,g, or c
  SITE (9226): n equals a,t,g, or c
  SITE (9227): n equals a,t,g, or c
  SITE (9228): n equals a,t,g, or c
  SITE (9229): n equals a,t,g, or c
  SITE (9230): n equals a,t,g, or c
  SITE (9231): n equals a,t,g, or c
  SITE (9232): n equals a,t,g, or c
  SITE (9233): n equals a,t,g, or c
  SITE (9234): n equals a,t,g, or c
  SITE (9235): n equals a,t,g, or c
  SITE (9236): n equals a,t,g, or c
  SITE (9237): n equals a,t,g, or c
  SITE (9238): n equals a,t,g, or c
  SITE (9239): n equals a,t,g, or c
  SITE (9240): n equals a,t,g, or c
  SITE (9241): n equals a,t,g, or c
  SITE (9242): n equals a,t,g, or c
  SITE (9243): n equals a,t,g, or c
  SITE (9244): n equals a,t,g, or c
  SITE (9245): n equals a,t,g, or c
  SITE (9246): n equals a,t,g, or c
  SITE (9247): n equals a,t,g, or c
  SITE (9248): n equals a,t,g, or c
  SITE (9249): n equals a,t,g, or c
  SITE (9250): n equals a,t,g, or c
  SITE (9251): n equals a,t,g, or c
  SITE (9252): n equals a,t,g, or c
  SITE (9253): n equals a,t,g, or c
  SITE (9254): n equals a,t,g, or c
  SITE (9255): n equals a,t,g, or c
  SITE (9256): n equals a,t,g, or c
  SITE (9257): n equals a,t,g, or c
  SITE (9258): n equals a,t,g, or c
  SITE (9259): n equals a,t,g, or c
  SITE (9260): n equals a,t,g, or c
  SITE (9261): n equals a,t,g, or c
  SITE (9262): n equals a,t,g, or c
  SITE (9263): n equals a,t,g, or c
  SITE (9264): n equals a,t,g, or c
  SITE (9265): n equals a,t,g, or c
  SITE (9266): n equals a,t,g, or c
  SITE (9267): n equals a,t,g, or c
  SITE (9268): n equals a,t,g, or c
  SITE (9269): n equals a,t,g, or c
  SITE (9270): n equals a,t,g, or c
  SITE (9271): n equals a,t,g, or c
  SITE (9272): n equals a,t,g, or c
  SITE (9273): n equals a,t,g, or c
  SITE (9274): n equals a,t,g, or c
  SITE (9275): n equals a,t,g, or c
  SITE (9276): n equals a,t,g, or c
  SITE (9277): n equals a,t,g, or c
  SITE (9278): n equals a,t,g, or c
  SITE (9279): n equals a,t,g, or c
  SITE (9280): n equals a,t,g, or c
  SITE (9281): n equals a,t,g, or c
  SITE (9282): n equals a,t,g, or c
  SITE (9283): n equals a,t,g, or c
  SITE (9284): n equals a,t,g, or c
  SITE (9285): n equals a,t,g, or c
  SITE (9286): n equals a,t,g, or c
  SITE (9287): n equals a,t,g, or c
  SITE (9288): n equals a,t,g, or c
  SITE (9289): n equals a,t,g, or c
  SITE (9290): n equals a,t,g, or c
  SITE (9291): n equals a,t,g, or c
  SITE (9292): n equals a,t,g, or c
  SITE (9293): n equals a,t,g, or c
  SITE (9294): n equals a,t,g, or c
  SITE (9295): n equals a,t,g, or c
  SITE (9296): n equals a,t,g, or c
  SITE (9297): n equals a,t,g, or c
  SITE (9298): n equals a,t,g, or c
  SITE (9299): n equals a,t,g, or c
  SITE (9300): n equals a,t,g, or c
  SITE (9301): n equals a,t,g, or c
  SITE (9302): n equals a,t,g, or c
  SITE (9303): n equals a,t,g, or c
  SITE (9304): n equals a,t,g, or c
  SITE (9305): n equals a,t,g, or c
  SITE (9306): n equals a,t,g, or c
  SITE (9307): n equals a,t,g, or c
  SITE (9308): n equals a,t,g, or c
  SITE (9309): n equals a,t,g, or c
  SITE (9310): n equals a,t,g, or c
  SITE (9311): n equals a,t,g, or c
  SITE (9312): n equals a,t,g, or c
  SITE (9313): n equals a,t,g, or c
  SITE (9314): n equals a,t,g, or c
  SITE (9315): n equals a,t,g, or c
  SITE (9316): n equals a,t,g, or c
  SITE (9317): n equals a,t,g, or c
  SITE (9318): n equals a,t,g, or c
  SITE (9319): n equals a,t,g, or c
  SITE (9320): n equals a,t,g, or c
  SITE (9321): n equals a,t,g, or c
  SITE (9322): n equals a,t,g, or c
  SITE (9323): n equals a,t,g, or c
  SITE (9324): n equals a,t,g, or c
  SITE (9325): n equals a,t,g, or c
  SITE (9326): n equals a,t,g, or c
  SITE (9327): n equals a,t,g, or c
  SITE (9328): n equals a,t,g, or c
  SITE (9329): n equals a,t,g, or c
  SITE (9330): n equals a,t,g, or c
  SITE (9331): n equals a,t,g, or c
  SITE (9332): n equals a,t,g, or c
  SITE (9333): n equals a,t,g, or c
  SITE (9334): n equals a,t,g, or c
  SITE (9335): n equals a,t,g, or c
  SITE (9336): n equals a,t,g, or c
  SITE (9337): n equals a,t,g, or c
  SITE (9338): n equals a,t,g, or c
  SITE (9339): n equals a,t,g, or c
  SITE (9340): n equals a,t,g, or c
  SITE (9341): n equals a,t,g, or c
  SITE (9342): n equals a,t,g, or c
  SITE (9343): n equals a,t,g, or c
  SITE (9344): n equals a,t,g, or c
  SITE (9345): n equals a,t,g, or c
  SITE (9346): n equals a,t,g, or c
  SITE (9347): n equals a,t,g, or c
  SITE (9348): n equals a,t,g, or c
  SITE (9349): n equals a,t,g, or c
  SITE (9350): n equals a,t,g, or c
  SITE (9351): n equals a,t,g, or c
  SITE (9352): n equals a,t,g, or c
  SITE (9353): n equals a,t,g, or c
  SITE (9354): n equals a,t,g, or c
  SITE (9355): n equals a,t,g, or c
  SITE (9356): n equals a,t,g, or c
  SITE (9357): n equals a,t,g, or c
  SITE (9358): n equals a,t,g, or c
  SITE (9359): n equals a,t,g, or c
  SITE (9360): n equals a,t,g, or c
  SITE (9361): n equals a,t,g, or c
  SITE (9362): n equals a,t,g, or c
  SITE (9363): n equals a,t,g, or c
  SITE (9364): n equals a,t,g, or c
  SITE (9365): n equals a,t,g, or c
  SITE (9366): n equals a,t,g, or c
  SITE (9367): n equals a,t,g, or c
  SITE (9368): n equals a,t,g, or c
  SITE (9369): n equals a,t,g, or c
  SITE (9370): n equals a,t,g, or c
  SITE (9371): n equals a,t,g, or c
  SITE (9372): n equals a,t,g, or c
  SITE (9373): n equals a,t,g, or c
  SITE (9374): n equals a,t,g, or c
  SITE (9375): n equals a,t,g, or c
  SITE (9376): n equals a,t,g, or c
  SITE (9377): n equals a,t,g, or c
  SITE (9378): n equals a,t,g, or c
  SITE (9379): n equals a,t,g, or c
  SITE (9380): n equals a,t,g, or c
  SITE (9381): n equals a,t,g, or c
  SITE (9382): n equals a,t,g, or c
  SITE (9383): n equals a,t,g, or c
  SITE (9384): n equals a,t,g, or c
  SITE (9385): n equals a,t,g, or c
  SITE (9386): n equals a,t,g, or c
  SITE (9387): n equals a,t,g, or c
  SITE (9388): n equals a,t,g, or c
  SITE (9389): n equals a,t,g, or c
  SITE (9390): n equals a,t,g, or c
  SITE (9391): n equals a,t,g, or c
  SITE (9392): n equals a,t,g, or c
  SITE (9393): n equals a,t,g, or c
  SITE (9394): n equals a,t,g, or c
  SITE (9395): n equals a,t,g, or c
  SITE (9396): n equals a,t,g, or c
  SITE (9397): n equals a,t,g, or c
  SITE (9398): n equals a,t,g, or c
  SITE (9399): n equals a,t,g, or c
  SITE (9400): n equals a,t,g, or c
  SITE (9401): n equals a,t,g, or c
  SITE (9402): n equals a,t,g, or c
  SITE (9403): n equals a,t,g, or c
  SITE (9404): n equals a,t,g, or c
  SITE (9405): n equals a,t,g, or c
  SITE (9406): n equals a,t,g, or c
  SITE (9407): n equals a,t,g, or c
  SITE (9408): n equals a,t,g, or c
  SITE (9409): n equals a,t,g, or c
  SITE (9410): n equals a,t,g, or c
  SITE (9411): n equals a,t,g, or c
  SITE (9412): n equals a,t,g, or c
  SITE (9413): n equals a,t,g, or c
  SITE (9414): n equals a,t,g, or c
  SITE (9415): n equals a,t,g, or c
  SITE (9416): n equals a,t,g, or c

SEQ ID NO: 9615 - DNA, 1096 bp, Homo sapiens
  SITE (323): n equals a,t,g, or c
  SITE (401): n equals a,t,g, or c
  SITE (441): n equals a,t,g, or c
tccaaagaatctctggcttggagtaggcaagtatgatacaaggcagaaatgagcagtgggtctgaaaactgaggtgatcacttgaattcctatatgtgaaatgctgtgctccctgtcactttctctattactgggtgccaacagctcaacgcttaaccccaagtcataaaatgagggctttttttcacaacataatttgaggaaattatctggggagtatggtcccagagaaaagctgttttatggctagaaagagggagaatgccagaaacagaaagacatatgataaataaaatggtgtgcctaatccagagatgtctcanaacacacaattgaaaggacgacatacgggtttcagaagagatatctctatgggtgtgaggaaaagaggaaagacttcnctacaatagttattatgagtgaaagagagaccaaatttantgctatgatcaagattcagaacctccagagaaaacaaaaaatatatataggaaacgcataacccaaacataaactagatcagtgtagcacaactttaagcaatagaaaagagaatctatttgaccttcatcataaatcattcccctctgagtggcccaggggttgtgacattgggtccttggagaagaagatatgatttcagtatcctacatcaccctgtactaaataaaatgtatagagtcacagtaacattaatggtgcactgtgattttcaacttttactattagctaacgaacaaatgcagatgacttcattatggttgcatatcagaattaaaatgttaacaaccttggtcaggcttggtggctcatgcctgtaatcccaacactttgggaggccgaggcaggtggatcacctgaggtcaggagttcgagaccagcctggccaacatggtgaaaccccatctctactaaaaatacaaaaattggccgggcatggcggtgggtgcctgtagtcccagcttgtcagaaggctgaggcacgagaatagcttgaacccaggaggcagaggttgtggtgagcagagatcgcaccactgcactccagcctgggcgacagtgggagactccgtctcaaaaaaaaaaaaaaaaaaaaa

SEQ ID NO: 9616 - DNA, 57 bp, Homo sapiens; identical to SEQ ID NO: 8785

SEQ ID NO: 9617 - DNA, 1330 bp, Homo sapiens
ttcagtgacagagcagctaaggggccacaccacgcacaaaaagagttgtgcaccttgactagctggccctgacggcatttattcagcatagatttaatgacagaggctttgagtcaacacacctgtgggtaattaaatttgccgaccaccgagtagagagcaatcatgcacccgtggataatcaaaggttggtcttaggaccacatgagtaaacaagctattcaataaactcccccacgttcccatgttatttgctctattgctatcaactcaaggtaaaggggattacgctgctttcagccaaatcctttattgaagctatgcagactttctggccttccaggaaggtttgtgtctatatcctataacttcatcttacaatttttccaactacactgactgatcccttacaaccagccttaaatctcacacccttcctcccaccatttaaactaggccacagactgatggaaaagcagagggagccaaccaccatctgctaactgtgctacatgcctaatgctttccacgtattatctcatttaatcctcagcacctccaagaggaaggtgctaacttcccttttaagttaaagaaaccgagacttagagatgaaaagtaggtgaccagtggagccaaggccggaatctagtttgactctaaggaacctcttataccaccatctctttccctatgtttgggaggctccatgactccagctgggatgatgatgtccagacctaggaagaacgaacccaccactaaatgtcagagggcgggaagcaagaaacagtcacaggactgccctggagggtgctggggtcacctgtcccccaggctggagctgcctctggcttcacacctcccctccccagaggctggtgcccgccttccagctcttcttggatggggcagggttaccatgtcctttagcttgcccagcttctttcccagctccctctttacgtgctattccaactgcagtgcactggtgatctccatgttctcattagtctggacagagagaagcaattggcggccacccactgcagctggagaccccagaacttggtgtctgcctcccgtggcacctggaagggtggaggcaggttagaaaaatcattccctcttccccacagccatcagagcagggctctggttcacaggtaccttcagaattaccatctcacattaggggtacactgcctcattttatgggtgggaaaacaaaggccgggagtgctagggaggagagcaggctttccagatggggtcacgcaccagctttatgaatccgttctgcagcggagacagctgctctttgagcttg

SEQ ID NO: 9618 - DNA, 101 bp, Homo sapiens
acaaaggagaaagtcaaaatattttaccccaaaacatgtttctttgccatattttgaaatggtcctgcaaagccattctttgtgggggaaaatttgcatct

SEQ ID NO: 9619 - DNA, 5775 bp, Homo sapiens; identical to SEQ ID NO: 7562

SEQ ID NO: 9620 - DNA, 738 bp, Homo sapiens; identical to SEQ ID NO: 7563

SEQ ID NO: 9621 - DNA, 1344 bp, Homo sapiens
ccagtgcttacacatagacggtgcattctctggaattcaccctgggtcagagccttctcacctcccagcacaagccagtagcttaagcctcagtgtcccagcttcggtgcactgggcaggagatgggtctcccaagaccactcagccatgtggttccttcagctctcagcacagccgagtccaggctgcaggctctccatcacaagccaactacagagtgacacatgttctctacacatgccgtgactgaatatgttgtgttctgaaaatatttgggagttaatttgtgttttgtgcctagtgcttcatggaccggtgctcattgcatccttacagccatctacaagggtgtcaccattatttgtattttattagacttagagaggtgaagtgacttgctcaaaataatacggttagcaaatgactgaaccccgacccaacagggagaatgtgggaagaaatcaacaaagcttatttaacaggtatctgccaagggttggaaaaaataagatttattgttgctccactgagcagaacacagcccatcagaggttactgcaccttcaacgacatgtgcttttgactgacccatcaaaacactggtggcaagagcactaaataagttgcctatcatacttaatctttccaggattcaaagaggagtgtagagtgaaatgacctataagacccctgagcctaaaatataatctaatggactcagctttaaagcgctcattgagaggatggccaaaaaccagccgccacagtgcgaagcacgattcctccaccatccgcagtccactcgcacaaataccctcagtgaaacacttctttctctccacccacttttgagtaggatgaaatggcacattccattttcaaagtgggcagcttgcacgtatcagcagtgccaggaatttggaaaacgataacgtggaacccacagtaacttgctggctgaatttactcacccaggtgacccaggtcgatgagggcttcagagccacggggattttaaatgccgcttcaaagccaacaaggagcagaaccagtgctgattcgtgtttatgataatgacatttgaaaggctaaaaattacaaagttgtttacagagatggacttagaaaataattgtatctaatgtctcataaacataaaagaaagttattttgtagtagatgattgaaaagaaaaaatctcctttaaaaaggaaataaatatactagtttcagacagaaacaacttcaaaggcaatcagaaaattcagtggaattttaaagagggaatctcactcaaagaattctctaaaattgcctaaacttaaaagcattatttttctcgag

SEQ ID NO: 9622 - DNA, 1344 bp, Homo sapiens
  SITE (777): n equals a,t,g, or c
  SITE (779): n equals a,t,g, or c
  SITE (780): n equals a,t,g, or c
ccagtgcttacacatagacggtgcattctctggaattcaccctgggtcagagccttctcacctcccagcacaagccagtagcttaagcctcagtgtcccagcttcggtgcactgggcaggagatgggtctcccaagaccactcagccatgtggttccttcagctctcagcacagccgagtccaggctgcaggctctccatcacaagccaactacagagtgacacatgttctctacacatgccgtgactgaatatgttgtgttctgaaaatatttgggagttaatttgtgttttgtgcctagtgcttcatggaccggtgctcattgcatccttacagccatctacaagggtgtcaccattatttgtattttattagacttagagaggtgaagtgacttgctcaaaataatacggttagcaaatgactgaaccccgacccaacagggagaatgtgggaagaaatcaacaaagcttatttaacaggtatctgccaagggttggaaaaaataagatttattgttgctccactgagcagaacacagcccatcagaggttactgcaccttcaacgacatgtgcttttgactgacccatcaaaacactggtggcaagagcactaaataagttgcctatcatacttaatctttccaggattcaaagaggagtgtagagtgaaatgacctataagacccctgagcctaaaatataatctaatggactcagctttaaagcgctcattgagaggatggccaaaaaccagccgccacagtgcgaacgantnntcctccaccatccgcagtccactcgcacaaataccctcagtgaaacacttctttctctccacccacttttgagtaggatgaaatggcacattccattttcaaagtgggcagcttgcacgtatcagcagtgccaggaatttggaaaacgataacgtggaacccacagtaacttgctggctgaatttactcacccaggtgacccaggtcgatgagggcttcagagccacggggattttaaatgccgcttcaaagccaacaaggagcagaaccagtgctgattcgtgtttatgataatgacatttgaaaggctaaaaattacaaagttgtttacagagatggacttagaaaataattgtatctaatgtctcataaacataaaagaaagttattttgtagtagatgattgaaaagaaaaaatctcctttaaaaaggaaataaatatactagtttcagacagaaacaacttcaaaggcaatcagaaaattcagtggaattttaaagagggaatctcactcaaagaattctctaaaattgcctaaacttaaaagcattatttttctcgag

SEQ ID NO: 9623 - DNA, 1344 bp, Homo sapiens; identical to SEQ ID NO: 9621

SEQ ID NO: 9624 - DNA, 438 bp, Homo sapiens
tatatcataaaatttacatgattggtctttattaaacaatccttcactctcttctcctctgaacatgatgaacctccctaaggaataaagtcaggacattttaagggtttgagcaaatgaatcatttcatcttcaatttcagaaaataggtcttcatgaaagcaaaaggaaatctgattttccaagtgatatgacacatcaggagaaacacgggcttctaaagaatatacacacttaaaaatggattatttacaatttttaagcataaaacacacatcaggagaaacacaggcttctagagaatacacacacttaaaaatggattattcacaatttttaagcataaaacaagacacagtgtgtgcacacacgtgcactgctgatttctgttgctggaggcacggcgctgtcttcggggttgtcgtcattgctagctgg

SEQ ID NO: 9625 - DNA, 438 bp, Homo sapiens; identical to SEQ ID NO: 9624

SEQ ID NO: 9626 - DNA, 840 bp, Homo sapiens
gcacgtgtttgcctgtgttcatgtttgcctgagtgcatgtgtgtttgcctgtgtgcctgtttgcctgcgtgcgtatgtacacgtttgcctgtgtgcacgtctgcacgtgtgtttgcctgtgtgcatatttgtctgtgtgtgtgcacatctgcatgtacatgggtcctgtcattgctgcccgtctcctcccgagagctttctctgcacgttggccctgcctttgcagcttctgccagccccgtggcgccgagtggccttcttcccagccccagtgggcgcagtggggtgggccgtcctctgagggcacccgagctgctgcatctcccgtcttcccgcatgcagtcctcagggcacctgtccatgagccccattcacaggagcagtccccaaggcacctgtcccacctgggccacccttggccctgcgtccgtagccagagcttggagggctttgtccaccaggcctgggaccctgggatccttcctcagagtcccccggcgtgggggcagtgtggagggtggcgcgggtggagggtggcccgggtggcggggtgaattcctggggagagcctgccccctggcggccacctgggagaatgcagggaacatggctgagcagcgtcggctgtggagggagggcaggggcaggggtcagggctgcaggcgtgtccctggggctgatagcggtgggatggggtctggccagtggagggtccatggggtctcctagcaaacgcagtggcgctccttaaatgacggtgccaggcggggctgttctccttggttggcctctgtgtcccttcaggctcccaaggcccctcctcacatcctccctcgaggg

SEQ ID NO: 9627 - DNA, 840 bp, Homo sapiens; identical to SEQ ID NO: 9626

SEQ ID NO: 9628 - DNA, 2585 bp, Homo sapiens
agctggctggagggagcgggacagagcagaggggagggggatcccactggtagcatggatggggcctatcgcccccgacacaaaccagggtctgcccagggacaggtgtgggctgtgtggaggcagaggctggagtcctcagtcctgcatgaggccccactgtttgctgtccttgccgggcggccgggcagcatgttctgtggctcagcctggctgcaacgcctgcccggctctgagtccctgaaacctcgggcagagcctgggctctcggccctggtgagggagaggggttatggaccccaccaccacctcgggcagtggatgggacactctgaggctggcctggctcacaccgtgttggtaggaagcctgacccccactctgttcccacccccacctagggcctgttttttcaaaagtaaccgttttactgagatgtgattcatatactgtacaattcagcctttaaagtgtgcagtaaatgacttttagtacatatgcagagttgtgcagccgtcacctctaattccagaacattgcatcagctcaaatagcaactctgtccctgttagcagtcacccccatcccgactcccagccctggcacccacatccctttcctgcgtctgtggatcagcctgtcctggacgtgtcatagaagtggaatcacacactgtgtggctttctgtgtctggcgtctctcactgagtgtagcgtcctcagggttcattcgcactggggcccgtgtcagagccttgctcctgttcatggctgagtcgtgttctggtgcgtggggcgcccgtgctgcacttgtcctttgctgcgtcatggacgctcgggtgcttcacactcctggccattgtgaattgtgctgctgaggacacgtgtgtgtgagtctgtgtggatacatgtgttcgtttgtctcgggcagacacccaggagtggaattgccaagtcacgtgtaactcggtgtcatcttttgagaaactcgcaaactgttctccatagcagcggtaccgttttcacacccagcaacagtgaatgaggcccagcgtccccgtgtcctcaccagcactcgtgattgttgtctctgattctggcgtcctcatgggtgtgaggtggtgtctcttcgaggtgtctttttgtttgttttggtagagacaggggtttcaccatgttgcccaggctggtcttgaactcccaggctcaggggatcctcccaccccggcctcccgactggccgggattccaggtgcgtggcccccctgtggtttgatgtgctttcccttggtgcccagtggcatggagcgtctttgcgggcttcagggccgtttgtatgttatctttgggcacatgtctgttctgtccgtggcatctcggggaggtgaacatacaggccagaccccccaccacccagagtgtggcttaggagggagacaggccgaaactgggcagtggcagaaaccaactcccaactcccgacctccctccctgccacctcgcacctgcgacaggagcactggagaccggaattagagagcggaggtatgagccggcttcccagggctaaagtgaacatggcgcgagagcacacagtgagaataatgcaaacgatgccaatggcaaaaataacagcagccggccgggcgcggaggctcactcctggaatcctagcactttgggaggccgaggcgggaggatcaccagaggtcaggagttggagaccagcctgggcaacatggcgcaaccttgtctgtactaaaaatacaaaaaaataattagccgggtgtgctggtgcgtgcctgtaatcccagctcttgggaggctgaggcgggagaatagcttgaacccaggaggcggaggttgcagtgatccaagatcgcaccactgcattccagcctgggcagtagagcaagactctgtctcaaaaaataataacggggccggcgtgctggctcacacgtgcaatcgcagcattttgggaggcccaggcaggtggattagctgaggtcaggagttcgagaccagcctggccaacatggtgaaaccccgtctctactaaaaatacaaaaattagccaggcgtgacggcgcgcacctataatcccagctactcaggaagctgaggcaggagaatcacttgaacctgggaggtggaggttgcagtgagctgagattgcgccactgcactccagcctgggcgacagagcaagactctgtctcaaaaaataaacaaataaaaataataacagcagctgacaccacgtccgcaagagggccagaaccattgtgcccatccctgtctacaggcagggaaactgaggcacatagcggccatgtgggttgcccagtgtgaccacgtgcgttacatagaaagcagctaacgggaacctgcgtctgcagatgtgaaagtgatctgggcatctcgctgtaaatggtaccccctaaaaacaaactcttgacagtgaatcgacccttttgctaagttggagctgtttcaaaatgggagaacctttagaacctagctagccaacaggactgggagggctgagtgacgtggtgcggcagttgcagccgagccctgtcc

SEQ ID NO: 9629 - DNA, 814 bp, Homo sapiens
agctggctggagggagcgggacagagcagaggggagggggatcccactggtagcatggatggggcctatcgcccccgacacaaaccagggtctgcccagggacaggtgtgggctgtgtggaggcagaggctggagtcctcagtcctgcatgaggccccactgtttgctgtccttgccgggcggccgggcagcatgttctgtggctcagcctggctgcaacgcctgcccggctctgagtccctgaaacctcgggcagagcctgggctctcggccctggtgagggagaggggttatggaccccaccaccacctcgggcagtggatgggacactctgaggctggcctggctcacaccgtgttggtaggaagcctgacccccactctgttcccacccccacctagggcctgttttttcaaaagtaaccgttttactgagatgtgattcatatactgtacaattcagcctttaaagtgtgcagtaaatgacttttagtacatatgcagagttgtgcagccgtcacctctaattccagaacattgcatcagctcaaatagcaactctgtccctgttagcagtcacccccatcccgactcccagccctggcacccacatccctttcctgcgtctgtggatcagcctgtcctggacgtgtcatagaagtggaatcacacactgtgtggctttctgtgtctggcgtctctcactgagtgtagcgtcctcagggttcattcgcactggggcccgtgtcagagccttgctcctgttcatggctgagtcgtgttctggtgcgtggggcgcccgtgctgcacttgtc

SEQ ID NO: 9630 - DNA, 1595 bp, Homo sapiens
atttttgtttgtttgtctcttttgaccacctctataactcttatggatattcatcaaattctgtatcaaagaatttaagatttagtcagtaaaatatagctatgatatgacacagcacgattctgtgtaaagccagcaaactaaccagcagcctcagaaattttatggttctttctattgacagtctaaggtcctccctggttaccatttccccaaaagaacaatgaggaatttggaggttatgcattctcgcagtctggggatctgtgatagtcactctgttaggtgtttttgagccaccaggttcctcatagcagctttcaaatctttgttcctcgggctgtagatgatggggttgagaatgggggtcaccactccatagaaaatggagatgagtttgtctgcaaggtcctgtttgtctgctcccattgggtccttagacttgggcttcccatacatgaagaggatcatcccatagaagacgatcacgacagtgaggtgggcagagcaggtggagaaggcctttttcctcccctcagctgaggggattctcaggatggtggcaatgatgaagacatatgagacaaaaataaacaggactgggagtgcaaggaagatcatgttggtcacaaccatgctgatcacgttgatgcagatgtcagcacaggccaactttagaactgccaggatctcacaggtgaagtgattgatgacattgtccccacagaagggcagtcacattgctagggatatctgtactacagagttggtgataccagctgcccaggagccaacagccatgggcatgtaggcagccttgctcatgaccacagggtacctaagggggttgcacatgtccaggtagtgatcaaaagccatcatgctcaggagaacacactctgtggctcccatggcaaaggagaggaacatctgtactgcacaggctgagaaggagatggttttcctgggggtcaggaagctgtcaaggatgaggaggttgtatagcagatgtccaggaaggagaggttccccaggaagaagtacatgggtgtgtgcaggcgggagtcaaggatggtcaccaggatgaggaccccgttgcccagcaggatcaccaggtacaccagcaggatgaacacaaagaatgtcttctccagctatgggtgggcagagaggcccaggagaacgaaccccaacacaggggaggcctcattggacctgttcatggtgcatctgctctgtcacctggaggaactcagaggtcaacctcagcatcctcttactccaaaagtacctggaaggccaggcacaaatccttgccctgctgagcaactggagaatagcgctgatgatttgttcatctctatggggttctaggaacaatgtagtacaggtcaatatttaacttctgcttctggtaagaacaaacaggctaatttggactaactgtcttgcagatgaccattagacaaactggaaaaaatacataaaacattggagaagtaataagacaatgaggaacatagggttatgactctggggaaaaacaaggacctagagatgtaagtctagcacttgtggctgtgattcaactcgag

SEQ ID NO: 9631 - DNA, 467 bp, Homo sapiens
cacctcagcctctcaaggagctgggactacaggtgtgtgccaccatgaccagctaatttttgtagaaatggggtttccccacgttacccaagctggtctcgaactcctgagttcaagagatccaccggccacagcctcccaaagtgttgggattacaggtgtgagctaccgtggctgactgaagtttaccaatttacatgttaatctcatccaaaaccactctccaagctgacacataaaattaagcatcatactacctcctaggtctgctgtgtttgcctgacacatagtgtgggctgtgtacatgtttgtgccatttttatgactgggaaaatgacagtgatgatgaggattcctagttctattgttactaataccgctatggagtctgaagtgccaggttttaaaacccaggtgtatcgctcattagctgtgtgaccttgagcaagatcttcaacctcctcgag

SEQ ID NO: 9632 - DNA, 467 bp, Homo sapiens; identical to SEQ ID NO: 9631

SEQ ID NO: 9633 - DNA, 461 bp, Homo sapiens
cacctcagcctctcaaggagctgggactacaggtgtgtgccaccatgaccagctaatttttgtagaaatggggtttccccacgttacccaagctggtctcgaactcctgagttcaagagatccaccggccacagcctcccaaagtgttgggattacaggtgtgagctaccgtggctgactgaagtttaccaatttacatgttaatctcatccaaaaccactctccaagctgacacataaaattaagcatcatactacctcctaggtctgctgtgtttgcctgacacatagtgtgggctgtgtacatgtttgtgccatttttatgactgggaaaatgacagtgatgatgaggattcctagttctattgttactaataccgctatggagtctgaagtgccaggttttaaaacccaggtgtatcgctgcattagctgtgtgaccttgagcaagatcttcaacct

SEQ ID NO: 9634 - DNA, 1262 bp, Homo sapiens
aaaaatcagaaaagaaaattaaaattccccaccaatgataacagccattggtatttttacatgcatccttctgagttttattagtcccatgtatatataaagaaaagttggaatgtactttacagccagctttatatgctgcttttttctctagctcttataaatgcttatttataagcattttctcaacataaattacttttgaaggtttcatttgatggccacgatatgccatcacaattatttttcagtcataatttatgtagctgatcttcattgttacacacatggatgttccccaccatgtggctgccataaatgattctccgatgaccaactctacacatagatccttgtcttcatctctgattatttccttatgatagatttctggtctcatcaggtcaaaggatatgggcatttttaaggctttgatatgtgttatgaaattgccctcctgcaaaggtggcctgggttccactccccatgaaggctcaacaggtttctgaggcctccctcacacctccttcagcatcttctctctcactttcctgcctcagcctcttctccctgggttcccttgtgaaacacaatagtaaaggattatattatcaaatatttaattatgtatgtatctgaaaatattttaaaagtcaacataattactctatttccattagtttgatttgcagcaaattatgcatttagtgtgaagttggaggtgccttgctggttggagtgcagatagcgtttggctgtctacaatgggcgggcgctggtgacaacagctcaggctggtaaagccgtatcaggtccttgcagaggcagggcttcctcccagctggggagcctcagtaccttggagctctgaaatcacaccaacaccacaaatgaccctggggactgggtgtcttagttatctattcttgcataacaaacaaccccaaaacttgtggttgctgaaaacaataaatatttactgtctcacagcttctgtgggagctctccatccgtggccagcagctcaggctcaggatctcccaagaagctgcaatcaaggtggccccatggccgcagtcaactcaggcttgactcagggagaaagtatctgcctccaaccttactcacacgatctctccaaagggctgcttcaggacgtgacagctggcttctccctgagcagacaattccagagaagcactcaggtcggcacgcaaggttttcccatccttttggcatagaagttagagcccagctcgagg

SEQ ID NO: 9635 - DNA, 183 bp, Homo sapiens
aacttttacattaagtctatgatccacttcaaaataatattttgaatattatatttggtgttaggtaggggattgggtgtgctatttttctatatggataatcagttgattcagcatcatttgttgaaaacactatcctttttaatgttgaaaatattgaattatgtcagggtatgtttcagt

SEQ ID NO: 9636 - DNA, 1107 bp, Homo sapiens
attacataaaaacaaacaattctcccaccatattttcagtacagctccgctaatgaacatcctcaaatcataccagacactctgtatttatttttctgatgtacttccctataatctgtttcagattatttttatttacagaaatgattttttccaagattgggaccaccaagaaactacagatgcagacatacgtcatatcactcctctagtcctgaatttataatattatttaactcagtttttctttttacctgagaacaaataaacaaaaataacaaacaccatctcccaccaaaataatacaaacagcaatgaaaaacttttctaagtagctgtgagtcaaaaaggtgaaatttcattgagctgcaaaactaatccagcagttttaggatatgttcacgttttggtaatttagatgactatttctacatttccctatgatccaggataccaagggacctgctgcctgagacgttgagatttagagggctttgtctctgttacaatgactcagagcaaatggagagagtgtccatttttcatggatgatgatgcttgtaaattttcattcatatctttgataactgatgtacttagcaacttccagataacattggttagagttagctctgcttattttggttctaatttagaaggaagacagagaaaatactcattctaagtacctactttttgtcagtaactatggtagctactttatgcactttgtgtccatcagggttttccagagaaacagaaataataggatacacacacaaacacacacacacacacacacacaggtttcacatccatagattcaactaacaggctctaaaaaaattcaaaaaaaaaaattctacaaatttccaaaaggcaaaacttgaatttgtcatgtgctaaatatcacacaaaagaaataacatgtaggcatggtattcaattgaataattaatctggatgggtgtggtacgtcacgcttataatcccagtacttagggagtccaggcagaaggactgcctgagcccaggagtttgagagcagcctgggcaacagggagagactgggtctctgaaaaaaaaaaaaaaaaaaaaaatctagag

SEQ ID NO: 9637 - DNA, 1249 bp, Homo sapiens
gaactcaaacacattacgtggaatgaggggggagtgtatgaaggaatcattagcaacagattagagtccccaccaaagaaaaagaaacaagactcaagggctttttgagctgccacctctccccagagagggctcagaaaaaagatggcctggactctgctgggcagggtggtgggtcatcacccatgaatcaaggacatgaactaacctatatacacctatgccagcattgcagctttggcatttctgggtttgagggatgcaggagcagcaagcttgatgcaaggggacttaggaacgggcctctaaacaaagcttctctggtaagcacaggatctttccttaaattacgtgcctattaaggggtttaggatgccccgcccaagctgtggcttggttcttcttctatacacacacatacattcttaaattctcacatatttatagccctcacatataaacacagtgtctgaaacacaacataagcctttgcaaaaatatgcactagatagggaaggcctgtttgatgcccaggcatgaaagtgtctacttctcagaggaacatggctttgggtcactgtcatttgcacctgcactgcattttcctttctctcatctacatgcagaatgcttcatattcaagggaggtgccacacccagtcagctgagctgtttacacgtagtgggctagcttgctcatgcttacctgctgtgtcttctgttcatcagttctttctactctgttttacagtccattcgtggaactctagctctcaattattgtttcataaatacaggcaggtaggacaaaaatgtggctgaatcattgcaaaatcaaaatattttctgggagaaaaaaatcatagcacttcttctactgacaagtcagaaacttcatgctctcatctatgtgcccatctgtgcatattcctccattttgtacctgtccatgcattcttcttacctctgacaggaaatttccacattctactcttgaatcctccttaatttagtacctgcagaatgtgcctaacagatgcttgataccctaaattacagtcagataaggcaggatgttaggggtccatgattctttggggagattttttgcaagtacatcttccttcctacaaaaggtaaaaaaaaaaaaaaagcacccacagcgttcaagttgaaataactccagcccaatttttatgactccttctctgtacttccaatactcccttcctacaaaaggaaaaaaaaa

SEQ ID NO: 9638 - DNA, 1248 bp, Homo sapiens
gaactcaaacacattacgtggaatgaggggggagtgtatgaaggaatcattagcaacagattagagtccccaccaaagaaaaagaaacaagactcaagggctttttgagctgccacctctccccagagagggctcagaaaaaagatggcctggactctgctgggcagggtggtgggtcatcacccatgaatcaaggacatgaactaacctatatacacctatgccagcattgcagctttggcatttctgggtatgagggatgcaggagcagcaagcttgatgcaaggggacttaggaacgggcctctaaacaaagcttctctggtaagcacaggatctttccttaaattacgtgcctattaaggggtttaggatgccccgcccaagctgtggcttggttcttcttctatacacacacatacattcttaaattctcacatatttatagccctcacatataaacacagtgtctgaaacacaacataagcctttgcaaaaatatgcactagatagggaaggcctggaggatgcccaggcatgaaagtgtccacttctcagaggaacatggctttgggtcactgtcatttgcacctgcactgcattttcctttctctcatctacatgcagaatgcttcatattcaagggaggtgccacacccagtcagctgagctgtttacacgtagtgggctagcttgctcatgcttacctgctgtgtcttctgttcatcagttctttctactctgttttacagtccattcgtggaactctagctctcaattattgtttcataaatacaggcaggtaggacaaaaatgtggctgaatcattgcaaaatcaaaatattttctgggagaaaaaaatcatagcacttcttctactgacaagtcagaaacttcatgctctcatctatgtgcccatctgtgcatattcctccattttgtacctgtccatgcattcttcttacctctgacaggaaatttccacattctactcttgaatcctccttaatttagtacctgcagaatgtgcctaacagatgcttgataccctaaattacagtcagataaggcaggatgttaggggtccatgattctttggggagattttttgcaagtacatcttccttcctacaaaaggtaaaaaaaaaaaaaagcacccacagcgttcaagttgaaataactccagcccaatttttatgactccttctctgtacttccaatactcccttcctacaaaaggaaaaaaaaa

SEQ ID NO: 9639 - DNA, 1249 bp, Homo sapiens
gaactcaaacacattacgtggaatgaggggggagtgtatgaaggaatcattagcaacagattagagtccccaccaaagaaaaagaaacaagactcaagggctttttgagctgccacctctccccagagagggctcagaaaaaagatggcctggactctgctgggcagggtggtgggtcatcacccatgaatcaaggacatgaactaacctatatacacctatgccagcattgcagctttggcatttctgggtttgagggatgcaggagcagcaagcttgatgcaaggggacttaggaacgggcctctaaacaaagcttctctggtaagcacaggatctttccttaaattacgtgcctattaaggggtttaggatgccccgcccaagctgtggcttggttcttcttctatacacacacatacattcttaaattctcacatatttatagccctcacatataaacacagtgtctgaaacacaacataagcctttgcaaaaatatgcactagatagggaaggcctggaggatgcccaggcatgaaagtgtctacttctcagaggaacatggctttgggtcactgtcatttgcacctgcactgcattttcctttctctcatctacatgcagaatgcttcatattcaagggaggtgccacacccagtcagctgagctgtttacacgtagtgggctagcttgctcatgcttacctgctgtgtcttctgttcatcagttctttctactctgttttacagtccattcgtggaactctagctctcaattattgtttcataaatacaggcaggtaggacaaaaatgtggctgaatcattgcaaaatcaaaatattttctgggagaaaaaaatcatagcacttcttctactgacaagtcagaaacttcatgctctcatctatgtgcccatctgtgcatattcctccattttgtacctgtccatgcattcttcttacctctgacaggaaatttccacattctactcttgaatcctccttaatttagtacctgcagaatgtgcctaacagatgcttgataccctaaattacagtcagataaggcaggatgttaggggtccatgattctttggggagattttttgcaagtacatcttccttcctacaaaaggtaaaaaaaaaaaaaaagcacccacagcgttcaagttgaaataactccagcccaatttttatgactccttctctgtacttccaatactcccttcctacaaaaggaaaaaaaaa

SEQ ID NO: 9640 - DNA, 745 bp, Homo sapiens
ggcggcggtggctgcggcggggcgcccgggtgctcggtggcctccgagtacttggtgaaaaccagcggcacagcgatgtccgctttgtccaactggttccagaagcgggcgatgcagcaggccctcgtgatgcacggccacgccatgatgctagctgaaaagccggcctcctctttcttcttgtggttctaaagcaagtctctataatcttccttcagcctccgatcctgaccggccaatgtggttcccaccgttttctacccccgatcagccggagctagttcgccctcctccctcagcgagcacccggggagagctgtcctaggagagtctgtagagtccctcgattaccggtcgcaaacgcctttgggagcgcagtctgctgcgagcgccgaagggtgagacgcacggcgttcccgagtccccggcgagggtgtctgggacgcgcccctccctgcggctgcggcggcgcacagacctcggtcgagcgaggcgacgtgaggagaggtggctacaggcttaagccatggcgcagaggaggggccgggcggtgtggccgcagggtccgcggaccgggctcgagtctccttcctgccggcgtcctagtgcagccggccacctagcagggctgggaggccatcacctccagcggagaccgagcattgctgcctccgccgctgcccgcgaggatgccgcagccgccgccgccaccgcctcttctcctgggaagcgaccccaccctttt

SEQ ID NO: 9641 - DNA, 223 bp, Homo sapiens
gctgggagcttgccttccctccccaccaccctccgccctggcagctcctccctcctctactcccgggcaacagcagaatctggggacgtagtgggttcaagtcccaagctcgtgaggactttctgtccttgtgcttgtcgcttcatccccaggagtcggaggctcctcttttgtaaaatagggccaatggggggggggtgctattaaattttaaaacatggag

SEQ ID NO: 9642 - DNA, 118 bp, Homo sapiens
cgctccgccgggggccgcatcctgctcccgggcctcagcggcggcctgcactggccagcgctcctggctctgcggccggcgcttgggcgccccgagaatgggcgccgacgcctgggag

SEQ ID NO: 9643 - DNA, 1217 bp, Homo sapiens
catgaagatgcaaaactatgagctgatttcatattttaaatgcaagttagcaaaatttaccttctacaattatttgacaagaatttaaagtgcaattgacaaacctttcagaaaaaagctgggaattgggcctttggggtaaggttgccatatttagctaattaaacatacaagtttcccagttaaatttgaatttcagataaatgatgtacaatatttgggacacacttatacaaaaaatgctcattgtttatctgaaattccaatttaactgtgcatctgtattttgcctgggcatcctactttggggtacttcgaggtccctggctagctcctggtctatgtcttagtccatgctcagaagtcccatgtattcaaccagctgcttcttcctccattccagtggttcttttacaggtaggtgaggtcttaaagaatcttttgaaacttttgagccattccccaggagaatatctacatacaaaatttggcatctccagggtatgtgggtcccacgtgagccccaccccacaatggtcggacccaaggactcctcccacagtccatggcactgtgcagatggccagctacgaggaagtgagcatgttggactttgaggagttcaaccagactatgaaacagcaaaatcacaagaccttttttgccttctttgccagttccaaggacattggaggtaacagatatagccccaatggcatgcgggccaaaccagttgtagagacgggctgaagcatgttcgggaagaatgtgcattcatctactgccaagtaggagaaaagccttattggaaagatccaaataatgtcttcaggaaaaatttgaaaggagctgcagtgcttaaccatggaacccaggaaaaactgatagaatctgagtgtcttcaggccagcataatggaaatgttctctgaagattaagatttgatgatggcagtcatgccttgatttcctgctctgttctggtaaactgcatacttggtttgaattcttgttagcaataaataaataaatgatgatgggctgggcacagtggctcccgcctgtaatcccagcactttgggaggtcaaggcgggaggatcacttgagcccaggaggtcgagaacagcctgggcaatgtggtgaaaccttgcctctacaaaaatatttaaaaattagccaagcgtggtggtgcatgcctatagtcccagctactcgag

SEQ ID NO: 9644 - DNA, 294 bp, Homo sapiens
ggtggctcacgcctgtaatcccagcactttgggaggccgaggcaggcggatcacgaggtcaggagatcgagaccaccctggctaacacggtgaaaccccatctctattaaaaacacaaaaaattagccgggcgtggtggcgggcgcctgtagtcccagctactcgggaggctgaggcaggagaacggtgtgaacacgggaggtagagcttgcagtgagctgagaccgtgccactgcactccagcctgggggacacagcgagactccgcctcaaaaaaaaaaaaaaaaaaaagaa

SEQ ID NO: 9645 - DNA, 1532 bp, Homo sapiens
tgtaactgtataatattgacaatcgaacaaacagcttcaatcatgtctattcatatctccaggcaaagttttgttcttcttcctttattttacaaatgtaagcttcaaaggacacatacttttgtggataaacaatttccactagaagaagaacagcaaaggtagctatttaatatatgcagttagagccatgaggtatggatcatagtaaataatattttgcaatgatactagcactaataaagatgatgacatttgcatgattagctatgtttttagtaaagcaaaattaacggataggaatatttagcttgaaggatacatacaacatgctgacaaacaaaactgagtttcagcataaaaatggatatattacacagagagtatacataggctcctaatgtctctgtgtgcatttgtatgcatattattcatctagtattttctttttacttccaagttggaatgcatttacttcatatcttattataagcccatttggtaacacttctgtcagatttcagttgcatattcactgttgaataaatcagtggttaataaatgtccttggaaatgtgtttagagataaataatgaactgctgtatctgatcattaagtgtacatcaagctcacatttttactctcagaatcctaaaaggaagatagcatgacctactatatatgtacatggaaaaaagggaaataattatagagaaaacatgtaaaaggagcctggtttattactcttaaatgggtacatgatagatcaaaataaatgttattacaactgatcaaaaaatcctactgcaaaggaaataataaataaagatggagagtcaacctgtccatcataagtgctttttgttacaaagccaaggacttggagtgtggacccaaccccacagcatgcaaaaccgtggggctctcaggattccaagcctagcatccccaccctctcataggcgcttcggagctgaccgcaggcacacttttaatttgtggcaagatggtctgacaaacagcttgggaggacagcagaggtgaaaatacagatcaagtgcagataaaaatatgttcaccttgaaaaatacaaacaagacttttaggtaataatgcacagggaaatacctatcaaaaaatgagaagaatagaaccactgctttctcattaacagttttcacaatcccttttagcttgtattccaacttctgtccataatccaatatctgcatactccttacatctatacttaaataatatagatttttgtcccctgtacatatcttataaatgtcaatccatcccacctcaaagtttcttggtattcagcaagttttttaaaaagtcaatcatgtaggagatcctttagcaatacttcaaggtattatccctataaaaagtgaagagggatctgaggtcctaaaaagaaaaataatgacagagaatggctgtaatttcatatgttcctgatggaaatctcactgctcagaaaaaaaaagaacacatatgccaaaataaaagaaaaaaaaaa

SEQ ID NO: 9646 - DNA, 1000 bp, Homo sapiens
cttctaggcctgcggaatgcacctctgctgggctggggctctgagttttgtgttttgggccaacctgatcctcatatatctatttggaaccagcgagtctccccagaatattttatcaagttattttgagttaggagtttaatagacatagaagcctttaaggagagtgagtaaatgaagttggcaagggggagtaggcaggggagagaggaggaaatcccaggctaagttttggaagagggcttgattatgttggtgacagcaggctgcatcttccaggacaggaatccccccgtggtttacaaaacacttccccttacataatcctatttaattcacacgacaagcctaagagttagggagggttcatttgccttattagcccgtgtttacagatggtgaaactgaggctcagagaggtgctgagatcacacagcaggatcatgcagcagaccacgggcagggctgggattccggaccaagcttggcattcttttcctggcaccacagtatttggctttcacaattttaatctggaaacactttaactacgaattttcattttgaagtcatgtctcagatggattcataacagtatagtgatccataaactataagaatactaggatttttattgctcaggactttagtaatactctaattactaaaaacggaaactaaagtggtgacattactactgcaagccctctgtgttttccactcctgagttagatgtcactggtggtgctgtagagggggctgctggagcactgtccttcatgtgaaagggggttccctttgccctttttgggtgcccacccacaagcttctctgtgctctgcttcccttcgctctccaagatgctaccttagagctactggagccactttgttcaggcagagggctgtacgtgccctagggctgatgtgcccctggaaaggtttgcagctaaggactgcctggagcagggatatgaaagcccagctttctcggctcgagg

SEQ ID NO: 9647 - DNA, 1000 bp, Homo sapiens
cttctaggcctgcggaatgcacctctgctgggctggggctctgagttttgtgttttgggccaacctgatcctcatatatctatttggaaccagcgagtctccccagaatattttatcaagttattttgagttaggagtttaatagacatagaagcttttaaggagagtgagtaaatgaagttggcaagggggagtaggcaggggagagaggaggaaatcccaggctaagttttggaagagggcttgattatgttggtgacagcaggctgcatcttccaggacaggaatccccccatggtttacaaaacacttccccttacataatcctatttaattcacatgacaagcctaagagttagggagggttcatttgccttattagcccgtgtttacagatggtgaaactgaggctcagagaggtgctgagatcacacagcaggatcatgcagcagaccacgggcagggctgggattccggaccaagcttggcattcttttcctggcaccacagtatttggctttcacaattttaatctggaaacactttaactacgaattttcattttgaagtcatgtctcagatggattcataacagtatagtgatccataaactataagaatactaggatttttattgcccaggactttagtaatactctaattactaaaaacggaaactaaagtggtgacattactactgcaagccctctgtgttttccactcctgagttagatgtcactggtggtgctgtagagggggctgctggagcactgtccttcatgtgaaagggggttccctttgccctttttgggtgcccacccacaagcttctctgtgctctgcttcccttcgctctccaagatgctaccttagagctactggagccactttgttcaggcagagggctgtacgtgccctagggctgatgtgcccctggaaaggtttgcagctaaggactgcctggagcagggatatgaaagcccagctttctcggctcgagg

SEQ ID NO: 9648 - DNA, 818 bp, Homo sapiens
cttctaggcctgcggaatgcacctctgctgggctggggctctgagttttgtgttttgggccaacctgatcctcatatatctatttggaaccagcgagtctccccagaatattttatcaagttattttgagttaggagtttaatagacatagaagcctttaaggagagtgagtaaatgaagttggcaaggggagtaggcaggggagagaggaggaaatcccaggctaagttttggaagagggcttgattatgttggtgacagcaggctgcatcttccaggacaggaatccccccgtggtttacaaaacacttccccttacataatcctatttaattcacacgacaagcccaagagttagggagggttcatttgccttattagcctgtgtttacagatggtgaaactgaggctcagagaggtgctgagatcacacagcaggaacatgcagcagaccacgggcagggctgggattccggaccaagcttggcatctttttcctggcaccacagtattccctgcaagccctctgtgttttccactcctgagttagatgtcactggtggtgctgtaaagggggctgctgaagcactgtccttcatgtgaaagggggttccctttgccctttttgggtgcccacccacaagcttctctgtgctctgcttcccttcgctctccaagatgctaccttagagctactggagccactttgttcaggcagagggctgtacgtgccctagggctgatgtgcccctggaaaggtttgcagctaaggactgcctggagcagggatatgaaagcccagctttcttggctcgagg

SEQ ID NO: 9649 - DNA, 973 bp, Homo sapiens
agaaggcaggggccttgaatgaacaaacgaacctgactaggggctacatgaaagccatactgtgcttcctcctccttctcatgaatccctttcctcccttctcttttccatcccccatagatcagaaatgtgaaggcggttaggaaatgtccagactccaaacagaaaaaactgtgatcctcagcagacacaagacataatattggattatctgcagcttcatcctgggaaaaatataggagactgaagggaaacaggaaaataagtaaacacccatagaaaaataaaatgtaagataaaaactgaaatgtaagaactatcacatggtgagtgtctatattcactcataatagagtaactacaaaatcataagtttgatatttaatcctaatgggggtgaataatttttttaaatgttgctactgtcgtgataaaacaaattagctacatactgacaaagtaaaagcgtgttttctaaaattgaaataattctcaaaataacagtttagaaaggctgcacattttacaggaaatgggttgaacatcacatgatttactcattaaggagataattattgagcgcctaaatgaggaaaaaagatttatagattttaaacaagcatccaattaactaaatattactgagtaaaagaaaaacaagttaatgatacttttgtaccaattttattataaaatgtatgtgaagaaaggctattttgtcaaactgtttttccgtatcatgtcatattttatatttacagcaacatcctgaaataggaatttctgaggatatgcttcccatttgagagatgaaaacctcgaggcacagaaataccataaaattgtctaaattacacatgcaaattaatcttggggctagaacttgatggaatatctatgttcttagacaatgctaattgattataggaactgcctttaggaccagaacaagaatctaatgtctaaatggtaa

SEQ ID NO: 9650 - DNA, 973 bp, Homo sapiens
agaaggcaggggccttgaatgaacaaacgaacctgactaggggctacatgaaagccatactgtgcttcctcctccttctcatgaatccctttcctcccttctcttttccatcccccatagatcagaaatgtgaaggcggttaggaaatgtccagactccaaacagaaaaaactgtgatcctcagcagacacaagacataatattggattatctccagcttcatcctgggaaaaatataggagactgaagggaaacaggaaaataagtaaacacccatagaaaaataaaatgtaagataaaaactgaaatgtaagaactatcacatggtgagtgtctatattcactcataatagagtaactacaaaatcataagtttgatatttaatcctaatgggggtgaataatttttttaaatgttgctactgtcgtgataaaacaaattagctacatactgacaaagtaaaagcgtgttttctaaaattgaaataattctcaaaataacagtttagaaaggctgcacattttacaggaaatgggttgaacatcacatgatttactcattaaggagataattattgagcgcctaaatgaggaaaaaagatttatagattttaaacaagcatccaattaactaaatattactgagtaaaagaaaaacaagttaatgatacttttgtaccaattttattataaaatgtatgtgaagaaaggctattttgtcaaactgtttttccgtatcatgtcatattttatatttacagcaacatcctgaaataggaatttctgaggatatgcttcccatttgagagatgaaaacctcgaggcacagaaataccataaaattgtctaaattacacatgcaaattaatcttggggctagaacttgatggaatatctatgttcttagacaatgctaattgattataggaactgcctttaggaccagaacaagaatctaatgtctaaatggtaa

SEQ ID NO: 9651 - DNA, 212 bp, Homo sapiens
atcccagcactttgggaggctgagcggggtggatcacaaggtcaggagatcgagaccatcctggctaacatggtgaaactccgtctctactaaaaatacaagaaaaaaagaaattagccgggcgtggtggcaggcacctgtagtcccagctactagggaggctgaggcaggagaatggcatgaacctgggaggcggaggcttgcagtgagcc

SEQ ID NO: 9652 - DNA, 577 bp, Homo sapiens
ctcataacaaaggccagaactgttacaaacacacatacctccccacacacccaaaacctgaacatgtcatcttcctacttacaacccttccatggcttcctactgtggttggattaagaccaagacccttgcgtggcttataaggtctgcaggttttggctctgccaacctgtctagcctcctggccctctcaatcagcttgctgtttccctcatttgttacacaagtttcatttttaaaaatgcatcatgggctgtttcctcctcctggaacattcttccctccctttcccctgacctgtcaatttctattatccttcatttccctgcttaaatgtcactgtttttgaggaagccttcaaatccccagattaggtcagaatcccctaacacactcactcttttcgcaccccatacttaatttttgtattatttttctccaagtgaacttaaataaccatataactgattaaaattgttctcccctgccagaacaagacccatgaggacaggagacccttttgtcatggcttctgtagcacccggcatagtgcttggaatagaggagacactcgaga

SEQ ID NO: 9653 - DNA, 2045 bp, Homo sapiens
ttcttcgtggctaactgaagaatgaccaatttattttgaatagaaaacatgcagacagaaaaactatcatgaaaatttaaacatgtgaacagagggtaggaattttaaaacggtaatttttcttagaactttaaagttcaagaaaaataccttaaaaccaacataaagaatagcaggcactgtactaagcagttcacccacagtatcatgttttaatctcaccacagccataaggcggtaatagcatgcatagatatcattccaatttttcctgttgcaagtaacagaaaaccagaccccatctggctgaagccagtaagagaaaagactaacaggagggccagcctcaggactcaaatacgtcaccaggacatgggttgcgtcccagtctcagctctgccagttcctgtagaaccctccttccaaggttcacagggtggctaccatagcttcaggccctcacctcatgataagacagcaatacaactgccatttcatgtctgttgctgtttctacattcagttagaattaaataaattttccagtagcacccacaaaaatactgagtccacctggttggcctacctagatatatcgccagccctgatcaagtcactggtcacgggcctggattttctggttcgcttaggctaatcatacgtcccatcccaggactgaagaagtaccagggctgttgctggagagtggctaatgtcccctttacaaataaggagctcatggtttaggaagatgagcttgccaaaaatcacacacttgtaaaataagtcaaaatttgaacttaagtctacttatctgagcccaaagtcttacaaccatttatggctgttatcctaacacctacgtcgcggaacggaagagtcctaagactgcaaagacccttccttttcttctagatccagtctaagttggttggtaatttctttagaccctgctttcagggaagtttaaaaaaaattacttgcatttgtatattttccttgtattttcggccaaatttcttctaattaaagtacaacataagttgaaccaacacaataattgtcatattaagaaaagataaaacaaactttactcatttctgcttctgggcatggagtgtgagggaccagacttaagttctcaaacaactacaaaatcagaccaaaaaatacaatggtttccaggcaccggacgacaggcagtgcagggctgtgatccttaagagaagggaagcagcgagccagagtatccaggccacaacccaaatggaggccaagagaggaacagcagaggatacagagggagggttccaggggccaagacgcaatccgaggggaagcccttccggggagagctggagtcctggggtggccttctcgagtcttcccgagcaggtctgtgcagcgaggaaacatccgaggctggagtgagccacgcggaggaggaagaacagcccgagctcacaggggcggggaagagttctagctcgcgacagcccctgggaggaaccctgcactatttgtggcgtcgagtaaagcaccggaaggctctgctcaggagcgtgaacgacaccgcccgctgcaagcctggaaaggaacgcgttgcctcaattcactccgatgtgtcacacacgcggctcagtcacctagggagcaggaaaaggccagcgggccacgcagggctcacccgggcctgcatccaaacgcaaacggccaggcccacgaagcaggaaacacaacccgcaacgagaagcaaagggatccacagagaagggccaggagtcacggacgacgccaggcagtcggcgcctgcgcttccgcgagccaagacgcctgagcggcgcggggggatcgggggatcccccagaaaactgccctcgactaacagcgcagcgaaggggcggtgcgctcgagaccctggaacgggaacgaccacagccaccgcagggaaacaaccggggcccaggcccaggtgggcgggcggctgaggagcgtggctgcgcccacaaagccgccgggggctgcggactacagcgaagccggcgc

SEQ ID NO: 9654 - DNA, 18671 bp, Homo sapiens
gggaaaaggggcagacgtccctgggttccggtgttcgcggaggagtcgaggcacggagaggcttcgggggagggacggaaagaagggtggcccgccaggcgggcggggtccatggattcggggtgagggccgtccgcggcctcgctttcgcctcctccgagccgggccggcgatggccgcagctgtgaggcgaggtcgggtcccgtagcggcgcgcagcctccttgggggactcggggtcctggttagtttccacagctccttctatctgaggggtacgaatttacggctgcctaaagccttagaacagtgatcccacgtcggtaattttagaacccggtaggaccggctgccatcaggggccccaggtgcagggtggtgtcagctttgagaggaattggagcctcgtcaccgcgcgcttcctgcatgagtggaacctcagaaaacggtcagcggggttcagaaggcaggagataacaccaagaccctacgtaggattgcatctttacgtcgtaggcttggtctcgtgtatttttattgagcgtgtttaattagctgaggttactcgctttggcaccccagtgatcgtttttgccaccaagctctgcctcttgagcgtttaatactgggatttacaaagcaacgggttcctgttaatcttagctttcaatactgggcaagggttacgtttctaaccctaccagtgccgcaggctcattatatattgaaggactcacctggtatttggttttctcatttataaagtggagttggagtaggtacttgaagggttttcaatacctttaaattctgaattttaaactctaaaacttaatgataccgtaggactttaagagagtataggttttaaaagctcttaccttgatattaatgacagtggtctactgtgtagaaacttgagattaaattgcagactgcagctatgaccggaccatttttagtgtgatgcaaactgtatcttctgcaggttataggcattttggaagcaggaactgagaaaattctggcagtgatctttcagtattttaaattccaccatttctccaagttcagttgtcttgatgagatacagggtggaacttatttcaaacatctcttgatgccagaattgaacgggaacagaaaagggctgtagtaagaaccatcatcaaagcctccaggacttgagcagcgactgacgtttttacttctaaccctggatatctcagagatttggttccactgtgcttttctatctctccactcacgccttagtgagtttgttctttcggttggagtaatttaatacaagtgttagtccttagaaatacattttggattaatttctttctatttttagagttaggccctcaacacagtaagtcttcacttaacatcatccataggttcttagaaactggagctttaagccatgcagtgtacaaggaaaccagtttcaccataggttaattgatataaataagaggaaagttcccacagcacattcctggtcacaaaaacatcgccaaacttctaaataaagaccaaagcacttctaatatgaaacactgaagtacatatgagctctacatttaagaaatatcattacccaatttctggtgaatccatgagtgaccgggttgtggaggggctgtgttaaagataatgttggccaagccaaagctctgaagcacctccccctaccatgcagtttcaaaacaaacaggagccacttctcagcccgctgggcctttcttactgcatcgggtattgtcctgcatctctgtgtgaataccgtatgctttacgagtttttatttgacaataatttgtatcctttcattttccaacctgcttattccagttcagggtggcagggggctgagcccatccaggcagctcaggaccaaggcgggcaacagtcctggagaggacggcatcccatggcagggcacactcacactcactcagacggggacgccccagtgagcctcacgtgcacagctttgggatgtgggaggaacccggggtacctggaggaaacccacagcacatggggaggacgtgcaaactccaaacagacagtggcccctgctggggatcaattttttttctcatcagcgttatagggaaacaacattagaagaaatatgttcaagggccttctgtgccagttcctagattacttgaataactttctatttctcctcatcacagtatattttgaatacatctgtcttcataaaatacaccatgtccaaaatctaaaagggccaattccaaattattccaccagctttgaagggaattgaagcaagaataacaagagtaagttctgtgtgaaaagacctactttagatacttcaaaggttgtctcattaatccttgcggcaaccctgcaaagccagcgttattatacctgctttatagatgaggagcctggggctcagctgtgtccagtatcttgcgcagcaaagcggtagagttcaattggaactcaagttggtctgtccccatattctgtacttctgtgttctggacagactgaagttagccagtgttcctcttgcgttccagtttcttcattgttccctttctccccaaaataagcatatcatgctgatttccagcctgccagttctttcctcctacctgtaatgtgccatcttcatttccctctgtgtatctttcaaatgccagtttaactggtttttccaagtctccagtgttagcctgaagttttgtagtacttatgtatcatgttatatttagcaatggattaattcatagtaattaaccatttgtattaatgtgtcctcaggagctcaggggtgaactatttgaggacagggatgagtcgaagcataactgacttgagttcacccccttcctccagaaccagaatgtgtagcttagtgccaccctgtagcaggcattcctgctgcttcaggatctgttagactcttacagagcatcctcacaaacttcatggtttttctgtgcactgtaactttgactttctgttgaccacgtctttgcagcagaagaatagaaggaaggtgataggatgtgatgatagaatttgtgatagccaagcaacaacttttcctaattcggcatgttaaaaaataaggtacgctattcttttcttaaacatacacgttatttgactcatgaaatgtattttaattcagccatttgagagtataaaaactagtttgcaaaccctgcttgaactaggaattgtcagcaggaatgggcgatgccaagtgtcgcatggggcagtggacaagccaatggaaaaacaatctctggcgatatttactgcaagcatctcttagctgtttggtgatttttattctgcacaggaaattattaagttttcacaaaaaggcataagctgaaatggcaggagtctccttagtagttgcctggagtctaatttaattatagtgaagcagcgtgggtttgtttaggcatgcacaggtttatgggtcataatgaatttattcatattataattaaggctttcataattaaatgaaaagatattcctgtattgttaacataaatgctgagacaagggtctgctcctacttaggtaacaatgagtcaagcattccttactatttgatttggttgtatgtgccatcaaggttgagtattgaagcctcagttctcttctaaatgatatattacataatactcctctaaatatgacttttttcctactttttagggtcactcatctaagaaagataacttggcagtcaatgcagttgctttacaagatcacattttacatgatcttcaacttcgaaatctttcagttgcagatcattctaagacacaagtacaaaagaaagagaacaaatctctaaaaagagatacaaaggcaataatagatactggacttaaaaaaactacacagtgccccaaactagaagactcagaaaaagaatatgttcttgatcccaaaccgccgccgttgactttgggtaagctgacgtagtcattcatcttttggcttattagggctaaaaaaatctattgagattaatagtataattttttatgttacagaaataacttatttataattatacagagaggtgtgtatgtattgaaggtatgtatgtattgaagtttaaaaatgataggggaccattagagcaagaaggtaaagatagtaatggtaagtagaataagtaaaaatgggagaacaaaagaaatatctattgattcacattgataaaaataaataattgagtaaataaatgatggaaaagaaaaatcccttatagtagaatgaatataactcataaggatagtagacggggatagaaaatcacctttggcaaacaccacagtaatgatcatcaatactgaaattaggaatgagaaaaatttacgtacagacacagaatattgaggtagtttctccagagatgcaagtacatggcagggagaaaaacaataacttcacaattacttcagctgtacagttgtaacgcttggcaagcagcacctgaaccaagtaatcctagttaggtcagcagtaacgcacgggccagcatcatgtgtctcctgctgaaaggtacaacatcacttctgtggcattcttaccaaaatgtatatctgaatttaatcatgaggaaacctcagaccagtccaagtgaaagacattccacacagttcctggctagtactcttcaaaagtatcaagtcaacagaagcaaatgaagacctagcaactgttccagattacaggagacccaggggacatagctgcaagtgcaatctgtgatcctggatcagatcctagttcagaaaaaagacatcagtgtgacagagaaccagatctgcagaaggcatgtaggctaattgatagattatagcaacattaattttgtggttttgatctttgtaccagggttatataaaaggttaacatttggggttaagaacatacgataatattttctttttgcaagtgtgaatatgtatttagagtaagaccaaaacttgcaacaaatcaggaatttcaaaacaacatgaaatgtatcccaaacaaaaatcaataaaaatagcataatattttgtattagttagctgcctgaaatatctctgtaatactttttccatctcttttgattgctagatactctttgatcatattttcatgtgacaataattctgtaatgtcattctctatagaaataagtcagccttacctccgtcatggctgattgaaattctttatgataggtgggatgcatatagcatgcaacttcacacacattcttactgtgtatggtattgctacaagtttgtgcctgtaaataaaggcatgcaaatcaattccatttcttctaattaataaaaggagatgtattatgcacttataattgtaaatgctgtttttaaggatattcgtttcccagtgctgccacaagcaattagtacaaactgggtgggttaaaacaaaagaaatgtattctctcagtgtcctggaggccagaagtccaaaatggcgctgttggcagggttctacagaagaatcctaacttacctttccctggtggttcctggcattgcttagcttgtggcagcgtcactccaatctctgcctctgacttcacaaaaccttcttctctaggtgtgattgtactctccctttcctcttcttataaggataccattcataggatgtacagccaactttaaaccagtatgacctcatcttaactacatctgcaaagaccctatttccaaataaggtcaacatccagaggttccaggtgaataagaattttgagatgacacaattcaacccagtacatcaagtatgtccctgataggggagaacttccatttagattaggcatcaatgagaacggaatccttcacttacatttgttgtctggaagactttttcacagcatcaagctaagtacttttcatactttgttccttatccactactcacatatattactatgttgataggtaccagaggtcttttgatagctcacagtggctaggctatggtttgaatgtttgtcccctccaaaactcatgttgaaatttcattttgttttgttttttttgagatggagtcttgctctgttgcccaggctggagtgcagtggtgcgatcttggcccactgcaacctctgccttccgggttcaagtgattctcgtgcctcagcctcccaagtagctggaattacaggtgtgtgccaccacacccagctaatttttgtagttttagtagagatggggttttgccatgttggccaggctggtcttaaactcctgacctcaggtaatccacccgcctcagcctcccaaagtgttgggattaaaggcgtgagtcaccatgcctggcctgtttttttttaattttttgtttgttttttgtgtgtgtttcttcttttttatttatttttatttcaatagcttttgtggtacaagtggtttttggttacatggatgaattatatagtggtgaattctgagattttagtgccaccaccagagtagcctaccctgtacctaacgtgcagtctttttatcccacaccctcccaccctccgcctcctgagtctccaatgtccattataccactgtgtatgcctttgcatactcgtatcttagcttccacttataagtgagaacatacaacatgagttacttcacttggaataatgacctccagttccatccaagctgctgcaaaggacattttttcattcttttttgtggctgagtagtattccatggtgtatatataccacattttctttatccactcattggttcatgggcacttaggttggttccgtatctttgcagttgtgaattgggctgcaataaacatacgtatgcatgcatctttttcatataatgacttcttttcctttgggtagacacccagtagtgggattgctggatcgagggatagatccacttttagttattcaaggagtcttcatactgttctccatagaggttgtactaatttacattcccaccagcagtgtataagcattctccttgcaccacatcaacgccaacatctgttgttttgtgactttttagtaatggtcattcttgcaggaataaggtggtatctcactgtggttttaatttgcatttccctgatgacgagtgacgaccattttttcatgtttgttggccatctgcatatcttcttttgggaaatatctgttcgtatcatttgccctctttttgatgggattatttgttttttttttttcttgctgatttgtttgagttcctcgtaggttctggatactagtcctttgctgagaattcttcatactgtttttacaaccttttgtaaatctgaaattattttaaaccgaaaagttagaaatatgattttttattgataggcatggaaaataggtttggttgaggatggcgtgtcttggcgcaggtcagatggatctggaggtgctggaagatctgtgtgttggagtcacacaaggtggaggggacctgtttccacagcgacgccaggggagatatttgatgctgtcttcctctgaacttctgctaacaagctcgatgtcttctagaaaacagcatggctcatgaacgtgttgagacttggaataatgtcgtacagtagtttagtgaagatcttctgttgtacctgtatggtttatgtagatgaccaaatagtttcatcataatcaatcttaagagttttatcaggaaaaatttaaattagatataaagaggaacgtcccaatttggaaaataagtaaagttattaaggaaaatagatgagaccttttttcaggacctctttatggaaaaaatcttgattgtgcgtattagttactaatgacattgaaccatatgctctttactgtctatacataatattccacttggatttctgtcttttcttgctgatttactggagttctttgcatattctacatagtaatctcttgttgatttagccactgaaaatatcttctgttcttttaccatcttttaaattatatctattgttttatattgaatacaattttcattctgattaatgttaaatccattgttttgttttgttttgtttttttcactttattgctgtttgggagagactttagatatacttcaccattctgagagtgcaaagattttcctacattttctttatttacctttaaccttttacctttcacatttagatgtcaccacagtttgttttgcttatgatactgggaaaatcgacgagattaaagcgtgttttgttctctccttccaaggcttctgcttctatgtcagtattgcactgttttgattaatagagtcttgcaatatgtcttaatagctgctaggaaaagacgtttcctctttttttttttcctaaaactgcctcattttctacataaaattctgctggagattttttttgaattggatttatagatcggggaaatactgtatttacagtgttatcatctgatccacaaatatggtagcatctcacaccatttaggtctttttgtctctgattcctaggggttttctgagtaagttgatctctgcagtgattcttattgtctgtgcctctctacttttatgccccttcttttttttccctgctttttttttaatctggccaggatctcctgagctgtggtgaatacgagtagtaatacctagcatttctgtctcgttccttagcctaacacgtttcatttacttacttatgtgatgtttgccctttgtttattgttgttttgtgttgtttgttggcctttatctaattataaaatttcccttttagccagttgctacaggtttttaaactcattaataggtgtacttttttaaatgctttttttcctgcaactttttagatgagcgtgtttgttgtgggttttctccttgagtttgtttgtgccgtaaattacagtgacagactctgatgttgaatcttcgtgcatagcttgaataaaccctacttgcccacggtgtttttcacattcactgttgcattctgataactaattctcgtttacgatgtttgacgtttaaccatggattaccctggactatgattgtccttgtctggttttattatcaaagccatataagcttcaccaaataagttgggcagtgttccctctttttcaggattctggaataacagaaaatagggatgatatgttccttaaaagtttggggaaactcacttgtaaaatcatctgggcctgaggctttttttcctttaagcggggtgaggagaggtgatgggttaggatgcatttggctgcaaatatacaagcaacacactgaaagtgatgtaaagcttaatggtgtgtgtcattgttcacagcagttctggtttggtggcttattgatgtttgccgggaccagcctccttccggtgctgccgtcgggaggtgctgccccgtgcatggacacaagagggtgcacagccccagggtcagtcctcaacaacaagggaggagccagaaaggcaggggagaaagctcccaacagaccttccttccgcttcacctgagacggtcacatgcccattgatagtctaaaaattggcaaagggtagcaagacttccacgacatgcttagatccatcaagagacctctgtgaggctgagcccatttccactgacgcgcagtggggttctaaaggcaagatgggtgctggacgtgctattgattttaaacattattacattgtggccagagagcacagcagtttgctgaaatctgtcaatacaatttacctattctccctcccgttctaaggtcttgattagtttataaatataaggccaggtttgcatgatggggagatgtggatgtttgaagttgaggcagttgacattgaccatagcagagtctggattgtacagcaagtgcccacccaagtctaagaggaagggtggtgctgggggccctgtctctccctgctcccacaccttgagccaaaggcaaagagctgccctgaggcagcgcccctcctccgcaacctcagtctcagcctcttcagtcttactgttcatttgtttctctgcaggccaggtgctctctcactaatggccatctgcacatccttttcctccatctagaaaacctcccccttcacctgctgctgttactcttaaccctgcgggtctccatttaatgccactttggtcaagtaaccttctctggggtcacagccccatgcatcctgcacaccattctccatagcgttcatcacacttgtagctgcttgattcttatcagaagatccatgggcatagttttagaagtaaaattgttctatgaggattataacagaaagtgtagcattcccctgacccattttgggcattactctaaggcagccattttcaaatcctttggttcattcttctggtattatttttaatatttcttttttttttttttttgacacacagtcttgctctgatgcccaggctggagtgcggtggcacaatctcggctcactgcaacctccacctcccgggttcaagcgattctcgtgcctgagcctcctgagtagctgggattacaggtgtgtgccaccacacctggctaatttttgtatttttagtagagacggggtttcaccatgttggccaggctggtctcgaactcctgacttcaggtgatccacccacctcggcctcccaaagtgctgagattacaggcgtgagccaccatgcccagccatatttttaataattctaaataacatgtctacgctgctgttttgttaattttcagttctggatatctcttcttactgcagaagatcgagatttagcatattgttttcataacttgtggttagactaataacattcagtgtttactctgttacaattccgtgacttcactcacagctgagcaatgtggtgttctatattacagtttccttctcagacatttttctattctacctgaagttctgtctcattttttcacattttagtttcctctatcatcactcatcactgattcatccctaaaatctcctccagaaatacattatctcaatacattaaaatataccagggcactttatcaatggggacgttgcttctggaatcctccgtggtcccctcccccggcccctccccgggctccctcttgagcagcatcccgggaccctgggctctctccttggattctgtctccctggacctcatggcggcctcctccttggtttcttccctcgtagtggcgacgcttctctgtcagtagctccctggaggagtgcggaggagacccacacagaagctcacatgtgtaacaatgtctttgctcttttctcacatttgattgatagctaataaggaatcttgatatggaaatctttccttcctccgaattttgaaggaattgtcttctcctgtctgttgtgctgtggatgagtctgatgcagttctgattcctgatccttttttgaggcctgtttttttgagtctgctttctgtctccgagattctcacagtgacgggattcgatgttctgagtacttactgggccctctcaaaccagaagctcatgtcctttgcttctgggagatgttttggactattttctttaaaatttttactccccattttccatgttttctttctaaaatgccagtttttcagatgtcacaacaacacctagaccggtcccttgattttcttattttctgtctcctgatatatgtttttctgtgagattacagtcacgtgccacatagcaatgtttcaatcaacaataaaccacagtgctcccataaaattataatggagttgaaaaattcctaccacttcatgacgtcttgatgactctgaccctgtgttggcctaggctaatatgtgtgtttgtgtcttagtttttaacaaaaaagttaaaaaaaaaagatttgagaaatagaaaaagcttatagaataaggataagaaagaaaatattttgtattaactgaaaaattagctgagcatggtattgtgtgcctttggtcccagcttctcaggaggctgaggtgggaggatagcttgagcccaggagacacagcctgcagtgagccatgaccacatcactacgtgctagcctggacaacatactgttttaagctaaatgttattgtaaaaaatttaaaagtttagagagtaaaaaagttataggaagctaactttaatttattattaaagaaaatatatttttataaatttagtgtagcgtaagtgtagactgtttatgatgtctacagtggtgtacagtcatgtcctaggccttcacactcactcagcactcactcactgactcacccagagcaacttccaggcctgcaagctccattcatggtgagtgccctacacaggtacaccatttttaatcttttatacatatttttactataccttttccatgtttggaagcacagatccttaccattgtgttacagttacctgcagtattcagtacagtaacatgctgtgcaggtgtgtagtctaatcagctgtaccgtgtagctttggtgtgtggtgggctgtaccagctaagcatgtatacatatgctgtgatgttagcaagatgacgaaatcgcctaacagcacatttcttaacaacaatcgcctgttgttaagcatctcaggactgtatcttagctttctcttccagcctttcagtggacgttcacatttctactctaaaagcccaagagctctttctgtactcgaaagtgtcccttcatagttttctgtcatgttttgtcgatgtaacattttgtcttccatttctgaagatatccttgtaagtcgatgcttttttatgcattgacccgtctttggggtgcggggaggtggtggaaggtgaacttcgcttcctgcattttgcctgaggatgttgcagttgctttttcaaagtgagtgtttcccaccgcactatcagctcgatgccgagacagcacatggtgggtacccacgtgttattgaaataagaactttattctgaccgtgatgatacgtcatagaaagtttttagcaggggaggtgcagattgatgtagaggccactggtggcagagcaaggtgagctgggagaggcagtgctgaaggctgagggctgaggcaggtgagaactgggagaaacttgggccaatacgtgtgaacaatgagtattcctcagtttttctttcataaacttggatatcactcctgcttgccttattgagttattgggaaatgaaataagatatgggaaatgctttgtaaataaaaaataaacgtattgaaaatgtcaggtattattaccactgacttttgcgccctcatagaaaaacggcatcctatatacagtccaccatttgtatccgtgggtttggcatccacagattcaaccagccacagatcaaaattttaataaatgaataaaaaataacaatacaacaatataataaaaataatacagattaaaaacaatatagtataacagctatttacatagcacttgcattaggaattattggtaatcgagatgactggcagtatacaggaggatatgcatgggttgtatgcaaatactccaccatcttctatcagggacttgagcatccttggaatgtcctggaacacattccctgtggataccaatggacagcttctattgtgaaataaagtatgtgatctatatgtagttctttaatctttgtttgcaaatggtgtcattaaagttataggtgggtgccatatgctaaaagacactctaactcctgtcctgtgctgtcttactttagcacagaagttgggcctcattgggcctccaccacctccactgtcatcagatgaatgggagaaggtgaaacagcgctctctcctgcaaggggactccgtgcaaccatgccccatctgtaaagaagaattcgagcttcgtcctcaggtgtttagcatacgagggtgagctagagagctcctgggctgtttcctagggacgaggcccagagctggagcctaagattccaagcttcctttttccagtttcatcctcctgtgtgagcctcacacacttccattttgttttccattaattaaagtgtgtgaagagctaaacaccctcattaaatagttttgtttgtttactaactggtattctcaagtactaaagtttgtacaaaaggaatgtttctgttcaacaggccccatgcggctgtgcagacaactggggggcttcccaggagcagctgtgtcccagcgcgggaaggatgaaagcagagggactcttaagtggttttgtgatttgagtcagaaaagaaaaaaaaaactgtgcttgaatgtctccaaagaatttgtgagagaatctttaagaaaagtaaaatcttttaatgatttttattcatgaaactttaccatagtaagactgatgatactactctgggttaacagataatatacacgcgcgcgcacacacacacacacacacacacagagagagagagagaatgcatatatatatatagagagagagagagagaatgcatatagggttttttctatacatattttgtctgcctaactaaactattgtcccctgaagttggggacacttagatttatcagaagtgtgtgtgtgcgtgcacgtgcgtgcgtggttgccctgtaacaatttcccacgtggtgtggcattacgcttcctgcatagcaggccctcagagatttgctgagaaaacacagcaaatacagttaaaatcagccttggagtttgtagcctaggaacccaggcttattacaatctgggcaaatgaactctgagtcttcattgaatttgagtaggtttcatcagcaagaaagctcacaacagttacacttctattcactaatttgaattcataagttactttagacatacttattatattccagttctctatcaggacctaatcttacatatgtgaaagttgggtattttggacagattttagccctgaaaccacaaattgtctaggataatttagtaatttaatgtagcaaaactgtgaataaagccagagggtgtctttctggctaagcaccctctttcttacttatactaaaatatccaacccgagtgtctgtatgaagaatgaaaagtgaaagttactatcttatggggatcagggtgtaccctgcccaacatttctttctgatttttataaatttctcactaaattccattatttttacttggttttgatataagacccatcctgtatattttgcatttccagtgatcatttccatgttcagatttttccttagttataaacaatagttggcatttttataacatttagtgatttcagagggccttcaattaattccgtatagtaggcattctgcccatttagcagatgagggaataaaaacaattcaaatgactcatagtaggccgacgcagaaagtatcagagtcctgctggaatccaatcctaacttctaggccatttttagtgtgttttccactacttaatccttgatttttgttacatcagagaatgtttgccaataacaaatatttggggacacttaaaaagataacactttaatatactgacgtctaatgttgctccatatagatagaatatatgttgataaaacactgaaaagtattctataaagaatgaattaagtatagaaaagattgctattaaatggtggtaatgaaaaaggaccctattactgagtttattcaattcagacttactcttggcaataagtttcaagaaaaggttttacaactttctgagttctagttatttctgtatttcttccatttaagaagaaaagcatacattgagtgaaggcaggtgggattcactttaaaaactgttaagttttccccacagcaggcatcctgggccggctgagattgaaacctcacccaggagtgccccagactgtggtcacccaagtcagattcttgacaaaaagggaaaacccttcgcctgaccccaccgctttgctcagtctcacaagtttcccctgctttcctccccgttgctgaaagcagcccctcccaagggaagcaggagcctggcctttgtgtggcagcccgcagggcctggcgctggtgggctggcggctgtcccttctactaagtacccactgccttcttcttcatttggtctaagcttcagtcttttgtcacagcccagtatatcactgtttagtggggaatttgggtcacagaaaggtgaagttttcttgtgagcacactttccctgcatttaaaaaagaaaaaagactccatgatttgttgctatttaaatttaagactgtcagaattatatctcagtagagctatgatttcacaaaaattggggggcataactgagctgaacaaagacctaaatggtatttacttagcgtttccctggccccactggacaggcccccctcctcacccctccagtttgcagtcactgcccgcatctaagggaaactttcattttgtcattgtttcgctcttaagtatacactcattttaatagttaaatatcaaacttcatgtgtttatttgatatttcagatcatgaatttttgttatttagagtatatacttgtgctgtgctaaacaaacaataaatagtataaatatcaaagttattaatttgcttttttaaagaaataatacagcttaccttctaagcattcaggattttaactgttggatacatgctgcttctcttttgtaaacttcaacgtcgttctgtttcctcatgaacaggtgctgctttcatgctcccatgtgttccacaaagtaagtccacccctcacgcctgcccaggtgctgcacatgtcgctctcacagtgcagagaaaccatagtcattttcaaggctcctaaggagagccatttattttattcatcaccaccatctatagttaaagaaacatgactgtaggctgcagtacaattcatcctattttgaaaatcatgagttttgtgacaaaagaaccacaaatgtttatgtaacagattgttgtcagtaatgcatgtcaaagtgacagctaaattcacatgatcgatctgcatgtggccccatacacacgcgtgactcacctttgtgctagtggatttcagaagtttttgatgtctctgcatgtatattcttgtaagaaatcatttttggaacaggttttgtgaggaaggtggtagcacctgatgaagcctcctcactttataacctaaattgggctaagtctcatagttatgggagaaaagaacactataattagaacactaacattggaagtaaaaacgttgtttataagtaattacttgtaaaattttaagtgaaatgtttttcttcaggcatgtcttcaggcttttgaaaagttcacaaataagaaaacctgtcctctctgtagaaagaaccagtatcaaacccgagtgatacacgatggggcccgcctgttcagaatcaagtgtgtgaccaggtgaggacgccaggcccgtttggcgctaagcagacacagatcaggctatgacaactaacttgttttttgaatagtgggattttatctctcttcttggccaccataatttccccagggccttgtacagcacagggcttataacaactactgaagtattggttgacatagagtcatcataaattagtcattttcaaatatctgtgttttagaatccaagcctactggagaggatgtgttgttagaaagtggtacagaaacctgaggaaaacagtacctcccacagatgccaagttaagaaaaaaattctttgaaaaaaaggtaggtaaagatcattatgttctccagatatggtctccgtgcgggtggttcacttggggtcaggaaggctaacagaggtggtaaaactttgagacttacttcactttgagggctttttaaaaatgggtgagatgctgctaaaaatcctgtttaactttagttggctttccaacctagatgttcaaatacttctagactttcttttctagttaaatcataaaattaggttaaatcaaagcaacttctgtttggccattttgtgctaattgtttaaataaacttatctcttcagacacaagactggaaaccagcttaatttttcccatctcctgggctatatgtaaatgaagacatctgctgcacatctcatagtaatgaaaatagaagctgcctataaaaataaagcccccacatgctaccattgtattgagtacctcgtggggtcatcacaatgagctttagagctaacttccatgtctacccttcctcttaaccactatttatgctttagttttacttttgggggacttatttaacaatttcccattccttgtccccatatgaaaaggacagtcctaccccatcagcctgtggcttcaggcaaacagcagcagctccgaggctgtcatatgaaagccatcacttcttcctggcagtgttggcctgagaagagctgtagcatttataatggcccagcacacagtaggtgctggaaattctgtatttattatcactattaactcctttcctagaatatggagatgagttactgtgtgttctgttcctgagagcagtgtctctgatcttcagagatcattcgtctcgggtgttcattctcaatttggtaaaggaccgccatgca

SEQ ID NO: 9655 - DNA, 513 bp, Homo sapiens
gatagcattgggagatatacctcatgccagatgacgtgttagtgggtgcagcgcaccagcatggcacatgtatacatatgtaactaacctgcacattgtgcacatgtaccctaaaacttaaagaataataataaagaaagaaaaaataaataaataaataaatatacaagtgtgagtagaaagttaaaggtaatacagaagattaagaaaaataaatggagagatggttttggtgaaggttaaaattgagaactaaattaaagatgaaccccatgccaccaatttctgctccttaggtttgttttagatgtcaaggactgtgttaagagagacaagagtcaaataggcactgagtaggctttgagaatattttgtacataacaaaggagaaatgtgagagcattaagatactaaaatgtgagaaggatattgaactaagaaccattctgaccctgcctaggctttcattagtgcagtgtttagagactaggcaggtgggcaaattcaaatatt

SEQ ID NO: 9656 - DNA, 2472 bp, Homo sapiens
tgacctttcaaaagttgatgaataataaaaaacaattcatatgttctctctgtctcttatactgtactttgtttcacaaatatttccacagttttcctggctcaatcattttaattgcaaaggcaagatttatatatcataaattattacattaagcagtagaaatcagaaatactgaggtgggaaatatgaactatccttgcataggaacagctggaataacctggtccaaaaatgtaataataaaaacaacaaccaaacatactgctctactgataattcagatttttttaagaaatctaatttttaagaaaaatcttgttcaacttgccagaagacaaaaatgatttgaaggttttaaaaagtgttcggttcattactggatttgagctggactcaatgtatctctactattattgttaaagcagaattatgtttaccacaaaactaaacagtttgcatgaccaataatgatttttaaaaaatgtttagctatgaaactcttatgtggttgtctcttgatatctagagaaagagaagggaaaaaattatatttatcaatgttgagacattagtttcattttacctaaaaaaaatttaaaagaaaaacagttacataggaattgttaaggagtttgtagaacactcactcccttcatatgcattgtagttgggtatcacttaaacatctcaactaagctggatttctactacagcggtctcctaagtcaatcaggaaaatgttagtttttttggttgctttaaatgaatgaatttctcctagcaaatagaagcaatatgattttaataaacagtgatgaagactctgggaaacccttacaatgtagggtaataacatctttctattaaaaacaataatgttataaacatttcaacatccaaatgatgggacatttcacatactcatgccttttgattattttcaaagatgcttcattacctaactcattcttgtcacagaattcttgtagctaaaagcaaaaatagactcaaattgaaagatttttaaaagataactacttggcagcaattataggtgtatatacccttgaagatacaaagacttaataataacacctgaagaatatttccctgccccctcccacacacacacacacacacacacacacacacacacacaaatactagggaagtgtgctcctcctcagatcctccagctgtgggcttcctaattaaaaaggctgagctgtttcctgctcaaaacacttcaaaagacctttttgttgttctccacttgacatatagttcgcagcacttgttcctcttacctgtccattcttatttatagagagctttcttgaatcagaaaccaagaagtgatgcagagaccattttattttataaagttgaaggacaataatatttatgttaaaaaaaaatccaagtagctgaattagcaactcagtaattttgctagactggcaaaaaggaacaatgcatgtggcatagtttttaaaacataaatttttatagcataatttaaaaacagtatttattactggctgatttttaaaataaatgggtattttcacttgctgtaaatgtgacatgttaaaatctatttttaaaaaaatactgagtttgatattcatgtttaaagttggagactgttgtaaaagtctgcctctgaatttgatatcttagacaaggaatatttaccttggtacaaatcaaatggatgagagatctaaacataaaatagtcaacagaatcgtcttttgtggattcaaaatagaaacggtacaagtagcaaacactgacaaatagccctttttaaaagcccaatctaaaaatcgacgtccacaaaagctttcttttccaagtatttgcctataaagttatttcaacacggctctgacaaatgcctgtgtgtcctgtcccatagggaaaggtgtgaacgcataacgttttgctctttgcaaaaaagggtcgttaattgtccgagagcagccaccgtttagggatgaagggagattaagtgatttttggccaatgcatctgccaattcccttcagggtagtcaagaatgggggccggcagccctgctgcagttggaaggtctgtccaaaaaaggccgttttggagaaagagggagagactgcgagtggccgactgcgcccccctcccagccctccggcccgggcgcctgagccgccgctcacctcggtgtcattgttgaggttccagaggtccaagcgccccatcccgtccacgcaggcaaaaagcgcaggatgcacgggggaccacatgacatcgtacacatagtctgcattgtcttcaaaggagtagagcggcttgttgtgctgtaaagcagagagaccgtgaagactttgtggcgctgctgctgcctcgggctgtctagagagcctaattaaaaactttgcacattcacaaagtgtcataaaacttcccgagatgaaagtcctcgag

SEQ ID NO: 9657 - DNA, 325 bp, Homo sapiens
gaaacttttttttttttttttttttttttgagacggagtctcgctctgtcgcccaggctggagtgcagtggcgcgatctcggctcattgcaagctccgcctcccgggttcacgccattctcctacctcagcctcccgagtagctgggactacaggtgcccgccaccaggcccgactacttttttttgtatttttagtagagatggggtttcaccgtgttagccaggatggtctcgatctcctgacctcgtgatccgcccgtcttggcctcccaaagtgctgggattacaggcgtgagccaccgcgcccggcctgaacaaactttt

SEQ ID NO: 9658 - DNA, 627 bp, Homo sapiens
  SITE (412): n equals a,t,g, or c
  SITE (591): n equals a,t,g, or c
gggctgcatttcatctggaggctctactggggaaaactccccttgcaaactcactcaggctgttggcagaattcatatctttgtgactgaatggctcagggccacagttttttttgcttgctggtggctgaaagctacctgaatttcctgactctgggggcttttttaatgagcccagtcacttctttagcgaggataatatctctaggtcatgccaacaagacagtgtcatgtatatacatgtgtgtgtgtctgtacatgggtatgtgtgcctgtctgtgtgtgaggaatcctagccacctttgccatcttttcttggttagaagtcagaggtgcttcacacactcaaaggcaagagttgatgcatgtgtgaattccggtgccaccgttggtctgtctgaacaccagcttncatgcttggatcacacctcggatgcacacgcttgaagatcatgtgccacagaagctcattagccaaccctttcaccaactctagtccatgcactacgcagccttcaagccacccttgaagggtccacaaagccacacagacaaggggagtcctgaaagtaaaaataccttatggaccanacaccccccaaaacaaaggcaaagcactggcttgag

SEQ ID NO: 9659 - DNA, 629 bp, Homo sapiens
gggctgcatttcatctggaggctctactggggaaaactccccttgcaaactcactcaggctgttggcagaattcatctctttgtggctgcatggctcagggccacagttttttttgctggctggtggctgaaagctacctgaatttcctgactctgtgggcttttttaatgtgcccagtagcttcttcagtgaggagaatttctctagttcatgccagcaagacagtgtcatgtatatacatgtatgtgtgtctgtacatgggtatgtgtgcctgtgtgtgtgtgtggtatcctagtcacctttgccatcttttcttggttagaagtcagaggtccttcacacactcaaaggcaagagttgatgcaggtgtgaatcccggtgccaccgttggtctgtctgcaacaccagcttccatgcttggatcacacctcggatgcacacgcttgaagatcatgtgccacagaagctcatttgccaaccctttcaccaactctggtccatgcactcggcagccttcaggccacccttgaaggttccacagagcctccacagacaggggagtccctgaaagtaaaaatacctcatggaccagacaccccccaaaacaaagcaaagccactgcctcgag

SEQ ID NO: 9660 - DNA, 209 bp, Homo sapiens
gggcgcagtggcgggcgcctgtagtcccagctacttggaaggctgaggcaggagaatggcgtgaacctgggaggcagagattgcagagcttgcagtgagccgaaatcgtgccactgcactccagcccaggcaacagagcaagactccgtctcaaaaaaaaacaaaaaaagacaaaaaaaaaaaaacagtgcgggatcagtagggcatgg

SEQ ID NO: 9661 - DNA, 107 bp, Homo sapiens
gtgtggacatagacaatagactggactggtgtggacgatggacagggttctgccgtctcctggggccctgagaggcacctactcatccagcccttgcagaccagcag

SEQ ID NO: 9662 - DNA, 2523 bp, Homo sapiens
agcttgcccaaggttatgtgtctattaaatggctgcgtctgtaaaattaaaatgctaactgtggccaccctgcttctctcactccccctagggctgctgtgatgagagcaaacacacccacaatgctggccacacagtaggatgtaataaatcgtggctattattactactttttaatacacacaatagccacagccagtctggaaggctgtagtggcaatggcccgagggcaaaaatccttggggccccttcttgcttggtctctcacttcaaaggctatgcacagtcagtcacaggaaacagaatcagagaaggactcacaacatcctggaggacgtgatgcctccaggacacaacagaggaccgtgcaccccagaatcaactactttgcctcatctgaccttccaaatagtcccaaacagaagggagcaggagatgatggccattggagagaagcctccagggctgaatggccccatgaatgggatgttgattctggaccagaatcaggccttgtttctgtgctcccattgggccccagtggcacagaccagcccttgtaggctctccacggctgggctggaataggcttttgatttcttcccactcctggctggaggacttgccggttaagctctgtggagtgtttactttttcaacaatggcagcaggctgaagaataggaaaaaacctggcccctttttctaacttagcaggccagggtccccttagtaaccaaaatgccccgagcaccaggctccaggcaggagctgggacggcacagtttcctcttgaaggacaatgctgccctcctggtggcaaggcctcttccaaaagggctggcgtggactcaagggccttcctgaagctcactgttcccaaggaaagaattggagcccagctcgctggacagtgcccggtcccccaaaggatcaaggcaactaggggaatgaagaaaggcaagaaaaactcaaactgggggtggggacaggaagcgcggatgagaagaaagccagaccgtcgccaggtgccggtgcctctcatcttaaccatgccatcagtcagggacactagcatctctgcatgggaaccaagtgggggcgcagagaggtcaaacaagctgcccaaagtcagagctaggaagcagcagtcaacttttgaacacagtcttattgcgggatctggccagcagcccgcaatgcaacggggctctctctttgttcccaggtggatcggcaggttgagaaataatagacacacacgagatagtgaaagctgggtccaggggggtcaccagcttctggtcctgcggtgccaacaatgcactggatataccagcatttattattaagtttagtgaaggcgggggtaggttagtgagggatttagggtcatttgattatgcggtgagatggtcacatggggatgaagtaattctttaacatagcatttgtatgtagaagtacagagcataactgagtggctcagtatatagagtacacagagataagaatttacaatatagtgtgtgcgtcagtaatttctaacagagccttaaaacagaaacacaatctttccgtaacctatgattagcaagctattaatcagcagtaacaattgcaacaaaagctggttacaaacaatccatggaaacaggacgtgaagctagacaaccagttagaccagaaattctcagaagggagtatgccctaaccctaaagaggcctagaagagccgtggcaagatgagggcatttatagccctatcttatccatatggacaggcgtccccccatgcgtccgtttataggctctccacaagggtcgtattccattcccagagctatgaacatcttggtgatgtgaaacctccctgactgcacgtccattcataggttctctgcatggggaagcacatcacacactgttggctcattttggcagtccaacctggcattgtctttacacaatcctgcatgcaattttgtatttacaataatcaggagcatttcatcttttattctgtagcaatagtttcagggggtctccctaaacagtctgaccccaaagctgactttcttctgaagatacccctaatccgatcgctcagacatcagaatgagtacctaactgttcaggacacacagttatatcaacatgctcagagactgctttctcttacataaaatactactttcctttttatcataaaaaataggatgggcatggtggctcacacctgtaatcccagcactttgggaggccgaagtgagcagatcaccagaggtcaggagttcgagaccagcctgaccaatggagaaaccccatctctactaaaaatacaaaattagccaggcatggtggtacatgcctgtaatcccagctactcgggaggctgaggtaggagaattacttgaacctgggaggtggaggttgcagtgagccgagattcagccattgcactccagcactccagcttggacaataagagtgaaactctgtctcaaaaaaaaaaaaaaaaaa

SEQ ID NO: 9663 - DNA, 2523 bp, Homo sapiens; identical to SEQ ID NO: 9662

SEQ ID NO: 9664 - DNA, 1454 bp, Homo sapiens
attgacttcaactctgctttgcaggaatgccttgagaaataagagggtaaatccatttgctgaaggatatcaccaaatacgtgaaatttctatctctccaacacactcctagttaatccactggattcttaattgagaaaaatgaccattcccaaagatagcttgattttatttagactattggctttcatagtatatgttttatggttttctacgaatattcactaccctcaataatctccacctacaataagctgcattgccaaagggtcctgccactgccaagtcatttgtttgtcctaaacttctttgttatattatttttacaaattcttaaaagaaataattgtcaataatcagttcttgagcatttactatgtgttttacataatagagatgatattaaatcagcatattttccattcccctgcaaatctctttgccttgaaaatcacatactctaacagtctcctaccattcatgctaagtaagaaaaatcaacccaggaaagaaagcacaaactacaacaaatcaatcttttgtcaactcaaagctgactctcttgagtccttagcaaatctaagtaaatagttttaaaagccaggatttgtgaaaacaaaatagtttttctgaattgtaatagctccctttacacatgttaaaatacaggcttatctagaccatggaaaatattatttgttctttttttttttttttttgagacagagtctcactctgtcgcccagcctggagtgcagtggcacgatcttggctcactgcaagctctgcctcccaggttcacaccattctcctgcctcagcctcccgagtagctgggactacaggcacctgccaccaggcccggctaattttttgtatttttagttgagacgatgtttcaccgtgttagccaggatggtctcgatctcctgacctcgtgattcccccacctcggcctcccaaggtgctggaattacaggcgtgagccaccacgcccggccaatttgttcattttcaagataatacctccattgattgctctattatgacaagcactgattgatataagtgttttgcatgtattcactcctttctaccttacaacaatctccatctcatttgttcactcgtgtgtcccaagctcctataacatggactgatagacagtggacaaaataaatatgtgctatgtgaataagcaactttatgaaatatatactggacagtatatatttctatgtacattttgcagataaataaacagaggcacagagcagttatgcttcatttccaagattttatactcagtagtaataactaagattcaggatagggaaagtgattctcctaaacttcaagtgaggtggtcaacgtcattagagccaaaacaactctagattctctaacttcaaacctatacataatttataggattttctgccaaataaaaataaa

SEQ ID NO: 9665 - DNA, 1454 bp, Homo sapiens; identical to SEQ ID NO: 9664

SEQ ID NO: 9666 - DNA, 1454 bp, Homo sapiens; identical to SEQ ID NO: 9664

SEQ ID NO: 9667 - DNA, 1733 bp, Homo sapiens
agtgcattggttgccatgtaaacagccagcttctggcaggaaagcagctggaccaggtgacctggctgtgacagagaacacagatattgaatccatgaaaccaagagtaatcagtacaacgattttttttcttttactttttaaaagtgtttgtcaatcctttaagttctttttgtctgactgctgtcattaagtaagaaaaatatgaaataaataagtctttgggtatgcaaaattgggaagatggacaggaattagtccctctatgcaatttcctctgaatctttcataatttctgtatcctcatcccttcaccctcaaccctccaacaccctctgttaccctgcaggcaactaggacagcatagagagcgtctcttgaacttgactttctcttccagtgcttgcctgccaatcccgtgacccatcctggagaacttttatagtcttcgacaatgcaatgcatagcaaccagttaataagataagacagtgactgtatagtgctccccaaagtgccatcacctaaaatagccctttggaaagtgctcatatagaactgagaattttagtgtagtggcaggctggatttgggtagggtgcccttcggtgggcctccaaatcctatggggagcttaattacttcatctttctgtaaggccaacagttctcaaaatttgtggtctcaggacaattttacactcttaaaaactgagggagatttctggtctggacatgtagtacagacctgtttttcattgttcctccctgctaagcacaagtataaaccctggaaataatgcaagagacaaccagggtagaactctggaaggttgtaaggagaaggcaaactggtttgagacccagggaaaaacaaagagcaagggtatcctatgtttcccacccagcagaagaaagaaacctagtcctggccattcctgatacccaactgaacaacagagggcagcccaggtaagcttactcctccctcagagtccctctgacaacatcaggtaggcccaacaccacaggtaaggggggatcttcagaaaccccaccaacaacagtggacaaaagaagcatttgccttctccccaggcctgagatgtcccactttcacctagagatatcgaggtgggagggtagaacagacacgaggcataaagtgatggcaagcggcccagtctgggaaggctctgtctcagtgggtgtatgactgtcctctcctacccatagagacaccaacagtgcagggcgccagtagaagtgtcccaccatacctaccccaactgagaggcacctggaagcctgacctagggaaacctttctgctccttcaggcgatatgatctgggacaaatgtcagcctcagtgatatccgataaaccaaacagagcaaaacaatactgaaaattaaactgctgttagaacaacagaccacaaaagtaagccaacacctgcttgcatgtgaagcataaataatgtgactgactgcaaaaataaaaaatgtaaatatgagtttcctaacatagtagacaaaatgttcaatcaaaaatcatctgtcataccaagaatcaagtaaatcacaacttgactgagaaaaggcaactactgccaacattaagatgagttcgatgttggaattatctgacaaggatttcaaagtagccatcataaaaatgcctcaacaatcaattaacattatcttaaaacaaataaagaaaaaaaaggaaact

SEQ ID NO: 9668 - DNA, 1734 bp, Homo sapiens
agtgcattggttgccatgtaaacagccagcttctggcaggaaagcagctggaccaggtgacctggctgtgacagagaacacagatattgaatccatgaaaccaagagtaatcagtacaacgattttttttcttttactttttaaaagtgtttgtcaatcctttaagttctttttgtctgactgctgtcattaagtaagaaaaatatgaaataaataagtctttgggtatgcaaaattgggaagatggacaggaattagtccctctatgcaatttcctctgaatctttcataatttctgtatcctcatcccttcaccctcaaccctccaacaccctctgttaccctgcaggcaactaggacagcatagagagcgtctcttgaacttgactttctcttccagtgcttgcctgccaatcccgtgacccatcctggagaacttttatagtcttcgacaatgcaatgcatagcaaccagttaataagataagacagtgactgtatagtgctccccaaagtgccatcacctaaaatagccctttggaaagtgctcatatagaactgagaattttagtgtagtggcaggctggatttgggtagggtgcccttcggtgggcctccaaatcctatggggagcttaattacttcatctttctgtaaggccaacagttctcaaaatttgtggtctcaggacaattttacactcttaaaaactgagggagatttctggtctggacatgtagtacagacctgtttttcattgttcctccctgctaagcacaagtataaaccctggaaataatgcaagagacaaccagggtagaactctggaaggttgtaaggagaaggcaaactggtttgagaccccagggaaaaacaaagagcaagggtatcctatgtttcccacccagcagaagaaagaaacctagtcctggccattcctgatacccaactgaacaacagagggcagcccaggtaagcttactcctccctcagagtccctctgacaacatcaggtaggcccaacaccacaggtaaggggggatcttcagaaaccccaccaacaacagtggacaaaagaagcatttgccttctccccaggcctgagatgtcccactttcacctagagatatcgaggtgggagggtagaacagacacgaggcataaagtgatggcaagcggcccagtctgggaaggctctgtctcagtgggtgtatgactgtcctctcctacccatagagacaccaacagtgcagggcgccagtagaagtgtcccaccatacctaccccaactgagaggcacctggaagcctgacctagggaaacctttctgctccttcaggcgatatgatctgggacaaatgtcagcctcagtgatatccgataaaccaaacagagcaaaacaatactgaaaattaaactgctgttagaacaacagaccacaaaagtaagccaacacctgcttgcatgtgaagcataaataatgtgactgactgcaaaaataaaaaatgtaaatatgagtttcctaacatagtagacaaaatgttcaatcaaaaatcatctgtcataccaagaatcaagtaaatcacaacttgactgagaaaaggcaactactgccaacattaagatgagttcgatgttggaattatctgacaaggatttcaaagtagccatcataaaaatgcctcaacaatcaattaacattatcttaaagcaaataaagaaaaaaaaggaaact

SEQ ID NO: 9669 - DNA, 118 bp, Homo sapiens
cctcagcctcctgagtagctgggattacaggcatgcaccaccacgcccggctaattttgtatttttggtagagacagggtttctccatgttggtcaggctggtcttgaactcccaacc

SEQ ID NO: 9670 - DNA, 433 bp, Homo sapiens
tatgctaagtgaagcaagccagacacagaaagacaaacaccacataatctcacttatatgtgagatctaaaagagttgaactcagaattagagtagaatggttaccagggactgtggcttggagggagtgggaaatggggagaagttgaccaaagggtacaaagttccagttagacaagaggaataagtttttaagacctattttgcagcatgctcaccatagttgataataatgtatgtgcatttcaaaactgctaaaagcataagattttagtctacacattgggtacagtgtacactgttcgggtaatgggggcaccaaaatctcagaaatcaccactaatgaacttatccacgtaaccaaacatcacctgttccccaaaaaagtattcaaaaaaataatagattttaaatgttcctgctatgaaaaaaa

SEQ ID NO: 9671 - DNA, 434 bp, Homo sapiens
tatgctaagtgaagcaaggccagacacagaaagacaaacaccacataatctcacttatatgtgagatctaaaagagttgaactcagaattagagtagaatggttaccagggactgtggcttggagggagtgggaaatggggagaagttgaccaaagggtacaaagttccagttagacaagaggaataagtttttaagacctattttgcagcatgctcaccatagttgataataatgtatgtgcatttcaaaactgctaaaagcataagattttagtctacacattgggtacagtgtacactgttcgggtaatgggggcaccaaaatctcagaaatcaccactaatgaacttatccacgtaaccaaacatcacctgttccccaaaaaagtattcaaaaaaataatagattttaaatgttcctgctatgaaaaaaa

SEQ ID NO: 9672 - DNA, 1240 bp, Homo sapiens
caattttgttccacagttgtttgaatcggtggatgcagaacccatgaatatggagagtcaatttcatttcataatgcccaaaggtaaatgcgtaactttttccgcacagctaatcttctagcaaccccattgctgtccatggcaagcaggcttagttaatctcgccctttccagtttcaggttcattaaaaaactcttgtcaaactctctttcatcccaccttattcttcattctcacttccatcagcatatcagtccaggccctagtaacattaatgttactaatggcactgttagtaatattacttaccagcattcaagtgggtctccctgatgccattgtctcccatcctgaaatcactgctctttatatagaacttgtatgatgtcattcattggctcaaaaacttttaaagccttcctttttctactaccccaatctaaatttctatgcctggcttttattaaaacccgtaatttggccccaccctagctatttaactttattttccactattcgccagtctcctccctcatcaacgagaagacataccataatcaacctcaccactaacccttggaatatctaaacttaaaaatggtccttcttttcccctttacttgtatttaaagaacctgacgaattattcctcctctgctaaacttttcacaatttcttcaacctcatttacttttcaagttttcagaacatatcttgccgtttattaggaatctcacaattaggcactctactgtagatagatttacaatcatgtatgttgtcatcttctattaaattccatactccttgaaggcaggagtcatgccttattctgtccctcagagtactcagaatgatgcagagcacacagaaagtactcaaatcttgttgactgatccagtgagaaattaccaacttcagttccagcctctctttaacatgtacatagtaatttgggtaagtcaagctccatcctgaaggacataataagggactctttaagcacattattatgaaggcccttcagggataacaccagagtgatgaggtgccctataccagggacaatggagacagagtacttgggattcatcactggagtcctcaaagcatcttccaagggcataataaggaaggactcaaacacctttgaatctccgtgagaccaggcatgaggtcttttgaaagagttctttaactggagtgaatgtcaaagagaagtataataaaataaaagac

SEQ ID NO: 9673 - DNA, 1195 bp, Homo sapiens
atatggagagtcaattgcatttcattatgcccaaaggtaaatgcataactttttccgcacagctaatcttctagcaaccccgttgctgtccatggcaagcaggttagttactctcgccctttcccgtttcaggttcattaaaaaactcttgtcaaaatctctttcatcccatcttattcttcattctcacttccatcagcatatcagtccaggccctagtaacattaatgttactaatggcactgttagtaacattacttaccagcattcaagtgggtcttcctgatgccattctctcccatcctgaaatcactgctgtttatatagaacttgtatgatgtcattcattggctcaaaaacttttaaagccttcctttttctaccaccccaatctaaatttcaatgcctggcttttattaaaacccataatttggccccaccctagctatttaactttattttccactattcgccagtctcctccctcatcaacgagaagacataccataatcaacctcaccactaacccttggaatatctaaacttaaaaatggtccttcctttcccctttacttgtatttaaagaacctgatgaattattcctcctctgctaaacttttcacaatttcttcaacctcatttatgtttcacattttcagaacatatcttgccgtttattaggaatctcacaattaggcactctcatgtagatagatttatgatcatgtatgttgtcatcttctattaaattccatactccttgaaggcaggagccatgccttattctgtcccccagagtactcagaatgatgcagagcacacagaaagtactcaaatcttgttgactgatccagtgagaaatgaccaacttcagttccagcctctctttaacatgtacatagcaatttgggcaagtcaagctccatcctgaaggacataataggggactctttaagcacattattatgaaggcccttcagggataacaccagagtgatgaggtgccctataccagggataatggagacagagtacttgggattcatcactggggtcctcaaagcatcttccaagggcataataaggaaggactcaaacacctttgaatctctgtgagaccagtcatgaggtcttttgaaagagttctttaactggagtgaatgtcaaagagaagtataataaaataaaagacctg

SEQ ID NO: 9674 - DNA, 43258 bp, Homo sapiens
tttcactttttttttttttttgagacggagtctagctctgtcgcccaggctggagtgcagtggcgcgatctcggctccctgcaagctccgcctcccgggttcacaccattctcctgcctcagcctccggagcagctgggactacaggcgctcgccaccacgcccggctaattttttgtatttttagtagagacggggtttcaccgtgttagctaggatggtctcgatctcccgacctcgtgatccacccgccttggcctcccaaagtgctgggattacaggcgtgagccaccgcgcccggccagtttaacttttaaagaaactgacaaagtggctgtatttccagcagcagtgtatgagcattcctgttcctttgtgttctcaccagtgtttagtatggtcagtcttttaaattttagctattctaataggcatgtagcagtatctcattgtggttttaatttacatttccctaatgaagaatgatgttgaacatctttcaatgtgcttacgtatcatccatctgtattctatggtgaaatgtctgttcagatctctacatttgtgttagactatttgttttcctattattgagtcctgagagttctttgtatgttttggatgacaaatgtatcttcaccagatatagttttgtaaatttttactcccagtctgtgatttgtctttttattctctcgatagtgtttttctttttctttctttctttttttttttttttttttttgacagagtctggctctgtcacccaggctggattgcagtggcaagatctcggctcactgcaatctccgcctcccgggttcacgccattctcctgcctcagcctctcccagtggctgggactacaggcgcccgccactactcccggctaatttttggtatttttggtagagaggggtttcatcgtggcctagatcgcctgacctcgtgatccacccgcctcggcctcccaaagtgctgggattacaagcgttagccaccgtgcctggcctctggatagtgtttttcacaggtcagattaatttgtatataaatcatttattttatttttattatgtaaaattttataatttttaattttatttttaatttcctttttaaaaggtaaataaaatattaagtgtaatgatgcaaaattgtgtttaaaagtaaatgtatatgaaagtgttgatatagactaaaacattgaataagtaagaaggtagttagttgtcacagtaggagtgaagtgcaaagcttcccctttcaccctctgaagattacccgaaatgaactgaccagacacagattcataaaagaaagggtatacaaacttacttcacctgcaaaaacatgagagctatacacaaagtataagacttgaagatggctcagatcttaaacgctctcctcataggcgatagatatatagacccaggatgcagacagtattttgtaaataatttcctttggaagctggatgggacagacaaattacgggaaggcgagagatggaactgcacaggaaaaaagtttgtctttgtcactttaatcttatcattactagagaatatttatgaatattttagaataatatatttttaagcccaaacctcaccaaatgttttttctaaaacaaatactttttgttgttgtttgtttgtttttgatactgtgtctcactctgtcacccaggtatggagtgcagtggtgcaaccatggctcactgcagccttgacctcctgggctcaagtgattctcctacctcagcctccaagtagctgggctacaagcatgcaccatcatgccctggtaattaaagaaaaaaaaatttttgttagagaccaagtctcattatgtcaccctggctagtcttgaactcctggaatgaactgatcctcatgccttggcttcccaaattattgggattataggtgtgagccacagtgcctgaccacatatttctatacttcactgaggaaaggaaggtgctaggaaaattggttaagaactattttttaaaaagctattagtagtgttttattttattttattttttaatgattgagttttgagattgggatctcactatgttgcccaggctggtttcacattcccaagtttaagcaatatccctgcctcagtctcccaagtagctgggatgacagatgtgtgtcaccatacccagctccattagtagcatttttaacaattgtgggccactgagaaagaataattttttttaaattaaaggttattttttaaaaagcacatttgtagaaaattactagcataatctgcctaaaataaatatacatattgaaaaaatgtttcctctgaacaaaaagaaatatattcaccacacatacacacatacacacacacgcacacatgcacacacgcacacacacacacattgtggaagatttcaagaccaggcaataatttccactcaatccaaaaacaatgcaatcccagagctgaatatttaggtgaaaaatatatcaggaatgggaggcattcaggtttaattttcatgttttgttagagttaggatgtgagttttcatttaaaaatattctttattttttttgctactattgtggtttctatattgttactatacaatctgtaaactaaatagtaaaggagagaaaagtgattttcaaagaagctggcttgggaacaggtactattctgggaagatgaaaggtttcacttaatgactggtacctgtgccactctggttattttaactgttaaccttttagcaagaggtttttcttttaaaagacatcctttaatatttgggaagctagtgcaatagtacacattgaggcccacataccacatgccaaatatttaaaaggcatatttctagctaaccactgtacatgcatatattttttctctcttattttcttattttagtttttttccttgtcaacaatttaattttaagtccacacatatcttctatcatcccactttgacaaataatattataccttcaaaatgatgtggaagactagaatggaatttagaaccgtagaaccttgtaattgtacaggcaagtttcttcctgggaaaaaataaaacaggaagaaaaggctgggcagcctctggttcaggaaggaaattcgggagtcccttatagcagcatctctagtacttgggaaccgaacagacttctcggcctgtgaggctggaatgggcccttctggagaacacgacagagaagttatctactgcctttgcccccagggcccaggcaacacttttaccctccattgcttgtttccgaagttaaggggaggagacaatgttttgtttagtgacctcgacagaaagggtgtcctcctgcaaccactcatttgttactttccttcttcctgaattgcctggacccactcctcctccatttgactggctccgtgcactgatgttatagtcaggagatttttgggaattgtggcttctaaaaatgtacactcaactctacccacagctggccctgtgaacctacacagctgttccactgtgtctccttctcaaagagacactcttcctgctgagtctctgccctctgctcctagatccaaatggcatctcctaccctatccctgtatggcttaacctagggaaactctttcccaaaggagtcaggtaaggagacggtggctgagcttcttacagacttaaaggagacatcctggaatttaggagtctgtccttcctttctgtctccctggcagctcctgctgctgctcaaagtttagctttgtctctcatccagctcagactgttgctggtcctgatggcctctgcttagctgtattagtatgttcttgcattgctataaagaaatacatgagaagtacctttagttggctcacggttccataggctatacaggaagcatggtggtttctgcttccggggaggcctcaggaaacttttactcaaggtgcagggcaaaaaaaaaaaaaaaaaaaaaaaaaaaaaaaagctaccagcactgcactgtgaggccctgatccctgagctaacttcatattattacctctacagtaagtgtccgtgagaacatagatatatttcttatgtgagtacacaatttacagaagaggaactaccctcccaaaccaaaacaaaatgtcataattttaatttaccagcaaacctaggttgcttctgtgaaatgatctcatttgctgagttttaaaattgactaaatttcccaatttccaaatgaaaatatttagttatcttgtcttgctatgtgtttttggttaatatgatgattaatttttggtctattacttaatatattccataattattgatatggattataaggactcaccaaatagttttcagatgtctttaatttttgtacttagtgcagatcctataaatggattaggagtattctattaactcccatgtattcagaaatcgaattggagtggtaaattctgtttgaggtaacaagggatatcaaaggaaaaaagtaattttgtgactatgtcttctatacatacatttttcaggcatctttatcaatggcttatactaaagacattttccggatcatgggtgacagacagaagacatgcggataagtggcattgtgtacactactgcattttatcatctggcttatttttcaacttttatttctcttaaggatgtttcattaaccggtgcatcaccaggttaacagtctctggaacactaaacttaccagaaaatacttgttgattgaattaacaagaaaacaacattagaaaacagtggtggctcgtttttatctgttgcagtatcttggagagtaaagcctaactctttaattttggccaaagatataaagaaatacctgagaaacacctttagttggctcacggttccgtaggctatacaggaagcatggtggtttctgcttctggggagtcctccaacacttactggcagggtaattttgaagaagtcatgataagatggttgttacaattaaatgaaataatcaaagtggaagagcttagttagctgtcttccctaaatgaatcactggcaagtaagagtgtgattgattttcctaccagtcaggactcaccccttgaagctataggagggtaaacctctgaagaccatacaatttagggaacactaacacctcaaaaaactctgtaaacttccttccttccttttcttccttccttccttccttccttccttccttccttccttccttcctccttccctccctctctctctctctctttctttcttttctttctttgttcatttttgagacagagtcttgctctgtcattcaggctagagtgtagtggctggattatggctcactgccgccttgaccttctgggctcaagcaatcctctcacctcagcctccctagtagctgggactattggcatgctcagctaattttttcctccttttctttttgtagagacagggtctcatcatcttgcccaggctggtcttggactccttggatcaagcaatcctgctgcctcagcctcccaaagtgctggattacaagcatgagccactgagcccagccttaagtttttttcatacaggaggaaagaatttgggaaagtagatgtgtgtgtgtgttggttagggagccaacacatttttctgcaaagcttgaattctgtgcctcagtttttcatttttgttatgtgcaaaataaaatcatatcctgctatagatttaaacctgtgagcagatcctactcaaaacctgattcaaactttgcgtagatctttgtctctctatggcataagaataaattcttctgatttccttccctcagaaaaatggacttagacttcccacaagccttccagaaagaactcgcctgcctcatctgcctgaattacctcatagaccccatcactataggctgcgggcacagtttctgtaggccctgcctctgcctttgctgggaagaagcacatattcctgccctgcatgcagggaactgtcacagcaggaagatttcaaccaatattcctctgaagaatctagtgtccattgccagaaaagccagtctctggcaattcctgagctctaatgaacaaatgtgtgggatccacagggagacaaagatgttctgtgatgtggacaagagcttgctctgttttctgtgttctaactctcaggaacactggggcacagaaacactggcccactgaaggggcagctaaggaacacagtgtaagtggtgactcagagcactttgaaagctggagggcagcacaggtaaagagattaggaggaagatgaagagcatgaggattaatctattctttaccgagtgtcatgtactgcctaggtatcagtgatataactgttatcctgctatcaaatctactgataagtggctcatttaacttatatgcactcatcacaatgcaagaaatcctctgactgctcctaccatcatgacccctagccatgatatgacttgtctccacactagcagaaactaatcgagtccctatattagggataagtggcctttatatatatatatatatatatataaaatttttatatgacatttaaaatataaataaatatttatacaatatatattatatacatatatatacatacatatatacatatatatctcacaatgccaaaaatgttttgtcttcgaaataatcacaatgcatctacaaccaggcgacaacactgaaaataaaattgtagcagtttgaataggggtaatgagttaattttttcctggggttcaaaaaaagaaacagcagcaaaaaatggtacttaagactgaaagttggccgggtgcagctgctcatgcctgtaatctcaacactttgggaggccaaggtggtggataacctgaggtcaggatttcgagaccagcctggccaacatggagaaacaacgtcattactaaaaatacaaaaattagctgggcatggtggcaggtgcctgtaatcccagctactcgggaggctgaggcaggagaatcacttgaacccaggaggcaaaggttgcagtgagccaagatcacgccattgcactgcagcctgggtgacaaaagcaaaactccatctcaaaaaaaaaaaaaaaaaagaaagttctgggttatgacacagaacatacgcaacatgaatatgtcatggttatgaatatatagactactcaagattgtgtatttttaaaataatagaatactaggttaaaaaattagcatcacagaatgaaaaataagccacaaactagcagaagataattgttaacacataaaaacaaaggattaaatacaatggtaatataatgatagctactcttacaaagttgtttctatgtctcaggtactattctgaacaacatacgtgcatcttgaatgcatgaagaattcctatataagaaaaacacaaacaacaacatttaaaatgagcaaaaaacccgaataggaatttcacagaagagaaaacataaatggcccataaacataataaaagatgctcgactacaattctaatcagggaaataaacattaaaaccccaaagagataccacttcatactctaggaaaaacctaaaaggctgtgaatatctagtttcattgaggaagaacaatgggaagactattcactgctggtgagggtgtagattggtacaactgctttggagaacagtttgatgccactcaatagagctgaacacacacatgcccaatgaccaagcaattccactccaggtacatactgtaaaaatactcctgcacatgtagaataggagacactgcataacaaagttcactagaacatgaggctgaggtgggaagatggcttgagaccaggagttcgaggctacaccagtagctgggactataagcatgtgccaccgtgcctggctaattttttgctgctgtggttgttgttagagatgaggtcttcctttattgaacaagctggtctccaactcctggcttcaagtgatattcccacttctgcctcccaaagtgctgggattacaggtgtgagccaccatgcccggccaagttctgcttcttaacctgaggtagatactttgatgtttcattttcctttattgtacagatatactttatattctcatatgtgacacaagtcaaaatttaaaaaaacaatttaacgtttattccctttagatgaatgatgggcaaatttacataatgaattcattactgaaacaatgtatagatttcagactaggaaagtaactatttataaaagaaaagcttaaaacgtgaaacagaaacaaaatcctgaaactgtaaaattgagtcaaactaaaatttaaaaaacaaagcaatgatataaagtatcatttgtccaaatgtgttctacaaaacgcttttttctgaaatatgtctgaggaaaaacaggttctaggagtaaaatatgtttgaaaaatgctgggttaaacaactgaacctatgaaggaaggaatagaacttctcaagctcttgactctggaattttttttacacggcaattaacaccatgcttcttcttggatttgtatttcagataaacacaatctgggaaacattttataatacagagggccacaccagattgaatattgcccccaggaatgaaatgaaaacaggaatggattctccagtaagaggtacccagatatcctaatcttcagtagctgacctaaaccctggacaagtgggatcaaaccccataaccaaatacaactttttaggaactaagtggataatcactctgtgttgtatgaacatgtgggcagtgtgtttcctacacagcttaaaagtgcaacaaaaaaagatctgggtgtcatataaagaatttctaccactgttagggtaatggtggactgacaggcagagggtcttagatgtgacttaagtaaagttcaatagaagcttccagcacagatattcatgttttgaattggaccgctcagttaaaaagtttttccattagacttcccctaatcaaattagaaattatctaattttctaataaagttttccccaggcacaaggaatctgtgaactggacctaaaaaattcttcataatgtgcttttattaccataaaagatgcacatttattttaaaaacttctctacaccactatcataaacatttgcacacacttatttcttttggaagctaacttctgagtggtaatgaaatatattcttaagaaaaaagtccgacacaatgcctttgcgtcttaaaacatgttaaaatattatttgaaaagagtaaaacatctgtcttttcagggtatcacagggcatcaaactggaaaatgtggcactgccaggagtttctacctggtgaaggttggcagacttttctcttcagagggctcttgacagggtagcatccattatcttgccaatttaccaaaacctaggcccaatcctcagtcttataggctcagaaatttatttttatcatcatcaatagggtagctacattgcttagaagcaaacaaaaataaccatgcttcaatagaaatcaggatatagatgtattagtacagaatgacaaatataactgtgacagaaataggaatgcctgtttatggtcatatactttcactacagccaaactcatacatgcagccaaataagaggcccctggatacacagggaatcggaataaaaaaagaagaactgaacatttaatagtcttctttcattcaatcaataattttttttaattaagcaactactatgtccaggtaaccttctaggtcctggggatacagaggtctctgcttacagaagtcatatgtaagtagcaggtgaagagtatgtgtttcacagaagtttattacaatatattaacaagagcaaaaaattttggaagcaatctaaatgttcaataatagagctccaattaaataacaataaatccaaataatgaaaaataatgcagccctttaagaataagcacttgcaagccgtaattcatgacatgggaaaattatcatgatggaaaaagaagcaagctatatatagtgcatgatcctatacacacacatacatacatacatatttcctatccctttatatgcataagaaaacaagcgggaggaaagtcatatctttagtcaaatcttgtttgctaacgtactattaatgattatcttttctttttctttatacctttttgcatttttcaatttcctaaaatagccttacatgccttttatcaccaggagaaaaattacttctaaagtaatttcagtcaacatgcatactaagaactcttcagatttatctgttagaagctgtgcatgaatgccagtccttgtatctgccttggaactcacagaagctcttttcccatggctttaagcaatactcaaatagactagcatacctgaatttcctagtcctatgtttttttcatccaacagccagtcttgtatttctagctgttttctaaacatttcaaccaaaccattttacagataactcatacagtcatcctttgatatgcatggggaattggttccaggatcccccttgtataccaaaatccatagatgctcaagttactggtataaaatagtgtagtatttgcatgtaacctacacacatcctcctatatactttaaatcatctctagattacttaataacacttaatacgatgtaaatgctatgtaaatagttggtataccatgttgttttttatttgtatcattttttatcattgtattattttttctgacaattttgttccacagttgtttgaatcagtggatgcagaacccatgaatatggagagtcaattgcatttcattatgcccaaaggtaaatgcataactttttccgcacagctaatcttctagcaaccccgttgctgtccatggcaagcaggttagttactctcgccctttcccgtttcaggttcattaaaaaactcttgtcaaaatctctttcatcccatcttattcttcattctcacttccatcagcatatcagtccaggccctagtaacattaatgttactaatggcactgttagtaacattacttaccagcattcaagtgggtcttcctgatgccattctctcccatcctgaaatcactgctgtttatatagaacttgtatgatgtcattcattggctcaaaaacttttaaagccttcctttttctaccaccccaatctaaatttcaatgcctggcttttattaaaacccataatttggccccaccctagctatttaactttattttccactattcgccagtctcctccctcatcaacgagaagacataccataatcaacctcaccactaacccttggaatatctaaacttaaaaatggtccttcctttcccctttacttgtatttaaagaacctgatgaattattcctcctctgctaaacttttcacaatttcttcaacctcatttatgtttcacattttcagaacatatcttgccgtttattaggaatctcacaattaggcactctcatgtagatagatttatgatcatgtatgttgtcatcttctattaaattccatactccttgaaggcaggagccatgccttattctgtcccccagagtactcagaatgatgcagagcacacagaaagtactcaaatcttgttgactgatccagtgagaaatgaccaacttcagttccagcctctctttaacatgtacatagcaatttgggcaagtcaagctccatcctgaaggacataataggggactctttaagcacattattatgaaggcccttcagggataacaccagagtgatgaggtgccctataccagggataatggagacagagtacttgggattcatcactggggtcctcaaagcatcttccaagggcataataaggaaggactcaaacacctttgaatctctgtgagaccagtcatgaggtcttttgaaagagttctttaactggagtgaatgtcaaagagaagtataataaaataaaagacctgagtagggtcctccttgttcataaaatgacactacctaaatcaccaaatctcactgagccttggtttaactcaagaggttccatgccactataagaggtggtaactgccaactgacaggaaatattttcatatgcatagtcatagtgccccatatttatgaacttcttaagagtcttcaaaaagctttctatatacattatcctttactttctaactttcctaaatacaaggtgagagagacacaagtgttctatcaaaacagaatcttggccgggcacagtgactcatgcctataatcccagcactttgggaggcagaagtgggtggctcacttgaggtcaggagttggagaccaacatggccaacatggcaaaactccatctctactacaaatacaaaaaattagccaggtgtggtggcaggtgcctgtaattccagctacttgggaggctgaggtaggagaattgcttgaacccaggaggcagaggttgcagtgagcagagatcacaccactgcactccagtctgggcaacaagagcaaaacttcatctcaaaagaaaaaaaataaataaagacttttgcaaggaccatgtcccacccagaatggtgcctgcctttctacagttttcaggaagaggaaacattttctgctgctcttgctgaggttttttttaaccacccattaggaacgtatagatttcagaatcgaacactgggattccctcagcactaaaggaggaaaattgcaaacagagctgaaagtgcaatgtggaaaggtcaggctgaggaaggttcttagccagtagaccaagggcagaaaggacactgcctcctcagtctcccactagggaacttgctattcttgtcccctgacctcagaattccttgtcatgtttgttttgtctccaagggaacggtttgaattacacaatttaaggctagagtgggcctcctgcagttaacattaacactctctctccttcgctggccaaggtgaagtctgggaccatgaagttctgacgtccactctctcgggggatcaccagttcacccacctcacccggcaagctgggccctagtttggcgacaggcatcttccacccacctgggaggcagggttcaatactctgcctctgaccttgtttccttcttctgccacctgcttaggcagccagaaggggttgtccagccagcacctgggctttggtgctcctcaagaaggtggaggaagtttcaggcacctggctcctcaggtgtctgccatccagctgctcttcaggcctgcccagcagagctctcttgatccagctagaactggccagaactgactcactcaggaatgtgtagactttggcatcaggggctgctttaatttgcacaatttccaaatacctcttttttcttctttttctgatgagtcatctccctagacttgcattttaaagagatagatagttatcaggttccagagaagacatggtagaacatttatatctcaaagacacagagctgagacttcaggtttagatactataattgcctaaaccaaaaaggaaggtgtaggtaaagttctagtcaagacaggatggccaggaaaaacaccttaaaccaagggatggcttgctttgcagatttaagccaatggcttctttatcataagacttcccagtgatttagtcctccctctcttccagtgcacagagacatacccctccttacaaataaaaatgttctttatagatgtaaacttattttacaaaaatgtttcaaaataaccagatgaaaatcatccttatgccagaaagacttcttttttttttcattactagaaatgaaacagtaagtattggttgtattgacatacttaggcttagacctatgtttaacaagaaagcctaataatagcactgtggttagactgtagcctatttttccaaaccatcattttattattaaggaaagaaaggatcaaatacctttcattcatctgatatgatcctttaaaacacattccactaataagtcccatttggaacagctgaaaatcttttaataaaactttttaaagatgagctcatggcttagtgtatatttcacaagcttaattaggtcaaatggaaggaactcagatgagtagttgcccaatcagagcccattagttgtaagtcatcagcccccttcatgaccttaaaactccactctgacctaattattgcaaacctatatacaacaaagtgaaaggattaattttcattcatcaacctctcaaacccagattttcaaagaaaaaacctatgtaaggaatacttaccgaaaccagacaggaaaattagagcctgcatacttaagagtcaaacttgttccactacagccaggtggcatacaattacaccatttggttcttcatacactctggaactgaccaggacagagtttagcatagaaaaactgtaagaaataggttccaaaacatagaaattgcaaagtccaaaaggctatgaaaaaaactaatgtaaatgagagactcccctccctttgttttaaagaaatagacccatcagagaaatgcaaatcaaaaccacaatgagataccatctcacaccagttagaatggcgatcattaaaaagtcaggaaacaacaggtgctggagaggatgtggagaaataggaacactttcacactgttggtgggactgtaaactagttcaaccattgtggaagtcagtgtggcgattcctcagggatctagaactagaaataccatttgacccagccatcccactactgggtatatacccaaaggactataaatcatgctgctataaagacacatgcacacgtatgtttattgtggcactattcacaatagcaaagacttggaaccaacccaaatgtccaaaaatgatagactggatgaagaaaatgtggcacatatacaccatggaatactatgcatccataaaaaatgatgagttcatgtcctttgtagggacatggatgaagctggaaaccatcattctcagcaaactatcgcaaggacaaaaaaccaaacaccacatgttctcactcgtaggtgggaattgaacaatgagaacacttggactcaggaagaggaacatcacacaccggggccagttgtggggtggggggaggggggagcgatagcattaggagatatgcctaatatgaatgatgagttaatgggtgcagaacaccaacatggcacatgtatacatatgcaacaaacctgcacattgtgcatgtgtaccctagaacttaaagtataataaaaaaatatatatataaaaatttaaaaaagaaagaaatagatgttctgtaaaaatatacacaatttttacagacaaatacatttataagttgtttttatcttaaaaattggggatatttcatatttataactaattattgagccttaagttttcttggccatttctaggctaataaactaagaattatgtaaactaagccaaagtagaatagacataaaagtcctgaacacttcaacttcctattcttcaagaagtatacccggcaaagctcatttgagagaggaaaagctttcctccaccctctgttttacagcgctgaggcttctcatcacagttctatgacttgtagcttaaatccgtgttacatggtcactggcgttgttagtgcttctcttttaacactgtaggaattaatcaattcggtagcatatttaattaattctatcactagcctggctactggccacccttctcttctcaaccaggaaattaagtcagaaaggcttattttcccttagtaagactttggggacatagcaaagttcatgacaataagaaagaagtggcagcaagcgtttgaaaagagtggtttcagtcaactgaggggttcccatgggagaagcaggatcaaagagagagagagagaaagaacagggagggctaattagattagttcatagttgtcccaagagcgacgcctttgggggcttcccttaggggggaaagagtccaggccaaagggatgacccgtgagatggctgctgtaaaagtggactattctttttccagtggcctggctatttgcaaaaaaggcagacatcttagggcacaggggtgtttagtttgcatgcacaagtagaagtactcccaatccctgcagttgttgtaactgggaggacatgcacctgtttacctttgtaagtgtttccccactgtcaccactgtaattctaggttatctttagggaggccaaacttatctatctactgaacccagtccagttgccatctgatcatcagactgagtgacctcttacgtcgatccaatacagttcaccaatcaaatccaatttgatgctggactgagtcaagtttttaccaatgactcatcagctacccaaacctcaaaaggccatatgtcatctcacagcacaaactggccactggcacccaccccaaggttatttgccctctcatagcacaaaaccctggattcgaaacccaaaaggatcaaggttcaatgcaaaaacagcagagtctggcctaagaggaatgtacaacctcagaaggagggcaaaggggccagcagtgtctttcctgaattcctcaaggggtcttgggaggtggatcccatccagcttgccagaactctcaaaagacaaaattacaacaaatttactttaaactaaataaattaaataaaataaataaatgaaacttagcttttatttattatttcagaatcaacttcgaaacccagtctggataaaaaaataaaaataaaaacccttacaaaggtaaacaaatgcatagctcaaaacacaaatccttggagcttcaaaatttgagagagaacttgcccaggacccctgctgctgtgagagatctgtgtgcacaatggacctggtgggtcgctgtgcttgggcactccatgcttctggggtttgatggacgttctacttcagattgcatttcctacactaatctgttaaaaaaaaccctttacatacgctaaatttagcagagtttatttgagcaaagaaaccgtttaggaatcaggcagcagtttgcaccaaaaatggctcagaacactccatgccaccatttgtgcaggttacatttacagctagagaaaaagaagtgcacagaaacagcctgattggctgctgttggcatttacctcatatagtcatgttttggcagctttcagcctctgattggctgaagcctcagctgttttcattggctaagacatagttacatgttataagactatagtcttgggttaagttacagttatttttacacattaagttaggttacaactagctatgtatacagaactcattaggccaaacttaaaataagtatggaggctgctttaggacacctgtatgagcgaagtatgccagagtggcagagtgctacatacatatgtgtaaatttctatattaaatatatttatgtatgttacctatatatttatatgctcataaatatatatttccttgaatagtcagctatgttctctatttctaaatttataaatatgcatatttatgtgtgtgtgtatatgtatatatatatgtatatttaatttttatgtgtttgcttctgccttatttgtaaggtagcccaaaatggcagagagattacatatgtatgctataaatgtttatagtatatatttatgtttatgtatatatttaaatgttgcatagttttttttttcaagaatttgaaaaagtttctaaattgaggaaaaatttatgtaagattaagctctttaaagtgtatcattcactgacatttaggacattcttaacactctctagttccagaattttttttcttttttgagtggggtctcattctgtcccttaggctggagtgcagtggtgagattttgactcactgcaatctccacctcccaggctcaaacaatcttcccacctcagccttctgaatagctgggaccacaggcacatgtgccacaacgcccagctaattcttcgtattttttttggtaaacacggagtttcaccatgttgcccaggctggtcttgaactcctgagctcaggcgatccacctgccttggtctcccaaagtgccgggagtttttatagttcgaggtcttacatttaagtctttaatccctcttgagttactttttgtatatggtgataagtaggggtccagtttcattctggcatctacatagccagttatcctagaatcatttattgaataggaagtccttttcctattgcttatttttgtcacctttgccaaagatcagttagctgtagatgtgtggctttatttctgggttctttatcctgttctaatggtctatgtgtctgtttttgtacaaacaccatgctgttttggttactgtagccttatagtatagtttgaagtgaggtagtgtgatgcctcctgctttgttctttttgcttaggattgctttggtgatttgtgctctttttgagttctttataaattttagaataggtttttttttctaattctgtgaaaaatgacattggtagtttgataggaataacactgaatctggggattgcttttgatagtatatggcaattttaacaatattgattcttcctattcttgagcatggaatgtttttccatttgtttgggtcagctctgatttctttcagcagtgctttgtaattattgttttcttgttgtagagatctttcacctccctggttcccttcattccttggtatttttgtgtgtgtatgtgtctattgtgaattaaattgcattcttgatttggcactcagcttggatattgttggtgtatagaaatactgctgatttatgtaccttgatgttgtatcctgaaactttgctgaagttgtttattagatctaggagcttttaggcagagactatggggttttctaggtataaaatcatgttatctgcaaacagagatagtttgacttcctgtcttcctatttggatgctttaacttctttctcttgcctgattgctctggctaggatttctagtactgtgttgaataggagtgatggcagtgggtatccttgtcttgttccagttctcaagtggaatgagcccagcttctgcctgttcagtgtgatgttggctgtgggtttgtcataaatggctcttattattttgaggtatgttccttcaatacctagtttattaagggtttttaacataaagggatgttgaattttatcaaaagtcttttctgtatctattgagatgatcatgtggtttttgtttttagttctgtttatgtgataagtcacatttattgatttgcatatgttgaaccaaccttgcttgtttatcccagggataaaccctgcttgattaaggtggattagctttttgatgtgctggtagattcagtttgctagtattttgttaaggatttttgcatctgtgttcatcaaggatattggcctgtagttttttctttgttgtgtctctgccaggctttggtatcagaatgatgcttgcctcatagaatgagttagtgaggagtctctgctcctcaattgtttggaatagtttcaagtagggatagcagcagctcttctttatacgtctggtagaatttggctgtgaattcatctgatcctgggctttttcttgctcaaaatcataaaattagatggaaactattttattactgattcaatttcagaactcattattagtctgttcagggtttcagtttcttcctggttcaattttgggcagctgtgttttcaggaatttttccacattttgtaggttttccagtttgtgtgtctagaggtgttcataatggtctcagagtcttttgtatttctgtagggtcattgataatgtttcctttgtcaattttgattgtgtttatttggatattctctctttcttctgctgtttgtctagttagtgttctatctatcttatttagtctttaaaaaacttgtggtttattgatcttctgtatgttttttcatgcctcactttatttcagttcagctctgattttggttatttcttgccttcttctagttttatggttggtttgatcttgttttcctagttcttcttctaggtgtgatgctatgttgttaattggagatctttctaactttttgatgtgagcttttaatgctataaactttccccttaacactgctttagctgtgtcacagagattctggtatgtcttatctttttttctttggttttgaagcttatttctgccttaatttcattatttacctagcagtcattcaagagcaggttgttcaatttccatgtaattttatggttttgagcaatcttcttcgtattcccttctatttttattgtgctgtggtttgagagcataattggtatgatttcaatttttaaaaatttgttgagaattgttttttgtctgattatgtggtcggttttagagtatgcaccatgtggtgatgagaagaatatatattctgttgttttggggtggagaattttgtagatgtctgttagttccatttggtcaagtgttgagttcaggtcccacttatattttttagttttctgcctcgatgatctgtctaatactgtcagtggagtgttgaagtctcccactatgattgtgtgggaatttaagtctcctcacaggtctctaagaatttgtttttatgaatctgggtgctccctggtgctccctgggtacacacataattcttgtgttggatgcatatatatttagaagagttaagtcttcttgttgaattgaacactttacccttatgtaatgcccttctttgtagttttttgattgttgttgacttaaagtctgttttgtttgaaattagaataacagcccctgctatttttttgtttgttttgtttttgttttctgtttgcttggtaagttttcctccatcctattactttgagcctatctgtgtcattgcatttgtgagatgggtctcttgaagatggcatacagttgggtcttgtttgtttgtttgttttaattttttgagactgatctgtctctttcacccatgctggaatgcagtggcacaattatggcttcctgcagcctcaacctcttgagttcaggtgatctttacacttcaaattctggagtagctgggactacaagcgcatgccaccatgtctgactaattttacattttttatagagatgaggttttcccatgttgcccaggctggtctcgaacacctgggcttaagcgatctgcccaccttggtctcacaaagtgctgggattacagacatgagccactgcacccaagtgggtcttgcttctttattcaatgtgccactctgtgcatttcaattgggacatttagcccatttactttcaaagttaaaaattctatgtacagaattgatcctgtccttatatttttttcagctggttattatgcagactagatttgattttgtagttgctttatagtgttaatggtctatgtacttaagtgtgtttttatggtggttggtaatggtcttttgttctcatatttattttattttattttgagacaggatctcactctgctgcccaggcagagtacagtggtatgatgtgggctgattgcaacctctgcttcctggactcaagccatcctcctgccttggtctcctgagtgggtgggaccacaggcgcataacaccattcctagctaatttttatattttttgtagagacggggtttcaccatgttgcccagtctggttttgaactcctgggctcaagtgatccacctgcctcagcctcccgaagtgctgggattacaggcgtgagccactgcgcctggcttgtttctatatttaacactcccttagagacctcttttaaggcaggtctggtggtgataaattcccttaacatttgcttgtctgaaaagtatcttctcctttgcttatgaagtttgtttgaccgtgtatgaaattcttggcctcctcggcattgcaccatcaagacaaagttgtcctccaacttctcatcctgcattgctgccattgcagctctcagaactaaaaaggcggcttcagactcctccaaagaacaagtggccaattcgagggaatcctccccgtcaccaaaagaagtaaacgacagtccgagagccgccaccaagtctcctgaatcccagaatctcatcgatgggacaaaaaaaccatccctaaagcaaccagacagtcccagaaacatctcaagtgacaacagcagcaagggaaccccgtcctctcctgcaggatccacaacagcaatccccaaagtccgcataaaaaccattaagacatcttctggggaaatcaagagaacagagaccagggtattgccagaagtggatcttgactctgggaagaaaccttccgagcagatggtgtctgtgatggcctctgtgacatcccttctgtcatctccagcatcagccgctgccctttcctctccccccagggtgcctctccagtctgcagtggtgaccaatgcagttttccctgcagagcccacccctaaacaggtcacaatcaagcctgtggctactgctttcctcccagtgtctgctgtgaagacagcaggatcccaagtcattaatttgaagcttgctaacaacaccacggtgaaagccacggtcatacctgctgcctctgtccagagtgccagcggcatcatcattaaagctgccaatgctatacaggagcaagctgtcatgatgccagcatccagcctggccaatgccaaacttgtgccaaagactgtgcaccttgccaaccttaaccttctggcttagggtgcccaggccacctctgaactccaccaagtgctaaccaaaactcagcaacaaataaagaaggcactaatcaatgcagcagcctcacaaccccccaaaaaggtgtctcgagtccaggtggtgtcgtccttgcagaattctgtggtggaaactttcaacaaggtgctgagcagtgtcaatccagtccctgtttacatcctaaacctcagtcctcctgccaatgcagggatcacattactgatgcatgggtacaagtgcttggagtgtagggactcctttgcacttgaagagtctgacccagcactacaacagatggagcatgtgcatcgaagtaacgtgcaaccattgtacaaagaacctcattgtttacaacaaatgcaacctcctttcccaagcccgtgggcataaggagaagggggtggtaatgcaatgttcctactcaattttaaagccagtctcagcaggtcatatcatagtttctccatcgagcaatagttcttcttcatcttccactcttcagagccctgtgggaactggcatacacactgtcacaaaaattcagtctggcataactgggacagtcatatcggctccttcaagcactcccagcaccacagccatgcccctagatgaagacccctccaaactgtgtagacataatctaaaatgtttgaagtgtaatgaaatcttccaggacaagagatccctggctacacatttccagcaggctgcagatatgagtggacaaaagacttgtactatctgccagatgctgcttcctaaccagtgcagagaatccatcagcacaaatctccctacacctgccctgagtgcagggccatctgcaggttggtgcacttccagacccatgtcaccaagaactgtctacactacacaaggagagttggtttttgacgtgtacattgcaatgttgtgtactctgatgtggctgctctgaagtctcgcattcaaggttctcactgtgaagtcttctacaagtgtcctatttgtccaatggtgtttaagtccgccccaagcacttaacacagcatcctggcatcaagataggagaaccaaaaataatatataagtgttccatgtgcaacgctgtgttcaccctgcaagccttgctgtatcgccactttgactaacatattgaaaaccagaagatatctgttttcaagtgtctggactgttctcttttatacgtacagaagcaacttatgatggaccatatcaagtctatgcatgggacattgaaaagtattgaagggccaacttgggtgtaaacttgcttttgagctttaagcctgcaacttataattcagcatatcagaaaaaagaggacagcaaatccatgagtgggaaagagaaactggaaaagaaatctccatctcctttgaaaaaaaatcaatggaaaccaagaaagtggccagtcctgggtggacgtgttgggagtgtgaccacctgttcatgcagagagatgtgtacatatcccacctgaggaaggagcatgggaagcaaatgaagaaacacccctgccgccagtgtgacaagcctttcagctcatcccacagactgtgctggcacaaccggatcaagcacaaaggcatcaggaaagtgtatgcctgctcacactgcccagactccacaggtacttttaccaaagggttgatgctggagaagcatgtccagctgatgcatggcatcaaggaccttgacctgaaagaaatgacagacgccaccaatgaggaggaaacagaaataaaagtagacgtcaaggtccgcagtcccaagtggaagttgaaagaaccggttctggagtacaggcctcccagaggagcaataactcaaccactgaaaaagctgaaaatcaatgtttttaaggttcacaagtgtgccttgtgttgcttcaccaccgaaaacctgctgcagttccacgaacacatccctcagcacaaataggatggttcttcctaccagtgccgggagtgtggcctctgctacatgtctcacgtctctctgtccaggcacctctttgttgtacacaagttaaaggaacctcagccagtgcccaagcaaaatggggctggcgaagataaccaacaggagaacaaacccagccacgaggacgaatctcccaatggcgtcatgtcagacagaaagtgcaaagtgtgtgcaaaaacttttgaaactaaagctgccttaaacactcacatgcagacacatggtatggccttcatcaaatccaaaaggatgagctcagacgagaaatagtcacagacgctccatgaggaaaatccctgtccacattgggataaaaaagacacttttgttacactaagtttgcagtataatagagttaacagtactgtctaggctgttgctatatattctctttcaatgtgccttccttcttcatcttgtcatatatatcctcattaagtattaaaacagaatttgagtttaaaagagtttgtatatatttaagtgaataactttttatactctttgttacatgtttgtatcagtattcagtggaaaacgttttgagttgttttgggttagaatttttctttttgtcctgtttctttaaaacagagttcttaggaacaggggcagttcctgaattcaaataaatcattttgtatgtttcaaatttgaatggcttaactaattacaggctaaaataatgccttttttagtgtttttaatttttaaaattcactacataaattggaagtaattgtgggtctcaaaaacactaggaacttctaaatgtcttagcaccttctggatgtgcctgccccgagggagtgagtgcacgtttgagacaactgcactccagcgtgggcgcgcctttgtcttcaggccacgccgaagggtgtttaaagcagccttgcaggtcgctcctttcccagccgcggataaaaactgaagccaggaatctaataaggaatgctgatttcctcaattccattttgaggaatggggaaggttattctaaagaaaaaaagaatgggactggttttctgggcagatctgcaaggctggctttaggagcacaaggagggaaagtaacaaaacggctggactactataaaagttacaaatacgtagttagaccaatagatctacatagtcaggtttttgtcatgtaatttattaactattacagaaacacaactaagaatatcaagtatttctctggctcttgatagaaaaaaaaatcagctgacttaatcctttgttttcaaaagagttggcgtttcctgttctgggtgttactgccaaacgttctggtgcttagagttgggatgcacgacgtcaaccaccgacttatcaatgcagccggctgtgtatcgcaattggccgttaccttaagcactgagccacatgggattagttcagccatttcaagaggtatatttaatgttggtagttctgctttactaaaatgcagtagaggtactcttctgtcccttctgtttatagttctctgagagagttatattttttggtttcgtcttgtgttttcttttgcatcttatatcttgtatttatccctgaacatgttttgtacttttttttttaagaaaaggaattcttttgtgtatatatgtaggtacttgcatgatatactgtagtcaatgttcagttcctcgaaaggtcttgctgctgtcaggtgttatacactccatccatcataactgtatgaaacacatttcatatgtaaataaacgtgggacatttgaaaaaattttttgttctatgtagttgaaaatcattggctaagttcattataacctcctttctgcatcttaccctcatccacactcttacagcctttcattaattgtaaattcttatgtctatattttccatatctacttagtactactttttggaatgaatcttttatgccctgctctggtcaataatcttgggtgaaatgagaacacaaagccagagagaccaggtttctgtagttctctaacatcagattttaatacaaattctgctgtgcagtgcccaggcattgccacccctctggagagaattctatggctacatccctgaatgtcaaccgttccatttctaggcttgcagcaggctctggtgtcttagctatggatctcccaatacctgctggtcacagggccatagagactgggcttctaggaacagaagacacagagcagtgaacagtagccagtttcattctgcctatggataggcagttatcccagcactatttattgaatagagagttctttccctattgcttatttttgtcagcttcatggatgttcacttggttgtaggtgtgtgactttatttctaggttctctattctgtcccactggtctatgtatctgtttttgtaccagtactgtagtgttttggttatgtagccttgcaatatagtttaaagttggatagtgtgatgtctctggcttcttttttctttttctttttttttttttggcttaggattgctttggtgattcctgctcattttttcattccatatggattttagagtagttttttttcctaattctgtgaaaaacaacattggtaatttaataggaatagtgttaaatctagagattgctttgggtggtatggccattttaatgatactcattcttcccatccacgaacatggaatgtttttccatttgtttgtgtcatctgtgattttattcagcagaaatttttgttattcttgtggagttctttcacctccttggttagatatattcctaggtattttttttgtgtggtcattataaatgggatagcattcttgatttggctctcagcttggacgtttttggtgtatacaactgctactgacttttgtacattgattatatattctgaaattttactgaagttatgtattagttgttggaatttttggtagtcttttaagtttttctaggtattgagtaatatcatctatgaagagagataatttgacttattcttttcctatttgaatttcctctttttctttctcttgcataactgctatgctatgactaccagtactatgttgagccagaatagtgagaatgggcaaccttgtcttgttctgattcttaaggggaatgaatccagcttttgccagttcagtatgagcttggctgtgaatttgtcatagataactcattattttgaggtatactcctttgatgtctaatttgttgagggttttttatcatgaggagatgttgggtttcatttaaaactttttctgcatctattgatgatcatgaagtttttacttgtgtttgtgttttttgtaaattttgtttatttgttgaatcacatttatttatttgcatatgttgaaccaaccttgcctcccatgaataaagcctattcaatcatggtgaattaactttttgatgtgtcgctggattcagtttgctagtattttgttgaggatttttgtgtctgttcatcaggaatattggcctgtagtttcctttttttgttgtgcttgtgtcagattttggtatcaggatgatgctggttttatagaatgagttagggaggagttccttctcctcattttttggggaatgtttcagtgggattggcaccagctcttctttgcacgtctggcagaatttggctgtgaactaattggtctaggacatttcttggttagtaggttttttattactggtttatatttttcaaacttgctattggtctgttcaggatctcaatttcttcctaattcttccttggaaggttttgtgtttctaggaatttattcatttcctctagatttctagtttgtgtgcacagaggtgttcataatggtctctgaggctcttttgtattaccgtgggtatcagttctgattgtatttatttgaatcttctttctttgttagtttacctagcattctatcaatctcacgtattctttgaaagaaccaactttcaatttcattaatcttttatatggctttttgggtctcaattttatttctgctgtgatttttgttatttattttattctggtagctttgtattagtttgttcttgtttttttaggtcctttaggtgtgatgttagattgataatttggtatctttctagctttttgaggtaggcaaaccatttaagcactataaactttcttcttaatattgctttttctacattccagagattttggtaaattgtgtctctgttttcatttactttaaataattatttgatttctgctttaattttgttaactcaaaagttattaagaaacaagttctttagttttccattttattgtgtgattttgaagtatcttcttgatattgccttctatttttattcttcgtggcccaaaaatatgcttggtgttgtttcttcattaaaaaaagttattgagacttgctttatggccaaatatgtggttgatcttagagtatatgccatgtgcaaatgaaaagaatgtatcttatgtggttgttgggtggaacattttgtcaatttttattaggtccaattggtgaagtgttgaatttaagtcagcatttccttgttagttttctgcctcactcatctatttttctaattagtatgattcagttttttttttctgacattgcagttttcttcacctatcacaacacttcaagaagactattacaagaatactacaagttttacacataatatcatcaaaggagtgacacattggcgaaaaaccatgataaatattcaaaaaaactagaacatacatttgtatattctttcattaattgtattagctttttcctccttttgtgcccgtacttattagaatctttttcataaaaaagcagttttctttctttcttgttttttttttttgagacaggatcttgttctgcaacccaggctagtgtgcagtagtgtgattatggctcattgcagccttgaattcctaggctcaagcaaatcctcccacctcagcctcccaagtagctgggactacaagtttgtgccactagacccaattaattttatgttattttattttatttttgtagagtcagggtcttggtatattgcccaggctggtctcaaactcgtgggttcaagtgatcctcccaccttggccccgcaaagtgctgggattataggtgttagccaccacacatggcagcaatttttgactagagctgattgcaaatgtttgtagagaagaattgagaataataacactggatgaccaaaattcggtgtagctatggctaagatttgatgaaagttcccaatagacaaggaaattttgttatttctattatttgcagcattttaagataacaaccagaatcattatgacagtgtcatgttagagacatcaggctttcataaatgttatatcgtctttagaatattcacatgaataacatacccatacaaatataacttaagatttaacatagtaatcaaaattatgactgataacaaattagctttttgtaaatttatataagttttggaacatttatgtcaataatgtacccataattgtaacagaaagatctaatatcaattatcatttgataatactttacaaagaatctaccaaataagtttaattatttaatacaaaaagacttaatttacgattttcatcctgggggaacatgacaaagacgtcaaaagtttcaaaaaactagatcaaaataaaaccataggtcactggaaaataaaagttattcatatacgtagagtggtaatcaaaatactttgaaagaaatacagaaatttttatgaatgtaaaatccttaacccttttaaatttcagttttcctaagtaatatgaaacctaataagaataatgcagaaattgttttaataaaacataaaatctttgctttttagaccagctactataaaggtaaacaaacaaataaacaaaaatccctacaaaacctcctatagtgttaatttagtttggatgtgtgtcccctccaaatctcatgttgaaatgttaccttcagtgttggagatggcctagtgggaggtgtttgggccatagaggcagatactttatgaatgactcattgccatccccatggcaatgagtgagttcttgctctggtagtttatgcaagagctggttgtttaaaggagcttggcacctcctcctctctcttgctccctctcttgccatgtgacatgcctgctcctcattcaccttccaccataaatgtaattgtaatcttcctgaggccctcaccagaatcagatgctggcactgttcttcttgtacagtctgcagaactgtgagccaaaataaatgtctttataatttacccagtctcaggtatttctttatagcaatgcaaaatggagcaacacaagtatgactaattctccttatgggaagcccatttagatagcctggaagtcaagcctgataaaaagggtagtggaccttaatcagatgtaagaacagtgtgtccatgattatatgtgtacacgattgtataaaggaatgtaaacaggaaaactcataccttgagcacagaaacacatggctgtcagtaacagcatgagaattcccctctattgaagaaaagccaagagtacagaatcaaattattctagaggaaaacactgctattctagaccttcaagataagcattttagtgtccagccacaacatcagaggtagagtggaagaaaatagttacgggagttaataaaaagattgaagaagagagttatcatcccaggtaagcaaaaagatttaccttttaagggaataaagaacagaaggcaatgacatataaactgcaaatcacatttagtgagatagagcagaatttgaacttctgggacataaatttgagaaatttcaaaaagaaacagataaaacctcttgtaattttattaataacaaataaatactttcatgaaatcttattctaacataggggaccaatttttagttttgcattagtgtatttttaatatcaaaactccatatttagaaagataaatatttgtgttacagcaaacttaatcacatacaaacttcctttaataaatgtcttttcaactatcttattgtgacttacacagactacttaagacatcctgggactttttgctctttcttatatttcctttttcttaaatacccagtcatttcactgtaggaaaaaatttactatacaagattctttcttatacaaaattattctcttttctttttaacctctttttgtttttttacaaaaaagtacatttccatatccataacttctttcactttctcttccaattacttgtttctttctgtcttatttcataaataacctttaaataacctctgaattagacaaaattttcttttctcaataagaacacatttcatgcctttcttgtattttttcttatcaaaaatacaacttattttttggcatactttatatacaaaattatatgttagttagaaattttaactcttagtaaccttaaattttggtgtaaacttagtaagcaagatcttgacttgtctgccacatatcagtattttatagaaaagagccatttcatcattttttaaacgttttcttacaatattttcttaattgaaaatgacacttaatgagtttctattatttaatttatcataagtttaagatttcaaattacataaaaggtttatttataagcattttttatttacatttgcctaatttacttacttttaacagtataacaagattacttatgcaaactgagatattagacaaagctgataagtatttcaagttattttgttgttaacaacttttatagcctatgaatatcaaatgttcatttaaataagaacctgaaagttacatatatgggtattttgcctctaactcataagataggtctgttttcgtgaaaacaacattaaatcagccttacttatcaaaaaacacacaaagatcattctgtttttggcttgatttatagttttatagccttcataccaaaccccgacactttttttttttttttttgagacggagtcttgctctgtcgcccaggctggagtgcagtggcgcaatctcagctcactgcaagctccgcctcccgggttcacgccattctcctgcctcagcctcccgcgtagctgggactacaggcgcctgccatcacgcccggctaatttttttgtatttttagtagagacggggtttcaccgtgttagccaggatggtctcgatctcctgacctcgtgatccgcccgcctcggcctcccaaagtggtgggattacaggcgtgagccaccgcgcccagccccctgacactttaaaatatctagcagaaacaactataagacttttagataagtaaatgcaggcaaaaatgtgtgctgacatttctgaaaacatttctatgtatattttattaataattctaaaaccagcttacttattaaagatttaagtcatgtgaacttggaaaatatttgtacttcctaatgtatgcatgtttatttataagtcaatttgataccatatagacaaaacatgaaaaatacatgtacacctacataaacacatctaaacacatacacacacataaatatcttatagctttcattctataattttgtcatgagatggtaatataaactcactggtttaccaaagatggctggattcaaattgtattcctgacaaaactggaacctgttcagatggctaaatttcatttgccccagagggtaatgtaatgaaggctatgaaacaaagttttgaaaaaagcagtttccatggcaatttgatttaaaaaaacccacaaaactcttttcatatatttttttcaccttcagtttcaaatgagtttagggttaaattttcaatttttgcattttagctagaactggctgaattgtataagaaaaacaaaatacccaagtagttttggattagcaataccatgcatcagcagtgcattttatctcaacagcagcacaaaagtcagcaaattcaatgtaggggagagagagagagagagagaggaattagaagattctacataaatggattgaagtctccaataaaaaaacagagattggcagaatggataaaaacacatgatccaacacatgatcatagaaacacatgatcagctttgtagatttgctatctacaaagtctcactttacattcaaagacacaactagattgaaagtgaacagacaaagatattccatgaaaagagtaaccaaaagagagcagggatagttatattagtatcacacaaaataaactttaaataaaaaaagtttacaagagacaaagaagtacactatatattaatactaataaaaggttcaatgcagcaaggatatgcttgatatgtcaagatatgcatgacacactgaatgacagaccactaaaatatgcaacgtaaaaactgtcagaattgaagggagaaatagttctacaataatggttggagactgcaatatccacttatttatttatgtatttaattttactttaatttctgggatacatgtgtagaatgtgcaggcttgttacataggtatacatgtgccacggtggtttgcttcacctatcaactcatcatctaggttttaagccccgcaggcattaggtatttgtcctaatgctcttcctccccttgtccccccaccccctaacgggccctggtgtgtgatgttcccctccctgtgtccatgtgttctcattgttcaattcccacttttaagtgaaaacgtgtggtgtttggtcttctgtgcctgtgttagtttgctgagaatgatggcttccagcttcatccatgtccctgcaaaggacatgaattcattcttttttatgactgcatggtattccatggtgtatatatacccacttcttaataatagaacaaccagacagcatataagtaaggaaataggggacttaaacacacgataaaccaactagatctaacagacatatagaaaacattacccaacaaaaacagcatgcatatttttctaaagtgcttatgggatgttttccaggatagagcatatgttaggccacaaattaagtctcaataaatttaaaaagatggatatcataaaaagtatcttctttaaccacagtgggatgaagctagaaattagtaattgaagaaaaactaaaaaaatccaagaacttttggaaattaaacaacacatttttaaacaaccaatggatcaaagaagcaatcataggggaaattagaaaataatgagatgaatgaacataaaaaagcaccacctaccaacccaaggggtaaaatgtgtacctataaatatttgtatcaaaaaacaaaaaaatctctctatgaacaacctaactttacaacttaagcaactagaaaaagaggaacaaacttaactcaaagctagcagaaggaaggaaataacaaagattagagcagagataaacacaaaaaatagaaaaaaatagagaaaatcaaaagttgtttcttgggagagatgaacaaaattgacatatttttagctagatgaactaagaaaaaaagaaggagattcaaattactaaaatcagaagtgaaaatgcggacaagtctacaaaaataaaataggactataagagtactatgaacaattgtatgccaacgaattaagacaacctagatgaaatggacaagttcctggaaacacgaaacccaccatgactaaatcatgaagaaatagaaaatctgaatagacctataactggtaaaaggattgagagtccagaaataatctgttccagatacagtcaaatcacttttgacaaggaacccaagacccttcagggggaagaaggacagtcttttcaataaattgtgctgagagaactagatatccacatgcgaaagaatgaagttggattctttcctaacaccatacaaaaaaattaactaaaatggatcaaagacctaaatgtatgacctaaaacaataacattcttagaagaaaacacaggacaaaaacatcacagtattggatttggcaacgaatttttgaattcaacaccaaaggcacaggcaataaaagaaaaaatatgcaaactgaatttcatgacttaaaaaacatttcgtgcatcaaaaaccactataaacagagtaaaaaggcaacccacagaaccacagaaaatattgtcaaatcatgtatgtgataaatagagaactcttgaaagtcaacaacaacaaccacaaaaaccaaacaacttaattcaaaactggacaaagaacttcaatagatatttctcaaaagaagatatacaaatggccaataagcacataaaaagatgctcaataatgctcaatatgactaatcattagtgaagaatgcaaatcaaaactacaaaaagatatcaatgtatacgtccccagtaggatacctactatctagtaaagggaaaataacaagtattgttgaggaggggttggctgcacaccagcatggtacctgtgccccggctcatggccttcttggagtcagctccttccccagatccccaagggccaaggtcttcatagaacaggaggctgaaaggaagaaccaacctcagtgcctagacatgagcggcagtgctgaaccccacgtggagcccacatcacaggttaactctaaaggtcatctgtcccaagtccacagggacagggggagcttggccagtgcccgggctcctggggagtggccagacctgccacagcagtccccgggctggccagggctgggcctggtgtgtggagggcagggggaactcacctgtctctgaggatcacatactcagcaggcacctgaggctgtcctagccttctccactgagtcttccaagcctgcatggggcaggcgtggggcagggagggactcagcaggaggcccaggcccatcaacagcacagttgccaagccaacagccagcagcacccctggaaggtgggcgggagaggggaatggggctacatggtggccactcagagcccctccaggctgcctgggaacgtgagaaccgctgttttgcatttgcctcagtggccctggcctctgccctgctgcccttgcggttgaactcttcacagctcctttcctgtctctgggccattagtctccctctgggaggccctccccactaccctgtgcccttctgtgtgaggaccctcctgggacagccccacatgtgacctgtgttctgaatgtatgtgtgcatgcatgcatgtatgcgtgcatgtgtgcgtgtgtgtgtgtgtgtgtgtgtgtgtgtgaaagaaagagctgctgccctgtgcccagggctgagtcttagccgtcagagggctgtgtcctctctgcccactgggcaggccccagcctgaagagctcagtgcggattgctgacctctggagaaaagaaggaaggaagatgggaaacccacactgggggctagtctaggatgtctgtgatcctgtgactccactcagggaccctgtccactggggcagcttccaggaaaaatgagcatgagaagtggggaaggggaggtgagaaaggaggccccaaatggagaaaatttttgccttcaaatgaagtcccaggtcaaggacaagctgcaccatgccactgtcactgtcatcatatctggagtttggtggctacgcccagagcctcggacagggctgacacacactaggggcccaggaactcggacagggctgacagacactcagggccctgtggcatggcactcctccctgcctgctcaagtcctggctgctatgtcctgtcaatcagtacctgtgatcactgcccagtctgggcccaggtttggcagcctgtgcctgaggatgctttgcctgcccagctgatatggggatgagggctgcacagggcacaggccaggactacaggccaccccctcctccttcaccagcaccacggccaggctctctggctgcccattgtcttgaaacatgtatgtgcctggatctaggaactggtgggcaaacctgaggagcagagatcaggagtcagaatgtgaaggttcacctgcagtgggctactcacaccaagccaactctcaatgtctccccgcatatggaacaacgtggtccagggaagctgccatgacccctgctgggcaccaggaggccccgcctgccaagctcccctctgccccgtaaacaggaggcctctcctgcccctgggctctggcctggtcacctgcatggtctgcagtctcctgtgttctcctattggcccgtcgagggagaggctgtgagttgcacggaggaacctcacccctttccctcccacctcccaaactccagggagctcagctgtgttaccttgagaagttgaggtgagtctctcgcaccaggtggctgagtctgcggaaggccctggagtcccagtggaggttgctgttgaacagatgctgcttctggtacatggggttgtggctggccgagcggtctgggggatgaatgcagggctgggctaggttccagagctcatctcagccccactgctgagcaactcaggtccagggatggacccagtatctgtcctcagaagagtgaggggaactgaggtatgcttcccatgagatgacacgattcaccctgtcatgcctgtgatggtgcatttaatgatcttggtgccagggcaagccctcctccctctgcctacagaggtcactggcacacagagagcatgctctcagcagagccaccaggcaccacacctttcgtggtgatcatggtcaatgccctggccttctcctttgtttgtgtcctctcttattcccttgagcggtggcttgtagttctatttgaagaggttcttcacacccctcattagctgtattcctaggtattttattctctttgtaacaattgtgaatgggaggctttgtgcagggtctttatttgaagctgactttctagctttttctttttcatgaatttggagacatttatgagactttataatattgatttcaagttgagaatatttttaatatagtagctttctcttgaaattcctcactgtttgactttttgttcattcattgaacaggacaagttttctatggggcagatgaatatagtaaatattgtgtgttataacaatgcagggttattggttgttacaagagaatagaattgacagacacatcatggtgcctgatggcaactagcatcagctctaatatatgcagtttttgtctctctcgtcaggattgttttggtaggcacactttcagaactcttccattagatttcttcaaaattgtttagggttcctctcaagttttgttcagatgtttataagcttattgactttcccatggcagtttcttggaatgagaaatgtctcgaagtaaccacttctttctcttcccttctccatgttcttctcttctttcctctttcccctttttcctctctctttgcttttctcccctcttccccttctcccttctctctccttccttcttcctcctactccttttccttcttttttaagtaagatatgaggacatgtttcgctttgtctaggaaaatgtttgcattttctctttcacattagtttatgaatagagaggaggaaagtaaagtaatataaagcagattggacctaaaagacttgggtttaagctccagttctgccactatttgtgtttcttaatgcttcaggcttagttttttcatttgtaaaatgaggatccttataaatagccatcttaaccatgaaggattttgtaaggaacaaagagacactatgtgcaaaaatgatctgtttaactataaagtgctttctaagtgtaacctctgtgtgttttatgccttctgcttcttgggctccatcagagactcaaattattacttccagattattgttttccatcaccactattcagtagtactctactggtaaagccctgccatggaaattatttgaaattcaagtagtaacttccaatttttcttatccaaacaagtagtaatagcatgtttcttaatttaccatagtaaaaggaaaagcctaaatttctatgacacttcttctgtgtcctgatcatctagaaattgtgtagtcccttgtgatttctgtgggatgctggcttgagatattatttttccatcaaaatactttattcatagcttagtattaaataatgccttgaatcatgatgctatatgtttctgttagtgatatcaatttaaattataaactaattattaaaactattacatatgatcttactagaaattcctaaaccatagactgttgtctttttaagtaaacaacataataaatatactgtcttctaattagtgcagatcatagcagttctgtgctgcgtgcagtggcttgtgcctgtaaccccagctactcaggaggctgaagtgggaggatcacttgaggccaggagtttgggaccagcctaggcaacatagcaagaccccatatctaaaaaaaaatttttttttttaattagccatgtgtgatggtacacacctgtagttccagctacatgggaggctgaggaaggaggattgcttgagcccaggaatttgatgttgcagtgagccatgatcatgccactgcactcaaaaattttttcagttttggctgggcatggtggctcacacctgtaatcccagcactttgggaggctgagacagatggatcaggagattgagaccatcctggctaacatggtgaaaccccgtgtctactaaaaatccaaaaataattagccgagcctggtggcgagtgcctgtagtcccagctactcgggagtctgaggcaggagaatggcgtgaacccaggaggcagagcttgcagtgagccaagatcgcgccactgcactccagcctgggtgacagagcgagactctctctcaaaaaaaaaaaaaaaaaaaaattttttttttttagtttttttggaaaaaaatatttctaagcaaatcactggttttaacagttttgcttattttttacattatattacattaattttcacagctatactcaaatagctatatgccgaaaaggactttaacaacctaattctgtgtagcagtgaataagcataacttattgcattctatagggaaagctgaaagttatcctattaaaatgtcaagtagaacaagttttaaaaatgttattttattttatttcttttcctttttttttcttttttttttttttttgagacagagtttcactcttgttgcccaggctggagtgcaatggtgcaatctcagctgactgcaacctccgcctcccgggttcaagcaattctcctgtctcagcctcccgagtagctgggattacaagcatgcactgccacacccggctaatgttgtagttttaatagagacagggtttctccgtgttggtcaggctggtctcgaactcctgacctcaggtgatccgcctgccttggcctcccaaagtgcagggattacaggtgcgagtcactgcacttggcccttatttttctttgccatcattattatcagtattctcgtcatcaccagttaagtgtaataacaaccctgagattatacatgcatgtaaaaagtgatcagtttcaaactgtgtgaagcctaacttctgcagcagcatttagtctccacattcaggaactttaggaggaaaaagaatggaactaagagctattaactatttttttagccacagtataaagaatcccacgtccgtttgtgtcgtggccctcctaatggtttttgaagtgacagtttattcatttttctaatctacttaggcatcctatgcaacccataacttctttggttttctattaatttcttaaattgatttataagctcattgaaggtagaagtggagtggaaccttctatgtcaggaagaaaagtaatacatgcttattattacaaactctaccccttcctattctaatcctgttctccagtggtaacacaattcatttttcttctacacctaaacattaaaagcagaggacttttggtttatttatttaaagtaggatacttagtaaatagtaatctgcaatgacagtaataaatgtcatttatctttattctttgtaaggttatactgaggcgatgagtctagaaacaagtttttccccccaagagttgcttttattacttaataccatatttaatgttgaaaatacattcatacttgcaatttgaggttccacatgcttcttatggattttgcctgctctttttgtcaggcagtgagaacaaggactctgtctgtaagatgttggtgatggtccctctgaattacagctggcaactcatcagagtctagaagatggagggattaagcctctagggtaaaagaaggtagattaggcaatatatttatatgtggaactctgagaattggggtgtcctgttggcataactcttcagatacacctttttttttttttttttttttttttgagctggagtctcgcactgtcacccaggctggagcgcagtggcgcgatctcggctcactgcaagctccgcctcctgggttcacaccattctcctgcctcagcctcccgagtagctggtaaggtgccgccaccacgcctggctgattttttttgttttgttttgtttttgttttttttgtatttttagtagagacggggtttttaccatgttaggcaggatggtctccacctcctgacctcgtgatctgcccatctcggcctcccaaagtgctgggattacaggcgtgagccgccatgcctggcccagatacacctttctaccttagtctggctacctagggaaaattagaatagattattagaatatggtttgtatttataaaagaatacacattcagtacgggttttctgttcccagtctgccacactgatcttgctttttttgtttgtctaatagatttgctagatgttagagtgggaggtgctgtaagcatagaagtatttcttgattttaggaacatatcccaaatagttaaacaaattattgtagcatcattaaataatcctttgatttctcctatccagttgtgttttttgttttttgttttgttttgttttttttgagacagtctcactctgtcgcccaggctggagtgcagtggcgcaatctcggctcactgcaagctctgcctcccgggttcacgccattctcctgcgtcagcctcccgagtagctgggactacaggtgcccgccaccacgcctggctaattttttgtatttttagtagagacggggtttcaccgtgttagccaggatggtctcgatctcctgacctcgtgatccacccaccttggcctcccaaagtgctgggattacagccgtgagccaccgcgcccggccac

SEQ ID NO: 9675 - DNA, 1195 bp, Homo sapiens
atatggagagtcaattgcattttattatgcccaaaggtaaatgcataatttttccgcacagctaatcttctagcaaccccattgctgtccatggcaaacaggcttagttaatctcgccctttcccgtttcaggttcattaaaaaactcttgtcaaaatctctttcatcccaccttattcttcattctcacttccatcagcatatcagtccaggccctagtaacattaatgttactaatggcactgttagtaacattacttaccagcattcaagtgggtcttcctgatgccattctctcccatcctgaaatcactgctctttatatagaacttgtatgatgtcattcattggatcaaaaactattaaagccttcctttttctaccaccccaatctaaatttctatgcctggcttttattaaaacccagaatttggccccaccctagctatttaactttattttccactattcaccagtctcctccctcatcaacgagaagacataccataatcaacctcaccactaacgcttggaatatctaaacttaaaaatggtccttcctttcccctttacttgtgtttaaagaacctgacgaattattcctcctctgctaaacttttcacaatttcttcaacctcatttatgtttcagattttcagaacatatcttgccgtttattaggaatctcacaattaggcactctcatgtagatagatttacaatcatgtatgttgtcatcttctattaaattccatactccttgaaggcaggagccatgccttattctgtcccccagagtactcagaatgatgcagagcacacagaaagtactcaaatcttgttgactgatccagtgagaaatgaccaacttcagttccagcctctctttaacatgtacatagcaatttgggcaagtcaagctccatcctgaaggacataataggggactctttaagcacattattatgaaggcccttcagggataacaccagagtgatgaggtgccctataccagggataatggagacagagttcttgggattcatcactggggtcctcaaagcatcttccaagggcataataaggaaggactcaaacacctttgaatctccgtgagaccaggcatgaggtcttttgaaagagttctttaactggagtgaatgtcaaagagaagtataataaaataaaagacctg

SEQ ID NO: 9676 - DNA, 1195 bp, Homo sapiens
atatggagagtcaattgcattttattatgcccaaaggtaaatgcataatttttccgcacagctaatcttctagcaaccccattgctgtccatggcaaacaggcttagttaatctcgccctttcccgtttcaggttcattaaaaaactcttgtcaaaatctctttcatcccaccttattcttcattctcacttccatcagcatatcagtccaggccctagtaacattaatgttactaatggcactgttagtaacattacttaccagcattcaagtgggtcttcctgatgccattctctcccatcctgaaatcactgctctttatatagaacttgtatgatgtcattcattggatcaaaaactattaaagccttcctttttctaccaccccaatctaaatttctatgcctggcttttattaaaacccagaatttggccccaccctagctatttaactttattttccactattcaccagtctcctccctcatcaacgagaagacataccataatcaacctcaccactaacgcttggaatatctaaacttaaaaatggtccttcctttcccctttacttgtgtttaaagaacctgacgaattattcctcctctgctaaacttttcacaatttcttcaacctcatttatgtttcagattttcagaacatatcttgccgtttattaggaatctcacaattaggcactctcatgtagatagatttacaatcatgtatgttgtcatcttctattaaattccatactccttgaaggcaggagccatgccttattctgtcccccagagtactcagaatgatgcagagcacacagaaagtactcaaatcttgttgactgatccagtgagaaatgaccaacttcagttccagcctctctttaatatgtacatagcaatttgggcaagtcaagctccatcctgaaggacataataggggactctttaagcacattattatgaaggcccttcagggataacaccagagtgatgaggtgccctataccagggataatggagacagagttcttgggattcatcactggggtcctcaaagcatcttccaagggcataataaggaaggactcaaacacctttgaatctccgtgagaccaggcatgaggtcttttgaaagagttctttaactggagtgaatgtcaaagagaagtataataaaataaaagacctg

SEQ ID NO: 9677 - DNA, 1240 bp, Homo sapiens
caattttgttccacagttgtttgaatcggtggatgcagaacccatgaatatggagagtcaatttcatttcataatgcccaaaggtaaatgcgtaactttttccgcacagctaatcttctagcaaccccattgctgtccatggcaagcaggcttagttaatctcgccctttccagtttcaggttcattaaaaaactcttgtcaaactctctttcatcccatcttattcttcattctcacttccatcagcatatcagtccaggccctagtaacattaatgttactaatggcactgttagtaatattacttaccagcattcaagtgggtctccctgatgccattgtctcccatcctgaaatcactgctctttatatagaacttgtatgatgtcattcattggctcaaaaacttttaaagccttcctttttctactaccccaatctaaatttctatgcctggcttttattaaaacccgtaatttggccccaccctagctatttaactttattttccactattcgccagtctcctccctcatcaacgagaagacataccataatcaacctcaccactaacccttggaatatctaaacttaaaaatggtccttcttttcccctttacttgtatttaaagaacctgacgaattattcctcctctgctaaacttttcacaatttcttcaacctcatttacttttcaagttttcagaacatatcttgccgtttattaggaatctcacaattaggcactctactgtagatagatttacaatcatgtatgttgtcatcttctattaaattccatactccttgaaggcaggagtcatgccttattctgtccctcagagtactcagaatgatgcagagcacacagaaagtactcaaatcttgttgactgatccagtgagaaattaccaacttcagttccagcctctctttaacatgtacatagtaatttgggtaagtcaagctccatcctgaaggacataataagggactctttaagcacattattatgaaggcccttcagggataacaccagagtgatgaggtgccctataccagggacaatggagacagagtacttgggattcatcactggagtcctcaaagcatcttccaagggcataataaggaaggactcaaacacctttgaatctccgtgagaccaggcatgaggtcttttgaaagagttctttaactggagtgaatgtcaaagagaagtataataaaataaaagac

SEQ ID NO: 9678 - DNA, 1194 bp, Homo sapiens
atatggagagtcaattgcatttcattatgcccaaaggtaaatgcataactttttccgcacagctaatcttctagcaaccccattgttgtccatggcaagcaggcgtagttaatctcgccctttcccgtttcaggttcattaaaaaactcttgtcaaagtctctttcatcccaccttattcttcattctcacttccatcagcatatcagtccaggccctagtaacattaatgttactaatggcattgttagtaacattacttaccagcattcaagtgggtcttcctgatgccattctctctcagcctgaaatcactgctgtttatatagaacttgtatgatgtcattcattggctcaaaaacttttaaagccttcctttttctaccaccccaatctaaatttctatgcctggcttttattaaaacccgtaatttggcaccaccctagctatttaactttattttccactattcgccagtctcctccctcatcaatgagaagacataccataatcaacctcaccactaacccttggaatatctaaagttaaaaatggtccttcctttcccctttacttgtatttaaagaacctgacgaattattcctcctctgctaaacttttcacaatttcttcaacctcatttatgtttcacattttcagaacatatcttgccatttattaggaatctcacaattaggcactctcatgtagatagatttacaatcatgtatgttgtcatcttctattaaattccatactccttgaaggcaggagccatgccttattctgtcctccagagtactcagaatgatgcagagcacacagaaagtactcaaatcttgttgactgatccagtgagaaatgaccaacttcagttccagcctctctttaacatgtacatagcaatttgggcaagtcaagctccatcctgaaggacataataggggactctttaagcacattattatgaaggcccttcagggataacaccggagtgatgaggtgccctataccagggataatggagacagagttcttgggattcatcactggggtcctcaaagcatcttccaagggcataataaggaaggactcaaacacctttgaatcttcgtgagaccaggcatgaggtcttttgaaagagttctttaactggagtgaatgtcaaagagaagtataataaaataaaagacc

SEQ ID NO: 9679 - DNA, 807 bp, Homo sapiens
ctgatgagtcatctccttagacttgcattttaaagagatagatagttatcaggttccagagaagacatggtagaacatttatatctcaaagacacagagctgagacttcaggtttagatactataatttgcctaaaccaaaaaggaaggtgtaggtaaagttctagtcaggacaggatggccaggaaaaacaccttaaagcaagggatggcttgctttgctgatttaagccaatggcttctttatcataagacttcccagtgatttagtcctccctctcttccagtgcacagagacatacccctccttacaaataaaaatgttctttatagatggaaatttattttacaaaaatgtttcaaaataaccagatgaaaatcatccttatgccagaaagacttgttgtttttttttttttttttactagaaatgaaacagtatttgttgtattgacatacttaggcttagacctatgtttaacaagaaagcctaataataacactgtggttagactgtagcctatttttccaaatcatcattttattattaaggaaagaaaggatcaaatacctttcattcatctgatatgatcctttaaaacacattccactaatgagtcacatttggaacagctgaaaatcttttaataaaactttttaaagatgagctcatggcttagtgtatatttcacaagcttaattaggtcaaatggaaggaactcagatgagtagttgcccaatcagagcccattatttgtaagtcatcagcccccttcatgaccttaaaactccaccctgacctaattatt

SEQ ID NO: 9680 - DNA, 492 bp, Homo sapiens
aggttcagaaatttatttttatcagcgtcaatagggtagctacattgcttagaagcaaacaaaaataaccatgcttcaatagaaatcaggatatagatgtattaatacagaatgaccaatataaatgtgacagaaataggaatgcctgtttatggtcatatacggccaatactttcattacagccaaactcatacatgcagccaaataagaggcccctggatacacaggaaatcagaataaaaaaagaactgaacatttaatagtcttctttcattcaatcaataattttttttaattaagcaactactatgtccaggtaaccttctaggtcctggggatacagagttctctgcttacagaagtcatatgtaagtagcaggtgaagagtatgtgtttcacagaaggttattacaatatattaacaagagcaaaaaattttggaagcaatctaaatgttcaataatagagctccaattaaatgacaataaatc

SEQ ID NO: 9681 - DNA, 296 bp, Homo sapiens
tagcccagcgataacatttggtcatatcatgttatttctgttttgcatgaagtgaagaagctgaagtctagagaaactgagatattgaaattttattcaaagaaaatgcaaacatagcatcctaatttctttaggcccatgttggtaaaggtgactgagatggagacagttcataaagagcttaggcatgtagatcacaaaaactgtctctgcatgtattcagcttaagttttagcccttcaattggagttgtgattccagagttatttctaaatatagaaaaatgaaccataaca

SEQ ID NO: 9682 - DNA, 242 bp, Homo sapiens
aggcgggcagatcacgaggtcaggagattgagaccatcctggctaatggtgaaaccccgtctctactaaaaatacaaaaaattagccgggcttggtggcgggcgcctgtagtcccagctactcgggagactgaggcaggagaatggcgcgaaccgggaggcgcagcttgcagtgagccgagatcgcgccactgcactctagcctgggtgacagaaagagactccttctcaaaaaaataaaaa

SEQ ID NO: 9683 - DNA, 806 bp, Homo sapiens
ctgatgagtcatctccttagacttgcattttaaagagatagatagttatcaggttccagagaagacatggtagaacatttatatctcaaagacacagagctgagacttcaggtttagatactataatttgcctaaaccaaaaaggaaggtgtaggtaaagttctagtcaggacaggatggccaggaaaaacaccttaaagcaagggatggtttgctttgctgatttaagccaatggcttctttatcataagacttcccagtgatttagtcctccctctcttccagtgcacagagacatacccctccttacaaataaaaatgttctttatagatggaaatttattttacaaaaatgtttcaaaataaccagatgaaaatcatccttatgccagaaagacttgttgttttttttttttttttactagaaatgaaacagtatttgttgtattgacatacttaggcttagacctatgtttaacaagaaagcctaataataacactgtggttagactgtagcctatttttccaaatcatcattttattattaaggaaagaaaggatcaaatacctttcattcatctgatatgatcctttaaaacacattccactaatgagtcacatttggaacagctgaaaatcttttaataaaactttttaaagatgagctcatggcttagtgtatatttcacaagcttaattaggtcaaatggaaggaactcagatgagtagttgcccaatcagagcccattatttgtaagtcatcagcccccttcatgaccttaaaactccaccctgacctaattatt

SEQ ID NO: 9684 - DNA, 494 bp, Homo sapiens
aggttcagaattttatttttatcatcatcaatagcgtagctacattgcttagaagaaaacaaaaataaccatgtttcaatagaaatcaggatatagatgtattaatacagaatgacaaatataactgtgacagaaataggaatgcctgtttatggtcatatacggccaatactttcattacagccaaactcatacatgcagccaaataagaggcccctggatacacagggaatcagaataaaaaaagaagaactgaacatttaatagtcttctttcattcaatcaataatttttttaattaagcaactactatgtccaggtaaccttctaggtcctggggatacagaggtctctgcttacagaagtcatatgtaagtagcaggtgaagagtatgtgtttcacagaagtttattacaatatattaacaagagcaaaaaattttggaagcaatctaaatgttcaataatagagttccaattaaataacaataaatc

SEQ ID NO: 9685 - DNA, 809 bp, Homo sapiens
ctgatgagtcatctccctagacttgcattttaaagagatagatagttatcaggttccagagaagacatggtagaacatttatatctcaaagacacagagctgagacttcaggtttagatacaataatttacctaaaccaaaaaggaaggtgtaggtaaagttctagtcgagacaggatggccaggaaaaacaccttaaaccaagggatggcttgctttgctgatttaagccaatggcttctttatcataagacttcccagtgatttagtcctccctctcttccagtgcacagacgcatgaccctccttacaaataaaaatgttctttatagatgtaaatttattttacaaaaatgtttcaaaataactagatgaaaatcatccttatgccagaaagacttgttttttttttttcattactagaaatgaaacagtaagtatttgttgtattgacatactaaggctaagacctatgtttaacaagaaagcctaataatagcactgtggttagactgtagcctatttttccaaaccatcattttattattaaggaaagaaaggatcaaatacctttcattcatctgatatgatcctttaaaacacattccactaataagtcccatttggaacagctgaaaatcttttaataaaactttttaaagatgagctcatggcttagtgtaaatttcacaagcttaattaggtcaaatggaaggaactcagatgagtagttgcccaatcagagcccattatttgtaaatcatcagcccccttcatgaccttaaaaactccactctgacctaattattg

SEQ ID NO: 9686 - DNA, 1807 bp, Homo sapiens
cgacaagccatccccctgcccttcctgcaggctgccttacccattcagagggaggccgaggctgtgccgggcggcccacagctgcgggaccgcgttccagggtgtgctctgctgcaagcatgagggaaggacagttaaaagcaaaacggaagccttgcatgggccgcttatgcttctggagctactttttttttttttttttttttactatacatggtatttagataaaggtctagagtaaaaggctctacaaccatcttatgttcagaggtcagtgtgtgacttaatttaacatttcctttacttttgtttttctccatcttgtattttatagccagagcctgaacctcctcgtcgattttttgtcgaccagtgggagctttctcttagtctccgctcctctgcccgccccgcctctccctcctccgactccctccgacaggtagcatggcctaggactcactaaaactctgccctccgcagcctccactcacgtcactttcgcaagtgtcatgtaccccaggaggctgcagtgttcctcacttgggcccgtctcctgtagggagccagctgcatgtgttgctgtttgcctgtgtcggtctcgtgtgtgaggtctgtggcacactcctcagctaaagtggctgctggctttcatccaactgtatctgacacatccaggtctgttgatgtgaacccgctttgatcctatttcaactatatcaaataatgataaatgttttgcagccattggcttttttaacttcacatgtcttccaaaataatatgtgttaaaaagtaggaaccacaatgtaattaaatcacctcaatggaggggtgatgatgcggtattctggctgcctgttgtcatcatttgaggaatgtacgcggctgtcacctgaagtagcgctggtccagttgtagggagtttctagagagattggaaggtctctttgccactcctactggtatttcccatgcctgagttgacgccagacctcacgtcctatgtgcatggtagcatatgcacgcgtatggtgtgcggcgggatctgaagtagcactggttcagttgtagggagtttctagagagattggaaggtctctttgccgctcctactggtatttcccatgcctgggttgaggcctatgtgcatggtagcatatgcacacgtatggtgtgcggtgggatcgatcccgcaattgccacatttctgctattttttatgagtgatgagaaggaaaccatcgcttttcatgccagaaacaaatagaacttgagtcttcacctctcttgcagggatgcttgtcagtgttgccaacttgctgagaactgaatgtggcagatgcctttgcacgggcagccccaggtttagttcaactaaacccagatggtttagttcaggagaaaagggtcctggctgagcagtgagggcccagggctggcttggtgtcctggcctcatacttggcatctggcccacactgccccgtgtctgctgcagaatgagagaaatgccattttctgctccctcagtgtcagctgttaagttacctgctcagctctgcctggtgtctgtctgtcccaagcctcagtttctttagtgtccctaaagaaggtttagatctgagagccacgtgtttgtcttgaccactaataggtataatctgtgaagttaatgggcaaatggcaccaatccttgggaatcttatttttgaattaaaagctataattgcttcttcagttcagctgagccttgagctgagccacaagaacggcttcgtcgtgtgtgcatctgtgagcccctcgag

SEQ ID NO: 9687 - DNA, 448 bp, Homo sapiens
ggtgagttgctgagtcagaattagggtcaggttcccccagggggcagggagcccccttactccatgaagttcatgagaggagcatcacccacatggtggtgtggccatctccacatggaagggtgatttgatcgtgggagtctctagaggacttcctctcgggacaggtcaaggcggggctgcctgggcacccagcttaggtgtgagcagggcggctcatgatggagacgtggaagtttctcctgtggtttcagtgttgccagaaagaggcttgagttggttgggtttttttctcttacctttcttcaacctctaaaataagccctcctggcctagaacacattcccaccttcctgggctggtggagcagcttggctgcatggccacacctcgtggccaacatgcccagcccagtctagaaggctctggcctcagcacctggatgggc

SEQ ID NO: 9688 - DNA, 974 bp, Homo sapiens
gaatagggctacctggagcaaaccctggctccgtaggagtgatcctggggtttcctggctgctggggcggcagtctcgccctcccagtcggcctgcggttggtgggtgggggagggggcggttctcgctgccacggatccagaaggccaaattgaaccctcgttctgggatttctggctcctactcccgcaggccgcttgggtgactgtccttttttggagaggatatagagacacagctgtggcctctgcacactgctcttcttccaggctcaggaaaggccctcgcccaggatgtcgccactcagaaggccgagacccagcggtcttcaatagaagtccgggaggccgggacgcagcgttcggtggaggtccgggaggccgggacccagcgttcggtggaagtccaggaggtcgggacacagggttctccggtggaggtgcaggaggccgggacccagcagtctctccaggctgccaacaagtcggggacccagcgatcccccgaagctgccagcaagggagtgacccagcggtttcgcgaggatgcccgggacccagttactagattatgaaggcatctcaggccctggagccagagccagtcaggggttaaagtgaaagcccgtatttccgcccagaagctggggttggggagaggatgtggattttttgttttaccctttctgttgcatggttgcaaacacaaacttgagttctaataaagaattgcaaagtggaagcccgccccccgcctcccccccgcctcacttaagtccaggaagctggggtggcgaggaaggatgatgtggattgtttttgttttacaccttctgttgaatggttgccaacacaaacttgagttctaataaataattgcatttccctaacgtctgtattttggaaggtagaggggagggaaaggcgcattcctccaacagcccagttctgccctgcgcagccctctacctcgag

SEQ ID NO: 9689 - DNA, 974 bp, Homo sapiens; identical to SEQ ID NO: 9688

SEQ ID NO: 9690 - DNA, 974 bp, Homo sapiens
gaatagggctacctggagcaaaccctggctccgtaggagtgatcctggggtttcctggctgctggggcggcagtctcgccctcccagtcggcctgcggttggtgggtgggggagggggcggttctcgctgccacggatccagaaggccaaattgaaccctcgttctgggatttctggctcctactcccgcaggccgcttgggtgactgtccttttttggagaggatatagagacacagctgtggcctctgcacactgctcttcttccaggctcaggaaaggccctcgcccaggatgtcgccactcagaaggccgagacccagcggtcttcaatagaagtccgggaggccgggacgcagcgttcggtggaggtccgggaggccgggacccagcgttcggtggaagtccaggaggtcgggacacagggttctccggtggaggtgcaggaggccgggacccagcagtctctccaggctgccaacaagtcggggacccagcgatcccccgaagctgccagcaaggcagtgacccagcggtttcgcgaggatgcccgggacccagttactagattatgaaggcatctcaggccctggagccagagccagtcaggggttaaagtgaaagcccgtatttccgcccagaagctggggttggggagaggatgtggattttttgttttaccctttctgttgcatggttgcaaacacaaacttgagttctaataaagaattgcaaagtggaagcccgccccccgcctcccccccgcctcacttaagtccaggaagctggggtggcgaggaaggatgatgtggattgtttttgttttacaccttctgttgaatggttgccaacacaaacttgagttctaataaataattgcatttccctaacgtctgtattttggaaggtagaggggagggaaaggcgcattcctccaacagcccagttctgccctgcgcagccctctacctcgag

SEQ ID NO: 9691 - DNA, 607 bp, Homo sapiens
gctccagctcggcctttgggtttgctgtggtgtccttgtctcctgcaggaccggccgcagcatggacgctcccaggcggtttccgacgctcgtgcaactgatgcagccaaaagcaatgccagtggaggtgctcggtcacctccctaagcggttctcctggttccactctgagttcctgaagaatccgaaggtagttcgccttgaggtttggctggtggaaaagatcttcggtgagtggaccaagaaggggcagcccccatgcggcttctttctgccacccatacccacagcccacatattctggctgcgttccagggcgatcctcaccagtagccaatgccctctggctgtctcctccttccaccttcccctcccaagacccccgggagccaccggtccctcacagcctctctgctacccgcgcaggccggggcggagaacgcatcccgcacgtccagggtatgtcccaaatcttgattcacgtgaatcgattggaccctaacggcgaggctgagatcttggtatttgggaggccttcttaccaggaggacacaatcaagatgatcatgaacctggctgactatcaccgccagctccaggcgaaagg

SEQ ID NO: 9692 - DNA, 607 bp, Homo sapiens
gctccagctcggcctttgggtttgctgtggtgtccttgtctcctgcaggaccggccgcagcatggacgctcccaggcggtttccgacgctcgtgcaactgatgcagccaaaagcaatgccagtggaggtgctcggtcacctccctaagcggttctcctggttccactctgagttcctgaagaatccgaaggtagttcgccttgaggtttggctggtggaaaagatcttcggtgagtggaccaagaaggggcagcccccatgcggcttctttctgccacccatacccacagcccacatattctggctgcgttccagggcgatcctcaccagtagccaatgccctctggctgtctcctccttccaccttcccctcccaagacccccgggagccaccggtccctcacagcctctctgctacccgcgcaggccggggcggagaacgcatcccgcacgtccagggtatgtcccaaatcttgattcacgtgaatcgattggaccctaacggcgaggctgagatcttggtatttgggaggccttcttaccagcaggacacaatcaagatgatcatgaacctggctgactatcaccgccagctccaggcgaaagg

SEQ ID NO: 9693 - DNA, 607 bp, Homo sapiens; identical to SEQ ID NO: 9691

SEQ ID NO: 9694 - DNA, 957 bp, Homo sapiens
cttcaatgaaatttatagaaaagactctcacaagtaccattgaatatagttttctgatgattttgagatcgtagtatttgactgggtaagaattccgaacttcagtgaaaaaactgaactcaaaaaactactaacccaacatcaagcagaataagaattattacatgggactaaagcaatgaaagattatgattttatgacttttttgtttggcacatggcttattctttcatgtttcattttccacattaattttttttttctttcagctatctacagtttacgggaatatgggaaggtgtacttttgtgtgcagaattgaaatttttttttctccctacctgatccctccagagtttggagactatttgtgagtattcttatttcaataacaatatagttatttgcttacatttaagaagaatctattctctttctaataggacacaattggaaacattggccatattaccaaggctttgcctgacatgtcctattctgagatatgaccagattgctctaaggaattaaagttgactttataaagccaattaaaaccccttggaaaatctatcttgatatcttggataaataattaacatggttgatttacaggtgagaaaaaatgtcacttcctgagaggccctggaacctgaatatatttttgggaaccttgagaagagaagtattcactcaagtttaaaggtattacaggcacaatttgagggtgactcctccttggattggcttcccagcctcaagaggctttcaaaagtttaatctgagattccttgtgaaaagttccagcaaagcaaaattgaaaatgagcttatatgattaatcatcattttgctgtacttctgtaaattattaggcaaagtataacaagcctaaaacttattttgcaaacaaattagttttattgtgattaactttggtaaaaaggggggaactcga

SEQ ID NO: 9695 - DNA, 923 bp, Homo sapiens
cttcaatgaaatttatagaaaagactctcacaagtaccattgaatatagttttctgatgattttgagatcgtagtatttgactgggtaagaattccgaacttcagtgaaaaaactgaactcaaaaaactactaacccaacatcaagcagaataagaattattacatgggactaaagcaatgaaagattatgattttatgacttttttgtttggcacatggcttattctttcatgtttcattttccacattaattttttttttctttcagctatctacagtttacgggaatatgggaaggtgtacttttgtgtgcagaattgaaatttttttttctccctacctgatccctccagagtttggagactatttgtgagtattcttatttcaataacaatatagttatttgcttacatttaagaagaatctattctctttctaataggacacaattggaaacattggccatattaccaaggctttgcctgacatgtcctattctgagatatgaccagattgctctaaggaattaaagttgactttataaagccaattaaaaccccttggaaaatctatcttgatatcttggataaataattaacatggttgatttacaggtgagaaaaaatgtcacttcctgagaggccctggaacctgaatatatttttgggaaccttgagaagagaagtattcactcaagtttaaaggtattacaggcacaatttgagggtgactcctccttggattgcttcccagcctcaagaggctttcaaaagtttaatctgagattccttgtgaaaagttccagcaaagcaaaattgaaaatgagcttatatgattaatcatcattttgctgtacttctcggccgtattaggcaaagtataacaagcctaaaacttattttgcaaacaaattagttttatt

SEQ ID NO: 9696 - DNA, 615 bp, Homo sapiens
cttatctcaaaatgtctaaagcaaattttccacagttatcaatcctattttaatatgtaaaactttctgaaaataaatttcaaagaggggactgtgggaaaccaaaatatgccatccaaagcgtgcctctttggcatattttgagatggctattcagagggtctgcagacacaaagcatggctctgaaaatttatccttttgtaaaataaatttacatgtatatattaataaagcaaacaagggatgcaggcagacggtttctctgaggtccttttatttgaatctaggaaagattaactcacaggaaaagaagactaaagacaggtttgacacttttaaaggtctgacagagaaactattaccacaggttaccatctactctttttgagggctattacctgatagaccttctctgcacaatgaaacaacagcctttgttcacagtgcattcttccccttacccttccataacctgtcaccacagcctccaggagcttcaggcctctttttctttctgtatcatataaaaaccttaggcccttctttgagtcctgtattttgtgtagctccctgtgcacgtgcatgtaataaatttgtatgctttttcctgtgaa

SEQ ID NO: 9697 - DNA, 476 bp, Homo sapiens
gaagaccccactcttccctcatgaaccatagcagataagttatcaccccttaccattaagtatccaaacccttattaatggaaatcatccattacgctgcccttgcaggaatcaccctacttactctactctttgccataggaatatatactgtcttgcctcctgggtggaatttcagacaaaaaaaactcaatattcgtaacctcttgcctcataatcctcctcatagcaggtataatagccaccaccaacagatagtggcccctcctaaatgtcctgtctttgcccatcctggcatttcacactcttccttcactgcatcacagaaaacctttcatggtcctacccagaacatcccaccctcacagcattccttgattggatcaccaatcttatatttcaaggggatttacaggaattcactccagatgaagccgaattctttacctttacacttgctctctgtctatttactc

SEQ ID NO: 9698 - DNA, 34762 bp, Homo sapiens
  SITE (19530): n equals a,t,g, or c
ggccctgtttgctgaaatgttggggccaaacaacttgatagagcctatgatgttcctttcaagctttctaaagtttccaccaacctcagatgaaaatgtaactgtgagaagtaaatttaacaacattgttgtctgcatatgtgtgccaaaatggaagacagaatcatgaaaaagaagcttattttataaccatggtggtggctcatgtttgagtagtaatggtaagtatcaattggtggaaaatttatttaatacaattttgatattactttgactactcttttatcataatctacaaattaaatatcatgttcctgcttcctaagtttatgagtcaggctattttacttaggtgaggtacaacgtatttcttgcctctctattcagtgagaactattcagtgaccataatgtcagatataccaaaacctgatactccaagtttgtgagcagattccagtattcctagaaagaaagatatgtactgagaagcaacataaattaattgaatttttgaaatttcaatctaatatgtactgagaagctcaaatttggcaataaaaatataaatccaaaccaaaataagtttccaaatgcttgagaagagtcttgacttgctactgaaaacataattaatcatcagtacttaataagtactttgaaatattttaatagttttttaccctacctaagagtttctgacccttccattcactgacagaacttagaaatttcacagatttaccaagctcctttgtgagcttgccaacatactgttgcattgtgagcttgccaacatactgctggaaatgacttatttttccttcacagctcaaataaatagttcttttccaaatatgcttttctcgtgtccccaaatagaggtaggaaaactgcagagtttccatatactaaagttaaatattggctgggtgtgatggctcatgtctataaccccagcactttgggaggccaatgtggaagcatcacttgaggccaggaatttgagaccaatctaggcacaatagtgagacccagtctataaaataaagaaaaataaacaattgaatattaaagcatagcttgctttctttgaattgtttcatgcttaacattataggattaaataatgggttgtctcttcctttcaattttttctccaacaatattattatcctttccaagatcaaaatgtactccaggaaaaatgcttcagttctcatgtttaataaagtagctagtattttttttttcatgtggaatatttcaatgaacaagacaatagattaaatgtagaaagactgttcaaggctcaaggtccagggtgctgggagtatggcctagaagggaatggacatgcccccttgctctgctagtcctacagtgaagccagcaatcagaggaagaccagacagtccttttaagtgtaggggcttgggatggaggcctcaattgcctagatttaaggagggttctgattgccagtgttacaggtttgggcttagagagtgctgacgtgaagcaacttgcaaatggtgaagagggagggtacactcttaggtgactgagaagggttagagatctatgtgaagccaagagaggagaatatcaggaaagaggatggacttattaattttcctttttgcatataaatgttttataattttatacaacagaacgtaagatttcagtaatgtaaaatgaaaatgaaatgttaacttgaaaaactatataaacttgcaaaagtaatgaaatcaagacaatcttgtagtattaaatttaaacatcattttaaactcatattttcaaaatctatcttttctagctctgcaaactaagatggcttagtaccaatgagtacatataaagccaagatttttttctctaacatttaccactaaaggaaaccatgactccttgaagaaattatttactctaggattcagctaggaaagatttacatatgtataaaaaaagttatgacagtaaatataggaaggtgtcaacatcagtgagcttagcaatgtaggaatgtgatttattattattgttagggttcacccaagtgtactgtttccccctcccatagacctaagccccaaaggccaaaagtaaaacctcctaccccaaacccgcctgtaactgtctgaccagttcccggatgcagtcaagacgtctaccttacacaacagaactggcaagaaaaacatccccaggaagcggtcagacacctggcacaaaggaccctacaactcttttctttttccttcaccttgacccagttctacaccctataaaaccttgctatagcctgtaagcggggctgcctcctctgcttttgtcaggaggtagcccggcaggactgacaataaatcagcttgcctgaacttaggtctattggcctcattcctttctcggctgtccttccaattatcccttgtatcttggtgccgaaacccggcaaggtggtagagctcggcctccctttctccctctctcctttcctccccgcttcccccggccaaactcccccttccagaacgtgctggagacccagaggatttcctactcctttccattgctggcagacacatccaacaccagggccacctcaggggtgagtaaaggagacttctgccttctgtccggaacccttgtccactctttccttcccaaaagatgcagcactgggccaagagttttctcctcccagcctccaggcccttggtatctgcctttcacggatgcttgaatggggaattatcgcacctctccgactcaggggacgccttctcctatcattctagtctctggccacgtctctcatctccatctgttcctcattcattctatcatgggagcctctcagtccagtccctcaaagacatctcccctccgatgtctcctccggaatcttaatgcccttggcctccattccgaaattcgaccacaaaggctcatctttcattgtatcacagcctggcctcagtataaattggacaatggctcccagtggcctgaaaatggcacattcgattttaacatcctcagggacctagacaacttttgccatcgcaatggaaagtggtctgaaatcccttatgttcaggccttttttgccctccatagctgcccctccctttatcggtcctgtttcactttccaaatcctcctcgcccgctccaagccaggctcaccctcagctccccttccttctggcgattcctcctcctttgaccctgccgacgtctccccctgcccctcccagtcaacataataatgctccgcccaatcaccacgaccctccgccctatgctccagctcctgccctccctcttccccccctctccaaccacccagcttctgactctgattcatccgcatctccacctcatactccacctcatacgctctcaaactcagcatgcccaacaaccagcccccatacttcccctccgagaggtggctggagccgaagacatcattcgagtccacgttcccttctccctctctgacctctcccaaattgcaaaacgtctcgggtcgttttcctctgatcccgacacttatatcaaagaatttaagtaccttacccaatcttatgaactcacttggcatgatctctacattatcctctcttctaccctccttccagaaaagaaggaaagagtgtggcttgcagcacaggcacatgccaacgatcttcatcggcaagaccctactaagcccataggggctgctgcagttcccctggaggaacccccctggaagtaccaacccacagaccctggccgggcatctcgtaaccatatgattacttgcctcatcgcaggacttaacaaagcagcccataaggccgtaaattttgaaaagctcaaagaaatctcccaaagagccgatgaaaatcctgctgaatttctttctcgttttacagaggccctccaaaaatatactcgtgtagaccccacctcccgggaagaaactatcgttcttaataaccatttcatctctcagtctgctcctaacatacagcacaaactgaaaaaggccgaagatggccctcaaactccacaacaagatctccttaacctgactttcaaagtcttcaataacagggaggagcagattaaattagacaaggcccaaagagattgtgctaaataccagcttctggcagtggctatccatcaacctagccatagtacccaagggcacaaaaaacccaatggcagtaaccctcctgggccttgttttaagtgcagcaaagaaggtcactgggcgtgggaatgtcctaacccaaggacaccaaaaactccttgcccagcctgccaacagaccagccactggaagtctgattgtcctcttaaaaaccaggctaacagaccaactcctcaaagccctggcaaggcagagagtgaaagatcactcatcctaccgcagctccttggtctggccactgaagaatgacagagcccagggcccccggtcccatctgccatcactgctttggagcccagggtaactctgccagtaacaggtaagctgatctcctttttaattgataccagggccacctacttggctttgcctgaattttcaggacccattcatccctctcaggtctctgtcatgggggttgatggattcgtctctcatccacacgccactgagtcccttacttgttccttgtttaatactattttttcacactccttccttatcatggctcattgtcccacccccattctaggccgagaccttttagctaaattcaaagattccatcactttctcctgtgtctctcaaccagagtcctttctgctcctctctgctagtccagcccctgacccttctccccactacccacttctctcctctctcattaacccagtggtgtgggataccaccacctcttctattgcaggatctggccagcagcccacaatgcaacagggctctttctttgttcccaggcggattggcatgttgagaaataatagacacacacaagatagtgaaagccaggtctaggggggtcaccgccttctggtcctgcagtgccaacaatgcactggatataccagcatttattattaagtttagtgaaggtgggggtaggttactgagggatttaggggcatttgattatgagatgagatggtcacatggggatgaagtaattctttaacataacatctgtatgcagaagtacagtatacagagataagaatttacaatatagtgtgtgcatcagtaattcttaacagagccttaaaacagaaacatagcctttccataacctatgattagccagatattaatcagcagtaacagttgcagcaaaagctggttacaaacaatccatagaaacaggacgtaaaggtagacaaccggttagaccagatattctcagaagggagtatgccttaaccctaaagaggcctagaagagctgtggcaagatgagggcagttatagccctatcttaccatatggacaggtgcccctcatgcatccgtttataggctctccacaaggctcacattccattcccagagctatgaacatctgcttttctggaataggattcttggtgatgtgaaactccctgactgcaagtccgttcataggctttctgcatggggaagcacatcacgcactattggctcattctggcagtccaacctggcattgtctttacacaatcctgaatgcaattttgtatttacaataatcaggggcatttcgtcttttattccatagcaatagtttcagggggtctccctacactcttccatagctgcacaccataaccccatcaaaatccagttaaaggacccctccaaatttcctaacgttccccaataccctatctccctaacccaccaaaaggtcctccaacccattataaacaagctgtactcatgtgatcttcttagaccaacacattctccatataacacccccttcctccctgttagaaaatctgacagctcataccgactcgttcaggacctctgagccatcaatcaggctgtactccctatttaccccttggtccctaacccctgtacacttctctccctcatcccttccaacaccacccactatacagcaatcgacctacaggatgctttcttcaccattcccttacactctaattcccaagacctcttcaccttcacctggacagatcctgacactcttcagtcacaactcacatggactgtcctccctcaaggcttcagatacagccctcacatctttggacaagctctagcccaagaccacaccaccttaaacccctcccccagctgcctcctccaatacattgatgacctccttctttgcagcccctccctagaggactccaaactcacaccatcaccctactaaactctctttctagcaaaagatatagggtctccccctccaaagcccaactatctgccccaacagtaacatacttaggagtccaactctcccctggggcccaagccatgaccccagcacaagcaaccttaataaacagcttgcctctgccttcctcaaaaaatgaaattctctctttcttaagactagaaggtttctttagaatatggattcccaactttgccctcctggctcaacccctctacgaagcagccaaaggccccctcaatgaacccctaagccccatacacaacatacttcccagtttctgtaaactccaaactgctctcatcactgcacctgccctgtccttacccgacctctcccaaccctttgttctctataccaccaaaaatcaaggaatagctcttggggtcttagggcaacaaaagggaaatcctccttcctttgaccctgtagcatatctctgtaaacaactagacaacactgtcaaagggcagccaacctgtcttaaagcatcatcagcagtggccgttttgcctctggaaagcaaaaaactaacatttggccaaagcaccaccattcacagccctcacaacttacaggatctcctctcctcctgggcattaagctccctctctccttcccaaattcagtcgctctacgccctctttatcaaaaatcctgaattcagccttgccaaaagtgcccccctcaacctggcatccctacttcccatatcctcttcccctcctactcattcttgcactgacattctggatcacttgcagccacaattccctaacatctcctccaagcctctcactaatccagatgaccaactatttatagatgactcctcttccagagcccccggctctcccaaaattgttgggtatgcagtagttaccttaaaccatgtaattgaggctaaacccctacccccagaaacctcctcccagaaagcagaactcagctctcacaagagccctaaccctctccaaggacaaacaggtcaacatatacacagactccaagtatgcctaccacattcttcattctcatgccgccatctggtaagagaaaaaattccttactgccaaaggaaccctcattactaatggcccccttatttaccaactccttcaggctgcacacctcccaactgaagcaggagtcatacactgtcgaggacagtaagcaggttcagatgaaatctcaagaggaaataggctgatgagcaccgaaacaggcctctctttctcctatccctgcccccatcctccttgtcaccccagcagtccaacccagatactctcccaccaaaaactcttcactactacagcaaggagcctcccttcaaggggactggataatcaaaaaccaaaagctcattcttccccaagagcaaaccaaggaaattccaacatctcttcaccaatccttccatatcagtgggcgccccctgtacctactccttcacccttatttctcctccccccatctattcacctcactaaaggacataacctcaaactgtcatatatgctctgttacttcctcccaaggggccctccgccctctcctcatccctacacatcagctcagaggaacactcccaggggaggactggcaagtagacttcacccacatgcctcctgtcaaaaaaactaaatattttcttactctcatagacactttttcaggttgggtagaagcatttcctaccccttcagaaaaatctctcaaattctcataacaaaaatcatccctagatttggtctcccttgttccatacaatcagataatgggcctagcttcatctcccaaattacccaacaagtctctcaatcccttggtgttcagtggtgcctccatatcccataccagccccagtcatctggaaaagtccaaagggcaaatggaattctcaaaactcagttaaccaaactcacacttgaggttaaaaaaccttagacctccattttacccatagcactggctcatatcagagccagtccaaaggccccctccttcctcagtccattcgacttaatgtatggatgccctttcctcttacaaaacagaccccctcctgagtatcaattagaatacctcccaacactctccctcatccatcatctcctctgcgaacaagctgaccaggcccccacaaaaccccaccaaggcaccactgaccaaacactccttccaggagaatatgtcttcctaaaaatcaacaagtctcatgccaaagtgcgaaatccctttccaagtccttctcgctacctccactgcagccaaactttgagaacacaagtcttggtaccatctttccaggttaaaaagagcacctgcagctgacccatcaccaactaaccaaccagctgttccctgcaaatactccagcactcttctcagaccaattcgactccgcctaacgcccatgcctgaagaccccactcttccctcatgaaccatagcagataagttatcaccccttaccattaagtatccaaacccttattaatggaaatcatccattacgctgcccttgcaggaatcaccctacttactctactctttgccataggaatatatactgtcttgcctcctgggtggaatttcagacaaaaaaaactcaatattcgtaacctcttgcctcataatcctcctcatagcaggtataatagccaccaccaacagatagtggcccctcctaaatgtcctgtctttgcccatcctggcatttcacactcttccttcactgcatcacagaaaacctttcatggtcctacccagaacatcccaccctcacagcattccttgattggatcaccaatcttatatttcaaggggatttacaggaattcactccagatgaagccgaattctttacctttacacttgctctctgtctatttactccttcttccctcctccttctcgctaccgctccacctacagcgcaccattccacaggcacatatgatactcagtcaaactaacccctccctggccaaggcctgctggtacacccctcagaaaccgtatcaaaagatgtcttcccagctcccctcaaagactgggttctcagcaatatgaccctccacccccgctaccaaagttttggagaagtaaatgcactcaaaagttacaaactcaatcttaccacacatactgcagaacacaaggttatcttaggaacacttaccccagactcagaactcagtcaaccagcatccctatgcataaagcgtgaactttccaaaggagtgcccctaggcaccctctcctctagcttatgcaactgtaccctaacactcactcccccgacaggcatccaaacaataacagaaaaaaaccccacacaaactctcaaaatctccaacccccgtcagacccaagtcacgggagaaacatcaggattctgcaataactgacacaggccctgcatagaaatcgcagggtggaacacttgcctaaaccccgtccccacttcccaatgcatggaaatcccactgcctaacacaccctcaaacaaactacttattgacacaaaacgcttcttatggactcagcctgggtgacagaggaagattctgtatcaaaaaatatatatatatacacacacacatatatatgtatatatatgtgtgtgtgtatatatataatttgttttttccatgataagctattttaaaacaaagattctgaattctgtatgttttctatggataattttgttagagttaaagaatttgttcccgagttattactcaatacatgctgtttattggaatacagataacagcatgatcattgacaaactttgccctagtttcctattactcattaaaccttgaagttgcacttaacatgactgtatctggataacagataaaattttggccttattatgccaacccttaaactaagtgagcaactctgttttcaaagcttttgggtggagctgaagcacactgcttattaaagtacactattcaggcatatcatgtaggtttactttctgtgtttctagagaccaagaagcgggacgttcaccatgggaagaaaatcgctgtaccttctgattgtggggatcctcatagcatattatatttatacgcctctcccagataacgttgaggagccatggagaatgatgtggataaacgcacatctgaaaactatacaaaatttggtaagtttggaattttatgaattcagatgtgcatacaccaccatttgacccagagaattaagtttttcaagattctattcttttgatttattgacttattcatcttttaaaataactgctgtggcctttgacaatgtgttacttagaaatgttgtttgttttctgtcttatgtattggaatcatgttaaaaaaatatcaagaacagcaagcaaggagtcatttgaataggttttgctaaaaagtactttgtttaggtagctttaatatcacgatagtggctctcctttgaaattcttatcttaggtatggtttgttcctgaatgtgtatactcaaattagagatcatctgattatgcagcactgtgttagttacagatttttatgcacttatctttggagttcagaatatagactaaggacacgtaaataagttctcaagaaaagattcaatgggcaggctggttggcacatgcctagggttaaccacgagacggcacaatatgcacaaatgagagggggagggagacctgggtgtcctggcaactgggcagcttggatgctggcaaattaaaaaggtgtagctctctctggatccttgatgatattttactattacttctttggttattttattatcttcattaaaacaaatctcttttcagaacttaaaccagataaatgttgtaactcctggattaatcttttattttgcatttattcaacaattcaactgtctcaaatcctattaggcaaacaagtagtctatccccacacagttgacattctagtggtggagaaaaaaataaattagaattaaatgaataaatgattttagttcatgagaagtacctttaaggaggtaagatggaagaaaagagagtaatttgggcagaaggcaagagtgggctactgtatgcatggtgagaaaaagccattctgaagaggaaacagctacttagggaccagaagaatgaaaagaaaccaaccattctaagtgctaagaaaaatgttttccagcagagacaccaacaagtaaaaacaccccagctacagaatattgacaagtccaagaaatcatatgaaacatttgggtttaatggggaaattgttgcaattagtttggagaggttagaagccatatcatacagtgctttgtgggcactggtagtaagttttgatttaattctgtatgtgatgcagagctattaaagagctttaagaaagggacacatttttttccctcatatttgctgtctgtgctacaatatgtgagaggtctttgatttttttcttggagtctttatattaatttttatttatttaagcaattatatatatattcttctctggtagccttttaattaattaattcattcatttacttacattctgtccacaatttatgaaagtaatgtattttcagagctctcagtcgatataccttttaaaagttgttttaatgccctttcttattcctgaattatctgcttgtttgtttgcttgcttttttgtgatcgtttatgctcctggtttgtcccttttttcctgattagttttgctggcttctctgaaatgtctggcaatctttgagtgttcataccctttattaaaggattatgttatgaacattacatcaagaatcaaactactggattgagaatcctggtaaatatcatttactagttgtgtaggcatggacgacatatttaaccttcctgggctcactttcctcatatctgacatggataagaaaatgttatcttcctcccatataagcaagttgttaatattactgagatgactacaatagagtgctcagaacactgactcattctacagtgaaaggatgggctgcaggcaggcaagctgccctccctttttctcccactcattccttccctcccaaccctgactcccagctcccatgtgcaaccagctccatagccacacctcactgcacctccctatttctaaactaaaccagttcctcgacctgccagggtttttccttttcttatttggttagcaaaagacttaggaaaaggtatttatttcaagcctcagacaaaattgcttttccagtttctactcccaagtagctttttgtaatcacctgctgttcgctcccaaagtactttgtacagagctctgtaatagtatttacattgttttgtaaccatttatttgtctttcacacttaactctgagattcttgagaagagcatttgtctggttcatctctgaaaccgtaaagcttggtagagagcctgacacattttagtgacataggaactaaattagtagcaggggtcacaataaaacttcatctttgccctctgaaagttgctgaaagtcaactgacaggtctggttaatagaagaaaaaggcatatacatttttagcatacataatagacttacaaaatataaaatctcaaagaaatggccagatggttgacactttttttttactatcttgaggttacagaaagaatggtggcttggccaaaaaatgatatggtggcaagacaggttatgggaaggagagaagaggagacatggttagcaaaagtggtcttgttatatagatggatcctcacaggtagcagccctcagagagaacagatggtaaaaatttctttcagacttttaaaggtgtcagattctcagttgatttttcctagatctggacaaatgaaggctctcagaagccatcaatgcagattttctctacagatgcaaatcacctccacaaaagaaaagctttccagctaatcttgtatttccagcccttctgaaaagctaccttgcattatgtcaaggagatatattttgggatgaaatatttttatttccttcacagtgtattccctcttttttaagaaccaccctaggcataacctttgcatttctggtttcttttaaaaggaccaagcaggattcatgcatgaaaatttagttcattccatttgagtttattaagggttaatgtctacctataagtccatagatctctttgccatttgatacttgaatttcaggaggtttgtgaatttcatttttaggctacatttgtggagctcctgggacttcaccattttatggattcctttaaggttgtcgggagctttgatgaagtcccaccaacctcagatgaaaatgtcactgtgactgagacaaaattcaacaacattcttgttcgggtatatgtgccaaagagaaagtctgaagcactaagaagggggttgttttacatccatggtggaggctggtgcgtgggaagtgctggtaagtgaatgctttgaaaaatctctgtcactgaggtagttcgcagacattttactaagtcttcagtaggtacacatgcccttcggcatggacattactgcctcttttatcttctcgtgctttgttctggcaaagttttacttttccctgaagctttatatcactcttttccacatatgcatttcctcatcaacccaggtagaggtgagaagaaactttttttttctatttatcacaattactctaagaaagccttgttatttctatcattctccacttgatattacagaaccatttaatgttttcatccatttactcatatttactatatgtctggtaatatttttatatctttgaatatatttttgaattgacaaaatttcctcacgcctgtaatcccagcactttgggaggccaaggcgggtggataacttgaggtcaggagtttgagaccagcctggccaacatggtgaaaccctgtatctactaaaacaatacaaaaattagccgggtgtggtggcgggcacacattatcccagctactcggggggctgaggcaggataatcacttgaacccaggaggcggaggtcgcagtgagccaagattgcaccgttgcactccagcctgggcaacagagcaagactctgcctcaaaaaaaaaaaaaaagaaaaaaatcctgtcttcctgtattcttggatcttacattctaatggagacaatctttgatcgataaataagtaaataatacagtgtgttttaaagtgataaatgtaggaaataataggccagaatgttagaagaaaaaccttagacaaattaaatttaacagagtttaattgagcaaagaactacttgtggatcaggcaccctcctgaaccagaataggttcagagagtcaccagcgctgcctcctggtcgaagaagagttataggtagaaaaaggaaagtgacattcagaaaacagaagtgaggcacagaaataggcggattggttacagctcagcgtttgccttatttgaaactggttccacaagttggttacctttggctgaaactcagtgattgggacaagagtagattacacatccaattaagttacaactcactgtgtatcaagaaacctttaaaatatgcaaagaggcagctttaggctaaacttagtttatttggcaagagtaatcaagattgggtgtgaaggttgtatatttcttgatgtatagaattacagcagaaagacaaaaacatttagaagtggaagcactgggataaaagtcccaattatgtgagaaaatcacctaacccacctgagtcctagggctcttgagattcatctgtttacctccaatgaatacagtatagattaactggaggagtgaagattggactggacctactaagttaagaactctgaactctagagaggaagaataaattagtcctgaaaagaaaaggttacaggcttgaaattaagcaaatttgtccattgatgtgggaagttagaggagaaaaagacagaagattaaaaaaatagatctgaatgagtgcctcatttctgacaggatgactgggagggtgagaacagatttctggggaatgcaaacaaaattgttgggtgaaggaataagcagacagcaaagcactgaggtggtcaaaaatgtcagaaaatgaaaagaaagccgaagaaggtgagaacctcaagaaagaggaaataatagaagtcctgcatcgtgtagagatgtcaagtaagtaggatggaagtatgtctcttggatgttgaactttctatgttaatattgttgaggagagacttgctgacatgatgggatattcacagagaaacacattacagcaagcaaaaagtgagagggaagaaaataaaatggttagaataattgctggccttaaaaggacttagttgtgaaataaataagcaagaaaattatagattgaaatgagagttaagtaggagaattttcttttatttttgtgcaggagaaatataaacaagttggtagactgaaataaatgaaggcaataagtagaaatatgttagccaagtaatgggctgggagtgttgactgatagatacacatcccagaggaaatgaaagggaagaagatttagagcactagtaaaataattggatatagataggaaggttggaaatggaaaaaaagagcattacgtcttcctcttagacaagagaaaaagaggcaaagagaggcctcagctagatacattcttaaagtagtagtacagatgcaagcagtaagttccagtgtttgtttaaggggacctagttctattccacttatattcaggtgccttttctattgtcccatgcagacttaggtgatccttctatattgcaacaattctgtctatatctccttggctcacatatctgacaacgtattgatcaagttagcgacttgtctttttatctttgtatacccatcatctaaaacagagccaaatcagtacctccttccagtatacacagttgggttaatctagagaatgagtctgacacagaaggatcaatggcaaaatgtgcaagacaaaagataaaagggaggaagagcattaggaggttcactgggaaacttgaattccactgagtcatgaatggatggcttcttataaatacagtgttaaatttgtctctcgtattttaaggtaaaatagaactgccagaacgtgaaagaagtgcagcaggatttttgtgaaggaaacagccttgtcttcatttgtctgttttactaatatgttgcttttatccttttatttcagctctaagtggttatgacttgctgtcaagatggacagcagacagacttgatgctgtcgtcgtatcaaccaagtaagagctgtgctgtttggtttcctggccagatgtctgacatgccaagattttctcagctttctttttttttttttttttttgtgatggagtctcaccctgtcacccaggctggagtgcagtggcaggatctcggctccctgcaacctcctcctcccgggttcaagtgattctcatacctcagcctcccgagtagctgggattacaggcacgagtcaccacacccggctaatttttttattttcggtagagatggggtttcaccatgttggtcaggcgtgtcttaaactcctgacctcagatgatccaccctccttggcttcccaaagtgctgggattacaggcgtgagccaccgcgctcagccgattctctcagctttctcagccaatgcatgatcatgccaaaaataaatgtttctcagatgacactaagtaggcaactgcaagtgagtgctaggcttaacctgattagagttgagaaaaaaaaatctgtatatgtgtgtacacgtgttattttggcaaaaagaaacagcaaaaagtaaaaatttttttcacataaattcaaactgtatcatttatggatataattacctggacggtatttcctttcaacccttaattcccagtctttaaaaatgagtgccctggagtcacaggatcatctataaaagtgcatcataaataatttccatctcagatggtcactgtgaagagtaagtgataacatccttgaaacagagtccagcgtatatagcacttggtgagcctaaaatgtaggctatataattttaaatatttaaaatatagcgtatagtttaggctcaacaagtgttatacactgcgctaagtatattaaaaatgtattatcaaattaaacaaaatagatgagttcatataaaattatgttagataaataatccacctatggaaagagcacttagggacagcaaaattaggggcggattgctgggtagactcatgccagagcagtatatatttaaattgaaatttcagagagtaaatgaacagttaaaaaaataacatactcatcaccatttgtcaagttaaatcattattataaagttgggacataatcttgatcaatatttggttgtatgtgatcactcataaatatagtggctagaataatattttgtaaaatgcaattagaaaatccaagcttatgctgttttgcattccaactttatacttaaagagaattttcttaaacatggcaagtcaaattatagtataagaccgacatctgtgtttaattcattgcaatgactaataaatcactagtacatgaaagataaaatatactttaaaatatttatgcaaatatatgccttgccttcaaatattctcattttatttatattaaagatgaagaactccagtattcaaagatagataattttggttatatttaaattaaaatggccaataagcatctttcatgtacttgaaagataaaatatactttaaaatatttatgcaaatatatgctttgccttcaaataatctcattttatttatattaaagatgaagaactccaatattaaaagatagataattttggttatatttaaattaaaatgaccaataagcacatgaaaagatgctcaatatcattagtcattagagaaatgcaaatcaaaaccacaatgaaataccacttcacacccactaggatgggtataatatatatatttaaaaagataataacaagcgttagtggggacatggaaaaatcagaatcctctatactgctggtgggaataaacacttcggcagctccttaaaagttcaaacagagttaccatattgacccagtatttccatttctaggtgtatacacaagagaaatgaaaacatgcccatataaaaacttgtatgttcacagaagcagtattcataaaccttaaaagtggaagcaacccaatgttcattaactgataaatggatgaataaaatgtggtatatctatacaattgaatatttgaaattcaattgaatatttaaataaaatgtggcatatctatacacatattcagttgtgtaaatataccacattttattcatccatttatcagttaattattcatttgttaataaaaggaccactacagtatggacaaattttgaaaatattatgctagatgaaacaagccagtcataaatggaaagttttgtgattccatttatataaaatgtccaaaatagggcaaatgcatagagatagaatgtagattaatggttgcctatgattgggtttggaggatggggagaaatgagaagtgactactaatgggtataggatttccttttggcatgaggaaaatcttccaaaattgattgtggcaatggttgcacaactctgaatatattgaaaatcactgaattgcatacttataatgtgttaattttatgggttatgaatatctcggtaaaatggttatattaaaaattaagggcatacttttaatgtgttaattttataggttatgaatatctcagtaaaatggttatattaaaaattcaggctgggtgcagtggctcatgcctgtaatcccagcactttgggaggccgaggcaggtggatcatgagatcaggagtttgagaccagcctggccaacgtggtgaaactccatctctactaaaaatacaaaaattagccgggtgtggaggtgggcacctgtaatcccagctacgcggaaggctgaggcaggagaattgcttgaacctgggagtgggaaggttgcggtgacccaaaattgnccactggactccagcctgggcaacagtaactagactctgtctccccgcaaaaaaaaaaaattaagaaattatgttcatcaaaagacattaatagaagtcttaaagtttgtgtgtgtatatatatgtgggtatagacatatgtatactataaaagtttttaaatacattttttttttttcaaatccaaaatataaaaacacctaccaattaatagaagtataggcgaaagactcagaaagacaatttacagaaaaggatattgaaatcatcaaacaatatatgaaaatgtactgtatacatcaggaaaatacaaattaagactattataagatacctgcatatactcgagattatagataaaatgagaaagacataagataccaagtgttggtaaggttttgaatcaacagcacttccataagctctagtttgagaataacttggtaaactacttagcaaaactctttgacattattaagtaaagctaagcatatatgcatacctctgttattatcaatagcacaggtatgtatcaacaggaacacagccatagggccccaaaaaacatgtactagaatattcatagcagcactgtttgtgcccaagactgcaagcagcctaaatccccataacatttttttacttggaaaaatatttatttagtatttattgtttgtttaattatttataagaacatttaatatgtgatctaccctcttagtgaatttttaaatttgcattatttttgactgtaggtacaatgttgtacagcagatctgtggagcttattcaacttgtttgactgaaactttatgccagctgatcagtaactccccatttcctcctccccacagcccttgcaaccatcttttcactctgattctatgaatttgactattttagacaccttatataagtggaaacatacagtatttgttcttccatgagtggcttatttcacttagcccatcaacatgttaatgggtaaatgatttgtggtatattcaaacaatagagtactatacaggaagacagaagcaatgtgaatgaggctcaaaaacataatgttgaacaattgaaaccagatacataggagtatatgctatatgattttatttatttaaaggccaaaactaggcaaaattaatttatgctgttatgtcaaattagtggatacgtcaggaattaaagagagtaaacaaaaggtttctgggatgcgggcaatgttatatttcatgatctgagtgctggttatatggctgtgtttagtttgaaaattaaagaaattatatacttatgtgcacctccagcatgtattaggttggtgcaaaagttattgcggttttgtcattacttttgcaccaataatatattacagtctaatcaaaacaaacaaaaaaatgtgtaaactatgttttctctctacagctacagattagcacctaagtatcatttcccaattcaatttgaagatgtatataatgccttaaggtggttcttacgtaaaaaagttcttgcaaaatatggtgtgaaccctgagagaatcggtatttctggagatagtgcaggagggaatttagctgcagcagtgactcaacaggtatgttcataatttctatgctttttaaaaatagcgtttctacgctgttttaaaaacatatttataaacatattgaatgcatgtattaaaatatgaatgcaaataggagatattgattttttgaaactattaaagagaatattgagaagaaatgactaaaacattataatatcaatccctgcttctgtcatagatttttttttcttccttaagggaatgttaattctttggataaatcattcatttaaaattatagcctgcatgtggtagctcagcactgcaatcccagcgctctgggaggccaaggcaaagggatcacttgagaccaggagtttgatagcagcttgggaaacacagtgagaccctgtctctacaaaaaaaaaaaaagaaaaaagaaaaattagcctggcataatagtgtaagtttgtagtcctagctacctaggaggctgaggaggctgaggcagaaggatctcttaagcccaggagttcaaggttacagtaaggtgtaatcgtgccactgtactccagcctgggtgacagaataaggccctgtctcttaaaagcataaaaaataaaataatatgtgtcagtaaaatattatattaagtaggtgaatgagatcatgtaattgtgagactaatgaccctattacgctattagagattcagacgaattcatataatcttcgatggtgtattcctttattaccataataatcatcctattttaagaaaattatcaacacattcaaagattcccatgctacttacaaagaagaaatatgaagaattcaaaagatttttgtatgtagatgtaaaatcagatctttttatctgtcatttaataatggcaatataataataataataataacaaatggcatttttgtcccagattatatgtagaatagattttgtttttatgatgaaggagaaacactgctattgattgtttaaacatctaaactcttttctcatgtagtagtcgcaaaggaactattttcccatggagtagcagtcaggagaagaagctacctaagatcttctctctaatgttaattctttggataaatcattcatttaaaattataggctgcatctggtagctcagaactgcaatcccagcactctgggattatgtagaagttaagtagaacatatgtagaaggttagatttttattagttgactttagttacaaacgagggttctacagcaattttaaaacattgctgttatttgttttgttaattatatttatttataatttttcacactaaaagcattttgactgctagaatctgttggacaatattctcaaaagtaaagaatcatagttgcactttgtttcaaccacaatatagaacaagtatttgaaacttcacagatagatttctaatcattattatggatttcataatgtagcagcaaaagcattagactggacatcaggaaacttggagatgcagtaatttctagatttgatattggcttaatctccctaaataaacattcatttcctcacctgtaagaaaaatgaactctttcaactttaaagagttgtttgagagtcatatgaataaatttatataaaaatacctggcaacttgtaacaatctttacaaataggctccacaatggtctattttgataattatagttaaaatgtggataaatactacaatttgcaaaatatttgggttacatctaataatatctgtacttttatttagaagttctatacatcttttatagtatattacacacttcaaaaacacaaaattattttttaacctatatgttttcacaatttaaaacatattttgtaatatttcattcttataagtctccttttttcctccctggtattggtatatccctctttacagaccactgattattacaaatattagcacaacagacttgatataaaagatgatgttaatagaccatttcacacagaagtcttgcccaaatctcctaaagtaacatgtcgctttagcatcaaagccatgtcagaaacctctattaagtgatccttcttcttcatggcaaagcttattgatatactggtatattttaataatatatttttttgagacagtgtgtcactctgtctcccaggctggagtgcagtggtgttttctcagctcactgcaacctccacctcatgggttcaagcaattcttgtgtcttagcctcctgagtagcttcaatgacaggtgtgcgttaccatacctggctaatttttgtatttttagtcaagacgggtttttgccatgttagccagctggtctcaaactcctgacctcaagcaatccacacttcagccttgcaaagttctgggattacaggaatgagccaccataccaggcctattttaataaactcttacatgaacagaagataatatttatgcaattcttctggttatcattcctagcagaaaggagattaactttctaatgatcacttagatctttttgcattatccataaagcatatatgacagatgattttccttaagttgaaaatattgatgaacatctagttctagaaacccattttgaatgttagaaagtttgctgtggtggtatgtttcatttattacttaagtctttttgagatcatgaatagatagatagataaaaacaagatagatagacagatagataatcttattagggatattttattgttttaaatgaaaatgatttgtgcaaatcatcttgcttctcagctccttgatgacccagatgtcaagatcaaactcaagatccagtctttaatttatcctgcccttcagcctcttgatgtagatttaccgtcatatcaagaaaattcaaattttctatttctatccaaatcactcatggtcagattctggagtgaatattttaccactgatagatcacttgaaaaagccatgctttccagacaacatgtacctgtggaatcaagtcatctcttcaaatttgttaattggagttccctgctccctgagaggtttataaaaggacatgtttataacaatccaaattatggcagttctgagctggctaaaaaatatccagggttcctagatgtgagggcagcccctttgttggctgatgacaacaaattacgtggcttacccctgacctatgtcatcacctgtcaatatgatctcttaagagatgatggactcatgtatgtcacccgacttcgcaacactggggttcaggtgactcataaccatgttgaggatggattccatggagcattttcatttctgggacttaaaattagtcacagacttataaatcagtatattgagtggctaaaggaaaatctatagtaaaacatgtagctataacatattttaaaaataaaatctgaaaacctcagaaaatttgcattagaaattggtctttcttagaatggtctagttaagttccacatgtagcataattcttaaataggcacttttctgttttttttttcttactgtgggatttcatttcaattttctacattgtctatctgctttttctgagattttccttcttacactgttaatcttattttaaaaaatattacattcttgtatactttatttttgtgagttggctactatttacgatgcaagagaataaatgtgagcaaatattgcctgtctgagtaatgtcaagattttattcaatgttcatttataacgtgaaacatccctaatcacagatatgaattaagtgccaattcttttcaaaagcagttgcctcagtgaaatgtcaatttattaccactgtaaatttctttatgaaacacttttagaattcagataccaagtgttaaactaaccaatgctaaaaaaaaaaaaaaatcactgtggtactttggggaattagctgctttttatttgaggaaaggtagagaaactgaagtttagtaaagacagaagaaatatttgggatgaacactgacctaacagccaaagactacagatgtggaagtcactgaccaatgatagaaaaatcagagaaaattttaatctctgaaaagcccatcccaatattgcagggagaaaaataaaatggaatatctttaaggctgagcagaattacttgtattaactatgaactatgtagtgtattctaattataaagaagcccaactacaggcagtcttcagatggcgcagaagctccacaccgttatcagggactaaagctttttctatctttgtactcactgatatggtttgactgtgtccccaccccaatctcatcttgaattgtaactcccacaattcccatgtgtcatgggaggaacccagtgggaggtaattgaattatgggggtgactctttcccatgctgttctcatgatagtgaataagtctcacaagagctaacggttttaaaaatgagagtttccctgcacaagctctctgtctctttgcctgccgctatctatgcaagacataacctgctcctccttgccttccaccatgattgtgaggcctccctagccatgtggaactgtaagtccattaaaccccttttgcttcccagtctcaggtatgtctttatcagcagcatgaaaacagactaatatactcaccatcctcagtgtctgtttgtgtgtgcatacttataattgtatttttgagtaccgtctaaatattatatctaggcagagaagggatatggcagaagagctgtatttgaggtaattttattttatcaggaaaacagtagtaatctcagaagatccaacaaagagacttcttatatttcattttctaggacggtgtcacaaggaattttgcaaaatagaattttagtagttgggcaaattgcacattcttattttaagaaataaggcaataccctagccagagcaatcagacaagaggaagaaataaagggcatccaaatcagtaaagaggaagtcaaactgtcacagtttgccagtgatatgattatatgattatatacctagaaaaccctaaagactcatcagatcatagatctgataaatgaattcagtaaagtttcagaatacaaaataaaagtacacaaatcagtagctctgctatacaccaacagtgaccaagctgagaatcaaatcaagaactcaaccccttttacaacagttgcaaaaaaataaaattaaatgagatacttaggaatatacctaaccaagtaggtgaaagatctctacaaggaaaactacaaaacactactgaaagaaatcatagatgacacaaacaaatggaaatacatcccattctcatggataggtagaatcagtattgtgaaaatgaccatactgccaaaagcaatctataaattcaatgcaattcccatcaaaataccatcattattcttcacagaactagaaaaaaaattctaaaattcatgtggagctgaaaaagagcccacatagccaaagcaagactaagcagaacacaaacaaacaaacaaacaaacaaaaaacaaatctggaggcatcacataacctgacttcaaactatactacaaggctatagttaccaaaacagcatggtacgggtataaaaacaggcatgtagaccaatggaacagaatagagaaccaagaaatgaagccaaatacttacagccaacaaagcaaacaaaaacataaagtggggaaaagacaacctattcaacaaatgatgctgggataactggcaagccacatggagaagaatgaaactggatccttatctctcatcttacacaaaaatcaactcaagatgaatcaaagacttaaatctaagacctgaaaccataaaaattctagaagataacgttggaaaaaacatcttctacctattggcttaggcaaagtgttcatgatgaagaacccaaaagccaatgcaacaaaaacaaaaataaataggtgggacttaattaagctaacacacttctgcacagcacagcaaatgaaataatcagcagagttaacagacaacccacagagtgggagaaaatccttgcaaattatgcatccagcaaaggactaatatccagaatccacaaggaactcaaacaaatcagcaagaaaaaaataatccaatcaaaaaatgggctaaggacatgaatagacaattctcaatagaagatatacaagtgtccaagaaacatgaaaaaatgctcagcatcactaattatcagagaatgcgaatcaaaccacaatgcaataccaccttactcctgcaagaaggccataatttaaaaatcaaaaaataatagatgttggcatggatgtggacaaaagtgtaaaagaaaacacttttacactgtggtggaaatgtaaagtaatacaaccactatggaaaacagtacggaactttcttaaagaactaaaagtagaactaccatttgatccagtaatcctgctactgggtatcttcccaaagggaaaagaagtcattatatgaaaaagacacttgcacacgcatgtttacagcagcacaatttgcaattgcaaaaatatggaatcagcctaaatgcccattaaccaacaagtggacaaagaaaatgttacacacacacacacacacacacacacacacacaccatggaatactacccagccataaaaagaaatgaaataatggaattttcagaaacctggatgggtttggggaccatcactgtaagtgaaataactcaggagtggaaaacaaaatatcatatgttctcacttataagtcagagctgagtcatgaggacacaaaggcataagaatgatataatgaacacaggggacttggggggaaagttgagagggcggtgagggataaaatactacacactgggacagtgtacactgctcaggtgatgagtgcaacaaaatctcagaaattaccactaaagaacttatccatctaaccaaataccacctgttgccccaaaacttttaaaataatgaaaaatgaaaaaaaaaagtccaggggataaaagttggaaaaagataaaagcacttaatctgtaaaacaggcagaaaataaagaaagaaaagaaaagaaaaggaaaggaaagaaaccaataatataggcaactagtagaatatgccacacatatctacagcaggaatttgttaaaaagcaattgtggaatgatgattttctgagtaaataaggagagttgtaggttaatattaaaggtaatgaatagaaacataagttggattatggtcccaaattgaccgtttctgtaccatgtacaaataaaaaatgtgttggctgctttgaaataatctctagaactcatccatgcctggcgtgtgctattgttttatctgatccttcttcaagggtagaaagcagtgacactaacatggatactaacaagcaaacaccttcttggccagaaagtggggtttttaactgttatctgtgatatttgtacattaagcaaatattttctttgacactttgatattctgctttttgtcctaaaggcaaaaagcagacaggagaagcaggtcagagtgtcagcctactgagatctatgaaattaacattctgaaagttggaactttatcttcataaaggtgataatgtttttagattagtttaatttttagtaaaattgagtggcagtgatacaatttcaaaacagggggattactttgggagaaaatccaaaaattccaatgatctggcaattctatttcaggtgtttttctcaaaacaaattgaaacataggtctacaagacagactggtacacgtaagtgtattctggctttattagtatcagcaaaaaattggggggggggtggaattctccaacattttctattttcctcctcttcaacttctaacaactgaaatttagtacttacttgaggacgctgctttctctatattccttacatcacaagggctaggagtgaggtacggatttgccttactgctccttgaagaacattccttctaccgccagttttgttcaggggttagcaacccacagcctactggccaaattcaacctcttgcctgtttttgaacaactctaagctaaaaatggtttatacattataaagcactgtggaaaaaataagaaaaataagaagcagtgatggtagcagtggaggaggaggaacaggaggagcaacagcaggagcaagaagagcaggaggagggaggaacaggagcaggaaacaaagactatatgtgactggcaaagcctaaaatatttattatctgaccctttacagaaaaagcttgcaatagaccttaccaccactatcagtcctttttgtagtcaactcctgagccctgtgttactctccctcatatcttaaaagattttgagctcactgacaatatctcacaattacattggtaatctcagtatttatctagatgatccgtcgagctacctagaatcccagctgtttggaattctctcccctaataatcttgttcttttagtggataaaaaactctcatggtcaatcctagaatgtgttatgatcaattactgtgcctactctataatatcaataccaaacattccagttcactccagttgggtctctaattttaataacatttaagaaataatagaagttaaaattcattgactatatccaacacttcactcttcctcattgccctaatgtaattttttctcttccttacccagaatatgttctgtggtcagttagagcaatgcctcccttgcataagccatcaaccatcaacccccgtggatctctactaatgtacttgtttatcaaaactccaaccttgaagacattcacctactgcctactcttcacatgtacctatgcagttacacatggttggagaaaaccaaaaaagtgctgaaatttcccacttaaatgaagtctgtaaacctcgattatgcctttaataatgcctagcaatcatactataattttccagtcccttgagacttctgttcctaactctcatcaggtctccaatacctcctctgccatcttttatcacagctgataactgtgcttcctatttcaccgaggacacagaaacaattgaagaaaatttccacaagttctcaccctatatcaacctctatcgtctatttcaccttttattactatagatgaactaagcgtttgtgcttctgtgtaaggattgttcctctcaatatgtgcacacgtaaatgactcttgattttgatgtttcttcaaatttgttgtgtattaagaatcatctcaaagggttctttttaacaaatgaaattttgagataccactacccagaattttcctttcatcaagaagcccttagatgattcccaaaaaagaacattgaaataaaacccaatctggtgacagagaaagataaatatattaaccacttcaattgatagaaataagaatttgttcttcagactggaaagaaggaaggaagcatactgccaagaaaaccttgacacttgccctgaatttggaggaacaaacaggagtccccagtgaagaggatagctatgggaaagcatttgcaacaggagaaacaatgctttggagatcctggaggcagtaaaccacatagttcacttcatcctttgacatctttcctagagagtagaaggcagggaagctggctggagaagtgaagttctgaggagcctgggctgctgagccaaatacactgaaggttgctctgattgatgcagtacgtgatatgatctttaggagaacagtgtggtaggtggactgcagagacactaaatggaaacagaatgaggccctggctatacctgcagtgattgtgtggcctgagaagctgcaaaaaaactaggggagtgtctctgaggaatttgcagggacataagaatttcaagaggaagggggtaattggttctgtcaatgctaaaaataagatgtgaaaaagtgtcagatagtctcctaaaaacctgtggctcatgcagttactttctgtaacttcctttttccttccccaaccttaaaatataagggtgaagtcaagtcattcctttatgacatagggcagtggtctcatattactatcacacgagagttttaaaacatcatttgctgaagccacaccttgagctattattatgtctcaatctctgaaggtatggcctaagcatcagtatttttttgaagctcttcacaagatttcaatgtacaggaagatcaagaaacactgacttagagagtgaggaacatttcttttcatgtacagagttccaacaccatttaagtgtttcaatttcccagtagtaatatttatcacccaccaataatattcatcagactttactttaggaaatatatatcttagaaaatcctacagatagatagatagatagatagatagatagatagatagacagatagatacagatatacacatacatatatgtatatatgtatatatcatagaactaaatgaatatataaatacgtgtgtgcacacatttagttttcacaatttcattaggtaaacaatatatgtagtatatataaaaatatacatatattttttgacatatataaaatatatatataagtatacatatatatatatatatatatatatatattttttttttttttttttttttttttttttttttgagatggagtctcactctgttgcccaggctggagtgcagtggcgcgatctcggctcactgtaaccctcgcatcccgggttcaagagattctcctgcctccgcttctggagcagctgggatcacaggcacccaccaccacacccgtctaatttttgtattttttagtagagacggggtttcgccatgttggccaggctggtcttgaactcctgacctcaggtgatccgccctcctcagcctccccaagtgctgggattacaggcgtgagccaccgctcccggctgacaacaatattaataggtattttgcagagaaggaaaaggaagaaattgaatttacatgggtttccaaggtcccatggctaataagtggcagagctggaagccaacccccataggccagtttcaaaggctttgccatcaattgcttaaggattttggagactactttttgctttcttagaaagggtggtaggaaaacaagggaatctgaatcatacaaataccagattaagtataaaaccactaactaggtaacctcaggaaaatctcaagattcctgagactgccgcaaagatccacagctctgttgttaatagtgtgcaacgtggataatcaagagttaattatgcttagtttctttaccatataaacaaatcaataccacttctgatgtacctcaatagtggaaaaagcatttaacattctgcaatgaatcactgcaaattggtatgttgctttggccctaagtgtatgtgttggggagcggcaggagggaatttgagctgcacaaatacccagtaaaccaaaaaggtgctcaggcatttagaaactcaccaggtgccagagggggcatgacacgcaggatccaggagaagattttgatttcctctgtgctctgagctctttaacctggacctgaggaatatctgcccagcaacccgtcaaaaggaagcagtgggaaaaaaagcacacagctgtggctggtgaccattttaacctcaaaaaaaccacagctgctggttgttaccaaatgccaaaaaatcactaaaccttgttgattgtttcatgtaacttatgtctagccttctagcctttaaaatttttcatttacaggaggagcagtattgaaaataaataaaattaaattaaaaaataaaataaaataaacttttcatagctttcccggagtttttcaagtttattttatattatattattgttaaacggggtctaatcttggtaccagtactttaaattattctcttagaataaatattcacaatttctttctcttgatgccaaaaagagattaattagggctggaattatttccaatggcatttcaaaaattcttagctcctcctctccctaggcttgagcattgttataaaattaaaaatagcccattttggaaagtccaagattctttaaaactgaagtctcttataaaaaatcaagaggaggctgagaggaggcttctctctcatttgccaatttctttaaaacaagaggcaccgttgtcagtacttttaaagtgctgaaaaagactacaagcctgcaaaagaaggctgagtgtttcattctagagctgttttttcttagtgaacatccattgacttcatttggaggttgtatctgagtgagccctctttcttacaagtaaagtaaaacaccagtcagctgaactctttatcaaacatactcttcatttatctcttgatgacacaatgtcactcttccctttcaagctgagccttcagattctccaaaggtttcgacctcccacaaagtcttcacgaggtgactcgctcttcaaggagccctgctattatgccatatggtgttatgactcagcaaacctgcagtcccttctacttccgagacctggaaagacatgttctaactgcttctggatgaaccaggcataccagtattagttcatgccatccaaaaagaaacttcatgttctttttaactctaaattactaaagctaaaagttacagtcttctgatcttcaagagttcccagaattatgctctctggtgattaaactcccttccctaaaaagtggctcatcctaatagtgcaatgttcactatgtgtcagctttaaaattctatgcctgtaaaatactcgaagtttagagaatgcatcttttttcaaacgcttcttaactttctgagggtgaggaccaatttaacaggattacatgtaaattggcctttcagctatgaccatttcaaatcttggaaaatttttctcctgcatacgctttatccttaagtaaagatacatagtatctatttagagatctaatcacaactttataacctttaaaatatttattctataaattaaataccaaatatgaacatatagcgtgtacacatatgcatatatgtacatatgtatgtgtgtgtatatataggtatacacatatacataaaatctcaaacaaagaaattgtcaataagattaaactgtggctccctggagtatacgagaagttatatacatgagctagaactcaatcagtaatttggaattgaagattggcttaggaaataagaaacttcatactttatactaatttaagtaaaacactttgcttgaatatatttaagtatatagactgttagatgaattctatttttaatctaattaaattagaagtaacatgcattagtatattagctaaatctcatttatttacagtgaatcgaagttggacatattccttgaaaatattttgaaaattattttaatgattaagaatcaattaaaaagagattttactttatttgctaaagaatgactttcaatagtttagtctcaaaattgttacacatgattaccagtgtgaaatatatgagcaaagataaaaataatacctccctgccaaaaacagctcctgttagaaaatattttattaactaatcaaataatcttctggtaaatacagagagatgtttaaaggttgcaatcgaattacaaggacacaataaaactaaaggaaatgc

SEQ ID NO: 9699 - DNA, 173 bp, Homo sapiens
ttttttttttgagacagagtcttgcactgtcgcccaggctggagtgcagtggcacgatcttggctcactgcaagctctgcctcctgggttcacgccattctcctgcctcagcctcccgagtagctgggactacagacgcctgccaccacacctggctaattttttgtaatttt

SEQ ID NO: 9700 - DNA, 817 bp, Homo sapiens
cttacttggttcagctcatggactggcttcttaattctctgtatgctggccttttgtttttttccataaaagcacttttctttagtttccataaaatccattttcagaaaccagttgtgcaaagcatagaatttttttaaaaagatacctgcagatggtagaggggatggggaaagttcttactatgtggcaatattaataaatacagattaagtattgggtatctttgctatttaatatcctcaggctactcttcactgccctttcccaggttccctcccactgcacgtcatctctctgactcctctttggtgccttccttctgccatagcttgttctcacatcctgagttttggatttcccccagaaattccaaactttccaactaggtcatacaaagcaattcagttctcttcagcctctattcgcaaactctccttttgatattcacactcatcctgttgcttgaaggaccctttatttgccataatcaatcttccttagaaagtagttattcaggctgggtgcggtggctcatgcttctaatcccagcattttgggaagccgaggcaggcggatcatgaggtcagaagttcgagacccgccctgccaacacggagaaagctcgtctctactaaaaatacaaaaattagctgggcgtggtggcgggcacctgtaaccccagctactcgtgaggctgaggttggataatcgcttgaacccaggaggtggaggttgcagtgagccgatatcccaccactgcactccagcctgggcaacagagcgagactctgactcaaaaaaaaaaaaaaagaaa

SEQ ID NO: 9701 - DNA, 101 bp, Homo sapiens; identical to SEQ ID NO: 6749

SEQ ID NO: 9702 - DNA, 817 bp, Homo sapiens
cttacttggttcagctcatggactggcttcttaattctctgtatgctggccttttgtttttttccataaaagcacttttctttagtttccataaaatccattttcagaaaccagttgtgcaaagcatagaatttttttaaaaagatacctgcagatggtagaggggatggggaaagttcttactatgtggcaatattaataaatacagattaagtattgggtatctttgctatttaatatcctcaggctactcttcactgccctttcccaggttccctcccactgcacgtcatctctctgactcctctttggtgccttccttctgccatagcttgttctcacatcctgagttttggatttcccccagaaattccaaactttccaactaggtcatacaaagcaattcagttctcttcagcctctattcgcaaactctccttttgatattcacactcatcctgttgcttgaaggaccctttatttgccataatcaatcttccttagaaagtagttattcaggctgggtgcggtggctcatgcttctaatcccagcattttgggaagccgaggcaggcggatcatgaggtcaggagttcgagacccgccctgccaacacggagaaagctcgtctctactaaaaatacaaaaattagctgggcgtggtggcgggcacctgtaaccccagctactcgtgaggctgaggttggataatcgcttgaacccaggaggtggaggttgcagtgagccgatatcccaccactgcactccagcctgggcaacagagcgagactctgactcaaaaaaaaaaaaaaagaaa

SEQ ID NO: 9703 - DNA, 93 bp, Homo sapiens; identical to SEQ ID NO: 5558

SEQ ID NO: 9704 - DNA, 126 bp, Homo sapiens
ctgaggcaggacaatcgcttgaacctgggtggcggaggttgcagtgggccgagatcgcgccattgcactccagcctgggcaacaagagtgaaactccgtctcaaaaaaaaaaaaaaaaaaaaaaaa

SEQ ID NO: 9705 - DNA, 115 bp, Homo sapiens
gaggctgaggcaggagaatcgcttgaacccgggaggcagaggttgccgtgagccgagatctcgccattgcactccagcctgggcaacaagagtgaaactccgtctcaaaaataaa

SEQ ID NO: 9706 - DNA, 628 bp, Homo sapiens
ccactactgtccaacatcaatttggaggttctaacagatgcaataataggaaaatattaaatgattgttataaacaaaattaaaactatatatctttttctggttatgttacagttcacgcggaaaatccaaaagattttaaagaaaaaaatctgctggaattagtaagataatttagaagatggcttgacagataatatatctgtcaaaatcgttttcccttatttccacaaaaagcatctagatatagaagcagaaaatgtttttcattacaagggtggcaaatgttacatggtgcctagaataaatttagcataaaaaaaacccagtcggccaggagcagtggctcacaccggtaatcccagcactttgggaggctgaggcagccagaccacctgaggtcgggagttcgagaccagcctgaccaacatagagaaaccccatttctactaaaagtgcaaaatcagccgggcatggtggcacatgcttgtaatcccagctacttgggaggctgaggcaggagaattgcttgaacctgggaggcggaggttgcggtgagacgagatcgcgccattgcactccagcctgggcaacaagagcgaaactccatctcaaaaaaaaaaaaaaa

SEQ ID NO: 9707 - DNA, 628 bp, Homo sapiens; identical to SEQ ID NO: 9706

SEQ ID NO: 9708 - DNA, 102 bp, Homo sapiens; identical to SEQ ID NO: 6279

SEQ ID NO: 9709 - DNA, 159 bp, Homo sapiens
ggctcactgcaagctccgcttcccgggttcacgccattctcctgcctcagcctcccgagtagctgggactacaggcgcccgccaccgcgcccggctaattttttgtatttttagtagagacggggtttcaccttgttagccaggatggtctcgatctcc

SEQ ID NO: 9710 - DNA, 128 bp, Homo sapiens
acacctgtaatcccagcactttgggaggctgaggtgggcagatcacctgaggtcgggagttcgagaccagcctgaccaacatggtgaaaccctgtctctgctaaaaatacaaaaattagccaggcatg

SEQ ID NO: 9711 - DNA, 86 bp, Homo sapiens
ggaggtggaggttgcagtgagccaagattgtgccactgcactccagcctgggtgacagagtgagactctgtctcaaaaaaacaaaa

SEQ ID NO: 9712 - DNA, 128 bp, Homo sapiens; identical to SEQ ID NO: 9710

SEQ ID NO: 9713 - DNA, 1058 bp, Homo sapiens
ggcctttggtagcctgccagcgcctccctcatttcccacatgtcacaggacttcttacggtccagccggctctgttcctcggttgtccctcccaagcacagtgcgtcctctcctgggacggctctattaataaccctcatgtggatgttctgggacggccattcatgcttcctgtcctcacgtgtggcccccactctacgccattcatgagagtgacccccaggcgtggctggctccctccctttctccactgccagcgtgtctgcaggatccaaggtgccatgtgtttgctgttcacagtgacccatgagtgagaggcagcggcgttcacaccatagtttaagttaacaatgcccggctgggacgtgcgctgtgtggccctcctcggggactgcagtgtggcagaaaaaaacaccctgagcttcctctcttctctttctcctgctgatattttgctgcccctaacaatcattggatccaatataagctataaaaggcagcctcacaagtgctgagcaggggagggaaggatggagaggggtctgcaggggcgactaaagattcccagcatgaaaggcaactgctatctatcaaggatattcatccatctaacgggggtaataatttatcctagagctgttgctaaggctgagttaatatagctgaagtgtactatcaaggttaatggcacccacctgagttcaaatctttgcacacatcctcacttaaatgtaaaaactcaacaaagaatgcaaatgaagccatgactcactccttcaacattactaggagacagaacccaacaaacttcaaataatctgcaggtagaaaaaaaccaccaaataccagcagacctccactgcctctataggtcatgagcagggtcaacaggtcaagggaggcttaaaggactcagtacaggccaggcaccggggctcacgccggtaatcccaaccctttgggaggcaaaggtgggaggattacttgagctcaggagtttgagaccagcctgggcaacatggtgaaatcccatctctacaaaaaaaaaaaaaaaaaaa

SEQ ID NO: 9714 - DNA, 1058 bp, Homo sapiens
ggcctttggtagcctgccagcgcctccctcatttcccacatgtcacaggacttcttacggtccagccggctctgttcctcggttgtccctcccaagcacagtgcgtcctctcctgggatggctctattaataaccctcatgtggatgttctgggacggccattcatgcttcctgtcctcacgtgtggcccccactctacgccattcatgagagtgacccccaggcgtggctggctccctccctttctccactgccagcgtgtctgcaggatccaaggtgccatgtgtttgctgttcacagtgacccatgagtgagaggcagcggcgttcacaccatagtttaagttaacaatgcccggctgggacgtgcgctgtgtggccctcctcggggactgcagtgtggcagaaaaaaacaccctgagcttcctctcttctctttctcctgctgatattttgctgcccctaacaatcattggatccaatataagctataaaaggcagcctcacaagtgctgagcaggggagggaaggatggagaggggtctgcaggggcgactaaagattcccagcatgaaaggcaactgctatctatcaaggatattcatccatctaacgggggtaataatttatcctagagctgttgctaaggctgagttaatatagctgaagtgtactatcaaggttaatggcacccacctgagttcaaatctttgcacacatcctcacttaaatgtaaaaactcaacaaagaatgcaaatgaagccatgactcactccttcaacattactaggagacagaacccaacaaacttcaaataatctgcaggtagaaaaaaaccaccaaataccagcagaccttcactgcctctataggtcatgagcagggtcaacaggtcaagggaggcttaaaggactcagtacaggccaggcaccggggctcacgccggtaatcccaaccctttgggaggcaaaggtgggaggattacttgagctcaggagtttgagaccagcctgggcaacatggtgaaatcccatctctacaaaaaaaaaaaaaaaaaaa

SEQ ID NO: 9715 - DNA, 811 bp, Homo sapiens
agaaggttcagtctcagtttagctgtagtctgctcagggtctcacacagctggactcaagatgtcaacttggagtgctatctcatttgaggctcagagttctctttccaggtcaattagattgttggcaaaattcaattgtttgaggctgtcagattgaagaacctattactttgctggctgcggctgaggacaatactcagcatctagaagccgtctgcggtttcttgccatatgacctgttccagaggccatctcacactaccaatctctgacttctgtctccaacctccagacccagacttaaaagactcatgtgattagggcaggccactcaaatactcttccttttaactcaaagataactgattagtaaccttaattatagctgtacagttccttctttcacgttatataacataatcatgagaatgatttcccatcatacatcatattcagatcttcatcccgtacccttccttcctaaatatttcagcttcaagtggagggattgatataagacgtggatactaggggacaggaatattgggggccgtcttaaaattctacttaccacatagattttcataattattgtatcatcatagtggattatgaactttttcataatgtgatgcatttaaaaaatcacctttactgcctcaaagcttattttaaagcctgaaattcaagtttgtctgaattatgatcccaacactacttagtggttgtttacacttttttggtattccttttttccgtctttttatttgcaacctttttgagatactttgttttataagtacctcgag

SEQ ID NO: 9716 - DNA, 811 bp, Homo sapiens
agaaggttcagtctcagtttagctgtagtctgctcagggtctcacacagctggactcaagatgtcaacttggagtgctatctcatttgaggctcagagttctctttccaggtcaattagattgttggcaaaattcaattgtttgaggctgtcagattgaagaacctattactttgctggctgcggctgaggacaatactcagcatctagaagccatctgcggtttcttgccatatgacctgttccagaggccatctcacactaccaatctctgacttctgtctccaacctccagacccagacttaaaagactcatgtgattagggcaggccactcaaatactcttccttttaactcaaagataactgattagtaaccttaattatagctgtacagttccttcttccacgttatataacataatcatgagaatgatttcccatcatacatcatattcagatcttcatcccgtacccttccttcctaaatatttcagcttcaagtggagggattgatataagacgtggatactaggggacaggaatattgggggccgtcttaaaattctacttaccacatagattttcataattattgtatcatcatagtggattatgaactttttcataatgtgatgcatttaaaaaatcacctttactgcctcaaagcttattttaaagcctgaaattcaagtttgtctgaattatgatcccaacactacttagtggttgtttacacttttttggtattccttttttccgtctttttatttgcaacctttctgagatactttgttttataagtacctcgag

SEQ ID NO: 9717 - DNA, 596 bp, Homo sapiens
cccattggcacttattggttccactggccagtccaccctacccaaggacagtgtcccctcctccattgtctgctgccatatttgattcctctctactctattatgggtcagcaggggcgggggcccactgtgagccttcctcatgcccttggcctcagccttctgagcagacacctgttcctacttgtcttggtgcccagggtagcaggaggcaaagtgcactcaggaccccttaactctaagattgtcaaacaacgacaatccccttggggccagtcattgggtgggttcatggttccttctgagaaaccccatatgcacttcattcttttcatttcccatgctctctcttttggcctgaagagagtatttttccttagaagaagcaagtagttaaaaaatattttcttcttttctttgacctagagcttaacaaaagacaaaactcagatgatgaagtacttaacatcttccttctttctttcctgctgacttgatgactctgctttggagcagtgggggcctcaaggtcgcagtggagaaagccatgggccagtgggaggtgaaacggagccaaaggtgggagagggctcgag

SEQ ID NO: 9718 - DNA, 596 bp, Homo sapiens; identical to SEQ ID NO: 9717

SEQ ID NO: 9719 - DNA, 1435 bp, Homo sapiens
ttcagtacacatatgcattgcctaacgatcaagtcagggtatttagcaaacccgtgacctcaaatatttattatttctttgtggtaaacacttttagaatcctctcttttaggaattctttgtatagtttcaaggcttctgccacctccacagaatgctttttggttctctctgtgatctgcacagtgtattttttctcatttcatctactgcttgtcctacactttcatttcttcatagcactcctgatgtatttcaaaatctttaaaagcattactggtaatcatcataataataataatgaggctataacattttccataccacagtcttagaaatcatctagtttattacgttcaaaaaatttcccaaaagaaggcctaccaaacatgtaataaacctaaaaatgtatcaggcactagttcagaggctgcatacaccaatctgatgctcataaactcattctagctatttgtacaatacaggctttcttctccaaggtttccatagagtcctagaggaattattagaatcctgagccggaattaaatgaaatgagtgttaaactgtgatctggtaaattgaggtagatggtgcaaacagctgattgttaaaggaaagtatcctcaagcctcacagttgcagggtctgttttataatctcatatcctagttttgcctatttggccattgaaaaccaatccaaacagcctctttaagtgacagctagattcaattcctgttgaggtgttgttgtttaaaccctctctccagagagcttcagtgggattgaaaaatacttgttccctggaagctacagtaggaatgctctatgatttgtgcataatacatatgataatctgagctttaaattaatccctaacccttctggataatacgctgcaggtaatttctccttcctatattacactgcggaagctagaattcagaagtatagtcttgctcaccttttaaggataatagagcttcaaaacagtattgcaggaagcaaagtggaataaacagaaaactgtcaaactagatgccactactgtgagttgttgaaaaggttaaatgtcagaagcaaatataattggatgactggaatgaatgactaagtgctttttacactaagttgcttgtttcacaagcaaccctagacccttagaaacagggttgatgaagtcaaagggacggccattctgtcttgtctttccccttctcagatcagcagaaaagcagcagaaaaacatggtgttggattgtagtccctacagatttggtacttccaagactctcccactccagcaaaaagaaaggacactcataacctttcctttttttctactccatggtaaaaatctagagatgggtatagtgcaaaatattcagattttggagaattattatccattttgtacttaaaaaaaagaaat

SEQ ID NO: 9720 - DNA, 1863 bp, Homo sapiens
taatttaggtcaaggtgagtttattgtccaaatagcataacctaattgcattcaaaaccattttcaaatccatctttaaactagtcagaaaacaggttattatttttttaaatcacttaacactgaacagataagacctcttaaaaggcagctgactatatcatgtcaccatcatagccaatacaacatttttgccatacttcctaaaaaccttttcgcatacactgatcatgctacttatcagcactttctaacatcctgaccaaacagacacccacacctcttatagagtacactgtgagagaataacatggacttgatatggcatcacacttgttttaaagcaaaaaaaaaaagaaaaagaaaagaaaaaaaaaagtccaagacaagaaactacataactgagagagaggagagagagagagatctgaggtacatgatataagggtgatgaacataatggaaaaaatccaatggcccgatgatttgctggggatgtaagagttggccagcagttaagaactaaaccaattaaaaataaaaatagaaactttgtttttcaaggacaggcacctgtcaaaagacattggatactgtaatggctacagtcagtaaggcactttatttccccaaagtaggctgcaggcgaagggatgcaggctgcagctacagcatgcacgtacacatttgctgatggcttctcaaaacctgagccgagaatagggtctgatagcccagccaagtttaaaagcagacacacacgaatgtagtatcgttgtgcctgaaatgaccattctgggttgtttagaatccagaatcatcaaaagccatgtggtatgaggaagtaataaatatcctcttgaatcttcttaccctattttgcacaaatggatggctgcatgaacagctcttgtaaattgctctgagtccacaccaatagaaacctgcactcattctatagctacagagggtttgttggcttaaggggactttatcatctcagcattaatttcccttttaaagctattctcaaggttggactgtctcagagataaacaaagaggaatccttttggcttagaagccaactggcttactcagacttcctccccttcctacctccaattcccacactaccaatattatcttcttgaactagaaaatcaattatttacatgacataaggtgcaagtctatttcttctcccagccctgtcccctgtggcccatggagagaaaattcccctgccctcttggagagagtcatctgatcctgccttatgttcttaacctttcagtcccagagctcccagggcacagtctggagaggccctagaggtgctagactgcagggaagcgcagctccgtctgaagagttgccaatcctgctagcaatgggatgcagcgtgatgctgtcagggttgtcttctcctctggctttgtcacttaagccatgtgtgcccctgacctggctgataagaggcagaacagagcctccagtacagagcacatagaccaaggatgacccagtagtaaggcatgctgtgctctccagtggggtcctgaggcagttcaaaataaggcctcctggaagaacagccccttcttcaaggagctcgcctctcagcacgcatggggtgttctgcggagggaactgcccttggctttctcctgcaggcttcttggctgttatggacccgcatggagtttaattatgcttagcatatatttttggcatactaggatttcttccccctaggatttggccaaaagaggggaaggatcaaaatttggcaggctgggggaacaactcggcccccactgatggagaaaaaaacaaacagatggaagtaaagacgagatag

SEQ ID NO: 9721 - DNA, 166 bp, Homo sapiens
agaaatcaggtgggagccacgaagaacagcaggcaggagccaggaaagctgcaggggcagtgttcccagagactccctagactctggagatggcaccgcaggcttctggtacctctcatgccaggagatgcttcctcacagcccagaatgagtagctggcaacaat

SEQ ID NO: 9722 - DNA, 643 bp, Homo sapiens
gattcttgtagtgccccccagtcccggaaggtgtgtgtctggcaacctggacttaccctgttaaacactggcagcatcatatacagtttctcttcttgttccttctgagtcatgtgccggggaggatggcacaactccgtgaagagccggcggaggtgcatcagtcctaaggcgttgtcttgtgggctgcactcctcctgcctcggccgccccatgatcctcttcaccatgttcatcttggctggttggtgagacgcacttctaattctgtaggaaaatgtcaatacatgaacagtcaaaacatcatcatcttgactaggtcaagcatgcatgtaagagcttataagaaatttgcaaaatagaaaattctgtctaaaatatatctttctacttctttaaacagaaaagacagagaagcaaaatttgataaatccccctgaagggcaaattatgaatctcagcattggaagttcttactcactttgccacaatttgtataaaatgtaaaacattaatcagacaagtaataaatgtttccaattagtttagtcatatcaagttcaaaaataaaggcgccgggaatagtggtgcacacctgcaatcccagcacttttggaggccgaggccggtgaatggctcgagc

SEQ ID NO: 9723 - DNA, 129 bp, Homo sapiens
gggcgcggcggctgacgcctgtaatcccagcactttgggaggcctaggcgggtggatcacgaggtcaggggatcgagactatcctggctaacacggtgaaaccccgtctctactaaaagtacaaaaaaa

SEQ ID NO: 9724 - DNA, 826 bp, Homo sapiens
aaataacacatgctttttttctcttagtgtttaggaggtcaaagtctaaaagcaaggtgttggtaaggctgcattccttctagaggtttcaggggagaattgtttccttgcctttttcagcatctaaaggatgtctgcattctatggctcatggactcctcttaatatcactccaacttcttggtcccattatcacatatactaccatttctgatcccactaccttcctcttataaagactcttgtgattacattgggctcacccagataatctgagataatctccccatctcaaagtcgttaacttgatcacatttgcaaagtcccatttgccatgtaagataacatatgaaatgttctgaggattaaaacactattctgccaactacaatgatgaaggaaatatgaggaggaatactagatcttaggttgcaatgattttgaagactttttgaatataggcacgggaagcactgacctgctgtggcctggacttccatggttccttttttgaaatactagaagataagaatcattgatagccatcttagaatcgttctgccactatgtacatgtgtatgaatgtgttctcttgtgtgtgtgtgtgtgtatgtatgtatgtgtgagatatggttagtgcaaaagttgttgtggtctttgccattaaaagtaatgcaaaaactgcaaatactttttcatcaacttagtagttgttttcagtaggtctcataaatgtcttagaataaatttcttacaatggctgggcacggtggctcaagcctgtaatcctagcactttgggaggctgaggcaggtggatcactcga

SEQ ID NO: 9725 - DNA, 100 bp, Homo sapiens
gcttgaacctgggaggtggaggttgcagtgagccgagattgcaccactgcactccagcctgggtgtcagagcgagactctgtctccaaaaaaaaaaaaaa

SEQ ID NO: 9726 - DNA, 2090 bp, Homo sapiens
gtgaagttgcaagttattttacttagatgtttaagaaaggtgatttctagaaagctagaaacttggggcactaggtttccaatgatgatacaactgctatttctattaaatgtctattctagtcccattgcaacatgcttgatatacataatctcctttattgctccaaacacatctaaaaggcagcattatctttattaccagatgaggaaaatgcttagaaatactttgataattagatgtttgtcttattttatgttcttgtaatagaagtatatttatttaactcttttttaccagttaattctggccttccttgcagtggaatttgaattggcattttggtaggcagattataatacaactggtataagttattgatggatagaattcatttccaagaagaaaatagaaatatttatgcaattccaaaatgtttttaaaatattaattatgcttaaaatatgtaagggaagagttcttatggcttatagttaaactaaactttttttataattgtatttcttgttttaaatcatgatgcaaaataacaaagagaatattgtgtttaattttttagtattaaatgactaaaagttactgggatttactaataagatttatgattcgcattctcttaccatgttatagaatgagtagaatgagtgtttatttccaatatggtatactatatgcagcaaaaagaggctacgttagtaatgaataataaagtcagagaaagtcttcatgatgagcaatatttcagttgccaagtctgctgcttttcttaaatccatttatttttactattttgctactgtttccctgtggagggtttaatacttctattttcttccttaaccaactcgatagttaaagattatatggagaaatgtacttaagtgtaaatggaaatgcctggctgtgaaagtctattggcttttcttaaaattaggagaatatttatagtcataaaaaaaacagagatggttgattacaaaggagagtagactatgagcttaagtgagctacttgagaaaactttttgtcactttatcacatgcacatggcacaaagttgagttgtgatgtgctataatttgagaaaggagtgattatagcatctttctcattctcccgcccccagtacctgataactccccccactgaatcacttaggaagctcttggaattgtgtgcctgatgtacggcaaaactgtagcctcccaggtcattgtggattcaagtagaagggagaggtggtcaagctgcctaaagacaaaacaggtcatagcataggcagagcttaagctagagatctaggcagatagagaagtggtgggggcacttgtggataagttgacagaactggaaccaaaatcttattcttaggtgggaggcaaagtaatttaaaatgatttggcagattgcagcaggatccccaagaaaagtctagatagaaacagtgcacaaaagtctgttttgctgagcataaggtaagaatggagcaggccttcagatggagtttgagattggggtcttggtccaacaggactaatttccaatgggtcttgtggcttttccaagggcttacagcaaagcttacctcccaggatataaagggacaaaacctctttggactgacaatttctaatctccaaggaaggaggctggatctctgccctccagagaatggtctgggcatggttttggggagtgtttgtgaactagctgggtacaaattcctcctcggggtcattgcctccatactctatttttacaaaattctcatttgcgggtccaaacttctctctctctcttaggtcctgacagctagaatcttgacggtatattttttaaagatgctacatttcttaagcctagcaacatcttagttgtataaaaaaatgtacaggctgggcacggtggctcacacttctaatccccgcactttgggaggcagaggcaggcagatcacctgaggtcaggagttcgagaccagcctgaccaatatgatgaaaccccgtctctactaaaaatacaaaaattagctggatgtggtggcaggcacctgtaatcccagctactcga

SEQ ID NO: 9727 - DNA, 160 bp, Homo sapiens
gatcacctcaggtcaggagttcaagaccagcctggccaaaatggtgaaaccccctctctactaaaaatacaaaaattagctgggtgtggtggtgggcacctgtaatcccagctactcaggaggctgaggcaggagaatcacttgaattcgggaggcagag

SEQ ID NO: 9728 - DNA, 238 bp, Homo sapiens
gggcagatcacctgaggtcaggagttcgagaccagcctggccaacatggtgaaaccccgtctctactaaaaatacaaaaattagccgggtgtggtggcaggcgcctgtaatcccagctactcgggaggctgaggcaggagaattgcttgaactcaggaggcggagggtgcagtgagccgagatcacgccactgcactccagcctgggtgaaagtgcaagactccatctcaaaaaaaaa

SEQ ID NO: 9729 - DNA, 952 bp, Homo sapiens
agtgatttaaccccccatgaagatgaggatctggaaatataagtaggatctgaaactggtctgcagctgcatgcacagaaacaccctgtaatgctgcctttgtaataaggaggaatccatactctcgacagtcactccctgactctcctcttcctcttcctcatctttctgtgcgtgtagtggatttactacggtttattttcattctcatcagttaggaggaaatggaagaaagagtaagtaactgaggttgaatatgttaacttactgggctgttttcattaagcaaataaacaacaataaaaaaaatctcaggctaaaatgaaccataggttccatttgtgaaatttgatgatacagataaccttaggttttcactactatctctatgtatatttcctaaatagcaatatcagcaaaacttcacaggcattggggtgggtaataatatttctttaaaatactcaggagaagtgaaagtcatttcaaaggactttaactgtcatggagtcattccacttcccacttaactttttctgcctcaaggtcccctctacgcagactgtctaaggcgtgatttaggtttttggaagcagctggtggcagcataaatctggccaaacaaggagggtgctgtggaactggcagtacaccctgagtgcccgaatgtcacatgaaacactctgcaatgaagcaagcagggtctactaggtgccctgatcaatgtgaatatatgtaaggaaaggagaaaatgttggttcgtatatttaatttacagacatacaattcaagtgtggtttcaggcccagcatgggtgatgttagaaaggccttgtgcagtgctcctccaagtggggtctgaggcatctggcctgtggtctcactgctgacctactgcatcaaaacaagggaatgctgtttttcagtgtccctggtgattcttggtatactcg

SEQ ID NO: 9730 - DNA, 2941 bp, Homo sapiens
aacatgaccagaataaagaagaactatttgccaacataccatttttaatggagactcaaaacattaaaaaaaaaaaatcagaactgagcattgccaggagaggtcagacttgccataggatagactttctgggtctcatatgaagcctctacagacagaagcgtgtcctatgttcatggcctttctggatgtaaactggagtctctgacaaactacagtgcttttccaagctcacctctctagcctgtgatgaacactgtcaaatacattaagtgaaacaccaaagcttagagggcgctgagcaacagaaaatggtatcagttggtccagcattcggacctcgtattcgtattgatggttctccccctccttgcctcctccctactccacctctgctgcccttatgcttggtacctctcattttggctctgcccctctggaagatcttctctgtatcctcatcctgcgatgagtggtggcaacgtgtgccctgagccctatgctaacgtgagtggtttctttcagtgttctcagattttccccagctcagtcctccctccttttctgcagcttggtcctggtttcttcttgccggcgtctccaagcagcaatgatggcttcatcgtccatttcttcctcttcctccctgtcagtgcttctccgatactgggaccgccgtccagatgcaaacctcccttcttctctgttttctgtcctctctttctctccctcttcttcagacctcataaagctctgggtgaacttcctcttggctccaaattcagagaagtctgacttggatgactcttccacatcttcccagtccctggacctggcccaatttgggcgctgtggttctggggactcttccctttctgaggactctggggtccggcggaagaagtagggctctgggctctcctctcgggaacttgaggtctcgttgtacgtggacctggagaacttgtgcatctctctgccctccctggtggaggaagatgagaaccgtgaagtgcttcttacagagttgccatttgcctcgtggtaggaggaggtgtcctgttcctctgactgggatttggaaaacttgtaactggaggatttagactctgtctccctgagcagggacgatctggtgtacttccctctggaacttccagaccagtcactttggaaaggaggtttttcctccgtcctgaggccactgagccacttattaatactgctatccatctctttgccaactctgctgccacttgcatagtgatcacagacagccagggaggagcatgtgtctgtttcaggtttctgggaattactgcgggaagaatatcggaagctccctatggcactgtcagtgtcctcatccccatcacccacaccatcatcctcatcttccttgaccttcttcttcttgaagagggagctgcgtttgttgtctgaggccagcttttccatttggtactcagacatcttctccctaagctccatctgcatctccttctccttccggccaagttcctttaggtccacattgtcagcaaagaggctgaagatgggcttgctggtccccctcactttgcttctgcaactttccgcgggtgagctcagtgtggtgttgcaggacagcacagactgcatgtcagagctgggtcttgcctggctctgaggcaacaggcagccacccaaggaggagctgctgtgtccactaagcatggagacttggtcatcccccaggcagctagccgctggtactgccttcatgcttgcaacagacggtgagcgggacaacagcagcatttcattttgcttctgagcaagggtctcactgactacattggcaatccagttctggatactggcaatggaaatggtgtctccaggccccactggcaggttaggcaggggtgtggtggggttggaggttgaacaccccgctatgttgcttgcagcctgagacaggtgggagcggtggctctgggtgctcagtactgacgtcgtgtccccatcagcgctgactgaggggtctgcagaccagaacgcagacaggggaatgctcccgctggccgtggagctgtccgcctcccagcttgccatagactggctctcctccagcgtctgccggcttctctccagcagctccagcctccgttgtctcttcttagccaaggccgagtcctcccccttgctgagctccaccacctcctccttgttctcactgcccaccttcttctggtgtttcagcttccaggcctggtaggctgtcaggctgacgtcggaggggttcttctcccctactgcctcctctgcaccgggctcaccgctgctgtctcccgctcccaagtctttcttgtgaaatccaaattggattctcttgatcttccatctttccagggcagtgagcttgtccttgttcctgctgcagaagttgtagaaggaactggcctcagagcccacgctgtcctcatcatcctcccgcaccctgctccctgcttctgagctcctgtctgccgcctcctctctcttgctcttggcgtggtacctccgggaagcctccttctcaatctccagcagcctctcgttccatgcgtcccaggtgctctccgaggacatcgagtctgcgcggcgcctcctgccgtggtccgggcggttcagctccagctgctgcttcaggacccagatgtcgtggctgctcacgctctcccaggcgctgctctcgctcagggtgcgccgccgcctccccaccgaggagccagcgtcgctctcctcctccttctcctcctcccttccccacctccggtacccttctgcttggtacctctcgtttcggctctgccactcctggatgatcctctccacgtcctcgtcctcgagctcctccccaccctggccagaggaggctgagcgccagccacctccatcctgggggaccttgtctgag

SEQ ID NO: 9731 - DNA, 2941 bp, Homo sapiens
aacatgaccagaataaagaagaactatttgccaacataccatttttaatggagactcaaaacattaaaaaaaaaaaaatcagaactgagcattgccaggagaggtcagacttgccataggatagactttctgggtctcatatgaagcctctacagacagaagcgtgtcctatgttcatggcctttctggatgtaaactggagtctctgacaaactacagtgcttttccaagctcacctctctagcctgtgatgaacactgccaaatacattaagtgaaacaccaaagcttagagggcgctgagcaacagaaaatggtatcagttggtccgcattcggacctcgtattcgtattgatggttctccccctccttgcctcctccctactccacctctgctgcccttatgcttggtacctctcattttggctctgcccctctggaagatcctctctgtatcctcatcctgcgatgagtggtggcaacgtgtgccctgagccctatgctaacgtgagtggtttctttcagtgttctcagattttccccagctcagtcctccctccttttctgcagcttggtcctggtttcttcttgccggcgtctccaagcagcaatgatggcttcatcgtccatttcttcctcttcctccctgtcagtgcttctccgatactgggaccgccgtccagatgcaaacctcccttcttctctgttttctgtcctctctttctctccctcttcttcagacctcataaagctctgggtgaacttcctcttggctccaaattcagagaagtctgacttggatgactcttccacatcttcccagtccctggacctggcccaatttgggcgctgtggttctggggactcttccctttctgaggactctggggtccggcggaagaagtagggctctgggctctcctctcgggaacttgaggtctcgttgtacgtggacctggagaacttgtgcatctctctgccctccctggtggaggaagatgagaaccgtgaagtgcttcttacagagttgccatttgcctcgtggtaggaggaggtgtcctgttcctctgactgggatttggaaaacttgtaactggaggatttagactctgtctccctgagcagggacgatctggtgtacttccctctggaacttccagaccagtcactttggaaaggaggtttttcctccgtcctgaggccactgagccacttattaatactgctatccatctctttgccaactctgctgccacttgcatagtgatcacagacagccagggaggagcatgtgtctgtttcaggtttctgggaattactgcgggaagaatatcggaagctccctatggcactgtcagtgtcctcatccccatcacccacaccatcatcctcatcttccttgaccttcttcttcttgaagagggagctgcgtttgttgtctgaggccagcttttccattttgtactcagacatcttctccctaagctccatctgcatctccttctccttccggccaagttcctttaggtccacattgtcagcaaagaggctgaagatgggcttgctggtccccctcactttgcttctgcaactttccgcgggtgagctcagtgtggtgttgcaggacagcacagactgcatgtcagagctgggtcttgcctggctctgaggcaacaggcagccacccaaggaggagctgctgtgtccactaagcatggagacttggtcatcccccaggcagctagccgctggtactgccttcatgcttgcaacagacggtgagcgggacaacagcagcatttcattttgcttctgagcaagggtctcactgactacattggcaatccagttctggatactggcaatggaaatggtgtctccaggccccactggcaggttaggcaggggtgtggtggggttggaggttgaacaccccgctatgttgcttgcagcctgagacaggtgggagcggtggctctgggtgctcagtactgacgtcgtgtccccatcagcgctgactgaggggtctgcagaccagaacgcagacaggggaatgctcccgctggccgtggagctgtccgcctcccagcttgccatagactggctctcctccagcgtctgccggcttctctccagcagctccagcctccgttgtctcttcttagccaaggccgagtcctcccccttgctgagctccaccacctcctccttgttctcactgcccaccttcttctggtgtttcagcttccaggcctggtaggctgtcaggctgacgtcggaggggttcttctcccctactgcctcctctgcaccgggctcaccgctgctgtctcccgctcccaagtctttcttgtgaaatccaaattggattctcttgatcttccatctttccagggcagtgagcttgtccttgttcctgctgcagaagttgtagaaggaactggcctcagagcccacgctgtcctcatcatcctcccgcaccctgctccctgcttctgagctcctgtctgccgcctcctctctcttgctcttggcgtggtacctccgggaagcctccttctcaatctccagcagcctctcgttccatgcgtcccaggtgctctccgaggacatcgagtctgcgcggcgcctcctgccgtggtccgggcggttcagctccagctgctgcttcaggacccagatgtcgtggctgctcacgctctcccaggcgctgctctcgctcagggtgcgccgccgcctccccaccgaggagccagcgtcgctctcctcctccttctcctcctcccttccccacctccggtacccttctgcttggtacctctcgtttcggctctgccactcctggatgatcctctccacgtcctcgtcctcgagctcctccccaccctggccagaggaggctgagcgccagccacctccatcctgggggaccttgtctgag

SEQ ID NO: 9732 - DNA, 562 bp, Homo sapiens
tctcctccatcaacttctcattgagctcccgcagctgcttcaggaagccgtcattggggtagatggcccgcttcttacgcacggtcatcaaagcctccaggatggccatgttgtggaagatcatcaggtaggcgaccaccagcactgctgaccggctgatgcccatttcgctgctgaccaggactttccctgaaatgaaaacacaagagaaaatgatgtaatgacagtggcttccttgtagtgttcttgtttgtttgttttctttggtaagtgctgttttaatatgctgcacttaaggtgtttactttgcctctgaagttcaccgggctcaagacacaggagggctgagcatcactgaccccatattacagatgggagacatcacaatccccactggccctgtatttgaaacactggagtgcatttctactttctcctcacaaaccgagcaacagagggaggagaaatacaagaacagggggaagggtgataaagcagaaaaggaatgagaagctaagataaatgaatcacagagaaatagaatcttggtgttgggaagcat

SEQ ID NO: 9733 - DNA, 665 bp, Homo sapiens
tctcctccatcaacttctcattgagctcccgcagctgcttcaggaagccctcattggggtagatggcccgcttcttacgcacggtcatcaaagcctccaggatggccatgttgtggaagatcatcaggtaggcgaccaccagcactgctgaccggctgatgcccatttcgctgctgaccaggactttccctgaaatgaaaacacaagagaaaatgatgtaatgacagtggcttccttgtagtgttcttgtttgtttgttttctttggtaagtgctgttttaatatgctgcacttaaggtgtttactttgcctctgaagttcatccgggctcaagacacaggagggctgagcatcactgaccccatattacagatgggagacatcacaatccccactggccctgtatttgaaacactggagtgcatttctactttctcctcacaaaccgagcaacagagggaggagaaatacaagaacagggggaagggtgataaagcagaaaaggaatgagaagctaagataaatgaatcacagagaaatagaatcttggtgttgggaagcatcataagtcacatcctaaacttgagaattccctttacaacatccctgatgctggatcacctgtcacacctgttatccagccactgctgaatgcttccagtgac

SEQ ID NO: 9734 - DNA, 1152 bp, Homo sapiens
gttcatcctcctcctgtgcctgaacacatttctgttctgctcactgaatgacaggcagagaaagggagagaaatccccatagaaagaagagcatacagccaagtttgcgttggctgtgcattctgctctcaatattcttagcctgtcttaacaatcattcttctgggtgggcatacatgcttttctttctcatgaaaaactgggcatctcagagcacggactaaaacccactaccaaggctgtgcctgcatctgactcatcaccctcaaagccctcctcatcctcctttctcattccctcattttcctcactagcctgggagagcactttgcccagcatggtgcttggctcatcattaagcttcctgaaaggacccacatcatcatcacttcctccatgaaggcttcaacaacatcccaggctaagttgctctgtgtttccacccagtgctcccacatcctgttttgcttatggctggcaccttgtaaggaaaatctgtttacctatccatcttccacaactctccattcccagcacacaaacactgtcagtcaccagcaggccttctctatctttgtgtctccatgcagtagaatcaaagaaagaattggttggattaattcatccatcaccaagggcacacaagggagccacggagaattagaaacaagcagcttcgagtcagacagctctgaatgtaacccctttttttacattttcaggtagaaaatcacttaaacctttagattttcaatcacctcatgtgtgagtgatgtcaatcaaggaaagtgactgagacaagtctcagtcattttaggggtttatttgcctaagttaaggatacccaggctgggcgcggtggctcatgcctgtaatcccagcactttgggaggctgaggcgggcggatcacctgagatcaggagttccaagccagccaggtcaacatggtgaaaccccgtttctactaaaactataaaaattagccaggcatggtggtggacgcctgtaatcccaactacttgggaggctgaggcaggagaatcactggaaccagggaggtggagattgcagtgagccaagatcatgccactgcactccagcctgggcgacagaggaaggctccgtctccaaaagaaaaaaaaaagatactc

SEQ ID NO: 9735 - DNA, 1152 bp, Homo sapiens; identical to SEQ ID NO: 9734

SEQ ID NO: 9736 - DNA, 1123 bp, Homo sapiens
gccaggcgcagtggctcacgcctggaatcccagcactttttgggagtcgtaggtgggcagatccctttaggtcaggagttcgagaccagcctggccaacatggcgaaaccccgtctctactaaaaatacagaaattagccagccgtggtgtcaggtacctgttgtcctggctactcgggaggctgaggcaggagaatcacttgaacccggaaggcggagattgcagtgagccaagatcatgctgcagtactccagcctgggtgacagagtgagactctgtctcaaaaaaataaggaaaaagaaaaggaaggaaagagcccacctcgctggttatgagcctcaggccagtaactcaactacgtttggagactgtggctctgtttctagccacggggaaaaaaacctatgaacaaacaggcacagcccctgcctccacgaagtgatgacttcatgccgcagacagcgaaccctcacctcccaacagatgcctcagtgactgcgggggaaaagccacgaaacagagggccagatgttgagactgaaccattcagggcctgagctgtctggaaggccggggcaggtccctgaggtggtgagttgggaaagagtggaacattccagaaagcaagagcctcaggtatgagtgctctgagctccaggggttcatcttgtcctctataaaggggggaatgacacagcgcagttgctggggaaaacagtggggttcctcaaagagtcacacacagagttactgtcattaccaaccagcgactccagtcctagggatctaccaaaagaactgaaaacaggcactcggcaaacacttgcacacacgtgcatagcagcatgagtcacggcagccgaaaggcgcaaacaactcgatagccatcaatagatgaatggataaacaaattgtggccgggcacagtggctcacgcctggaatcccagcactttgggaggctgaggtaggaagatagcttgaagccaggagtttgagaccatcttaggcagcaaagtgggatgcccatctgtaaaaaaaaatttttttttaattagctgggcatggtggcacacttgtagtctcggtggctcaggagactgagggaggaggatctctcgag

SEQ ID NO: 9737 - DNA, 1155 bp, Homo sapiens
ctcccctgtgtttccgaaatggggaaagaaaggccaggcgcagtggctcacgcctggaatcccagcactttttgggaggcggaggtgggcagatcccttgaggtcaggagttcgagaccagcctggccaacatggcgaaaccccgtctctactaaaaatacagaaattagccagccgtggtgtcaggtacctgttgtcctggctactcgggaggctgaggcaggagaatcacttgaacccggaaggcggagattgcagtgagccaagatcatgctgcagtactccagcctgggtgacagagtgagactctgtctcaaaaaaataaggaaaaagaaaaggaaggaaagagcccacctcgctggttatgagcctcaggccagtaactcaactacgtttggagactgtggctctgtttctagccacggggaaaaaaacctatgaacaaacaggcacagcccctgcctccacgaagtgatgacttcatgccgcagacagcgaaccctcacctcccaacagatgcctcagtgactgcgggggaaaagccacgaaacagagggccagatgttgagactgaaccattcagggcctgagctgtctggaaggccggggcaggtccctgaggtggtgagttgggaaagagtggaacattccagaaagcaagagcctcaggtatgagtgctctgagctccaggggttcatcttgtcctctataaaggggggaatgacacagcgcagttgctggggaaaacagtggggttcctcaaagagtcacacacagagttactgtcattaccaaccagcgactccagtcctagggatctaccaaaagaactgaaaacaggcactcggcaaacacttgcacacacgtgcatagcagcatgagtcacggcagccgaaaggcgcaaacaactcgatagccatcaatagatgaatggataaacaaattgtggccgggcacagtggctcacgcctggaatcccagcactttgggaggctgaggtaggaagatagcttgaagccaggagtttgagaccatcttaggcagcaaagtgggatgcccatctgtaaaaaaaaatttttttttaattagctgggcatggtggcacacttgtagtctcggtggctcaggagactgagggaggaggatctctcgag

SEQ ID NO: 9738 - DNA, 288 bp, Homo sapiens
ggtgcggtggctcacgcctgtaatcccagcactttgggaggccaagacgggcggatcgcgaggtcaggagatcgagaccatcctggctaacacgatgaaaccccgtctctactaaaaatacaaaaaattagccaggcgtagtggcaggcgcctgtagtcccagctactcaggaggctgaggcaggagaatggcgtgaacccaggaggcggagcttgcagtgagccgagatggcaccactgcactccagcctggatgactgagcgagactctgtctcaaaaaaatcaaa

SEQ ID NO: 9739 - DNA, 288 bp, Homo sapiens; identical to SEQ ID NO: 9738

SEQ ID NO: 9740 - DNA, 197 bp, Homo sapiens
ttatccagccctcctggtgggccaggcgtttgggggaccaactcaatcatttgctgcgacttccatgctttagcactgaatatcttgtgtcctaggaaacccctctgtcccagtgaaaccttgtcaccctgcagtcagcaacctgcctgcaggcatggtgcctggccccctctgggaggtgggtgtccctgagcttc

SEQ ID NO: 9741 - DNA, 38771 bp, Homo sapiens; identical to SEQ ID NO: 7638
  SITE (29356): n equals a,t,g, or c
  SITE (29357): n equals a,t,g, or c
  SITE (29358): n equals a,t,g, or c
  SITE (29359): n equals a,t,g, or c
  SITE (29360): n equals a,t,g, or c
  SITE (29361): n equals a,t,g, or c
  SITE (29362): n equals a,t,g, or c
  SITE (29363): n equals a,t,g, or c
  SITE (29364): n equals a,t,g, or c
  SITE (29365): n equals a,t,g, or c
  SITE (29366): n equals a,t,g, or c
  SITE (29367): n equals a,t,g, or c
  SITE (29368): n equals a,t,g, or c
  SITE (29369): n equals a,t,g, or c
  SITE (29370): n equals a,t,g, or c
  SITE (29371): n equals a,t,g, or c
  SITE (29372): n equals a,t,g, or c
  SITE (29373): n equals a,t,g, or c
  SITE (29374): n equals a,t,g, or c
  SITE (29375): n equals a,t,g, or c
  SITE (29376): n equals a,t,g, or c
  SITE (29377): n equals a,t,g, or c
  SITE (29378): n equals a,t,g, or c
  SITE (29379): n equals a,t,g, or c
  SITE (29380): n equals a,t,g, or c
  SITE (29381): n equals a,t,g, or c
  SITE (29382): n equals a,t,g, or c
  SITE (29383): n equals a,t,g, or c
  SITE (29384): n equals a,t,g, or c
  SITE (29385): n equals a,t,g, or c
  SITE (29386): n equals a,t,g, or c
  SITE (29387): n equals a,t,g, or c
  SITE (29388): n equals a,t,g, or c
  SITE (29389): n equals a,t,g, or c
  SITE (29390): n equals a,t,g, or c
  SITE (29391): n equals a,t,g, or c
  SITE (29392): n equals a,t,g, or c
  SITE (29393): n equals a,t,g, or c
  SITE (29394): n equals a,t,g, or c
  SITE (29395): n equals a,t,g, or c
  SITE (29396): n equals a,t,g, or c
  SITE (29397): n equals a,t,g, or c
  SITE (29398): n equals a,t,g, or c
  SITE (29399): n equals a,t,g, or c
  SITE (29400): n equals a,t,g, or c
  SITE (29401): n equals a,t,g, or c
  SITE (29402): n equals a,t,g, or c
  SITE (29403): n equals a,t,g, or c
  SITE (29404): n equals a,t,g, or c
  SITE (29405): n equals a,t,g, or c
  SITE (29406): n equals a,t,g, or c
  SITE (29407): n equals a,t,g, or c
  SITE (29408): n equals a,t,g, or c
  SITE (29409): n equals a,t,g, or c
  SITE (29410): n equals a,t,g, or c
  SITE (29411): n equals a,t,g, or c
  SITE (29412): n equals a,t,g, or c
  SITE (29413): n equals a,t,g, or c
  SITE (29414): n equals a,t,g, or c
  SITE (29415): n equals a,t,g, or c
  SITE (29416): n equals a,t,g, or c
  SITE (29417): n equals a,t,g, or c
  SITE (29418): n equals a,t,g, or c
  SITE (29419): n equals a,t,g, or c
  SITE (29420): n equals a,t,g, or c
  SITE (29421): n equals a,t,g, or c
  SITE (29422): n equals a,t,g, or c
  SITE (29423): n equals a,t,g, or c
  SITE (29424): n equals a,t,g, or c
  SITE (29425): n equals a,t,g, or c
  SITE (29426): n equals a,t,g, or c
  SITE (29427): n equals a,t,g, or c
  SITE (29428): n equals a,t,g, or c
  SITE (29429): n equals a,t,g, or c
  SITE (29430): n equals a,t,g, or c
  SITE (29431): n equals a,t,g, or c
  SITE (29432): n equals a,t,g, or c
  SITE (29433): n equals a,t,g, or c
  SITE (29434): n equals a,t,g, or c
  SITE (29435): n equals a,t,g, or c
  SITE (29436): n equals a,t,g, or c
  SITE (29437): n equals a,t,g, or c
  SITE (29438): n equals a,t,g, or c
  SITE (29439): n equals a,t,g, or c
  SITE (29440): n equals a,t,g, or c
  SITE (29441): n equals a,t,g, or c
  SITE (29442): n equals a,t,g, or c
  SITE (29443): n equals a,t,g, or c
  SITE (29444): n equals a,t,g, or c
  SITE (29445): n equals a,t,g, or c
  SITE (29446): n equals a,t,g, or c
  SITE (29447): n equals a,t,g, or c
  SITE (29448): n equals a,t,g, or c
  SITE (29449): n equals a,t,g, or c
  SITE (29450): n equals a,t,g, or c
  SITE (29451): n equals a,t,g, or c
  SITE (29452): n equals a,t,g, or c
  SITE (29453): n equals a,t,g, or c
  SITE (29454): n equals a,t,g, or c
  SITE (29455): n equals a,t,g, or c
  SITE (29456): n equals a,t,g, or c
  SITE (29457): n equals a,t,g, or c
  SITE (29458): n equals a,t,g, or c
  SITE (29459): n equals a,t,g, or c
  SITE (29460): n equals a,t,g, or c
  SITE (29461): n equals a,t,g, or c
  SITE (29462): n equals a,t,g, or c
  SITE (29463): n equals a,t,g, or c
  SITE (29464): n equals a,t,g, or c
  SITE (29465): n equals a,t,g, or c
  SITE (29466): n equals a,t,g, or c
  SITE (29467): n equals a,t,g, or c
  SITE (29468): n equals a,t,g, or c
  SITE (29469): n equals a,t,g, or c
  SITE (29470): n equals a,t,g, or c
  SITE (29471): n equals a,t,g, or c
  SITE (29472): n equals a,t,g, or c
  SITE (29473): n equals a,t,g, or c
  SITE (29474): n equals a,t,g, or c
  SITE (29475): n equals a,t,g, or c
  SITE (29476): n equals a,t,g, or c
  SITE (29477): n equals a,t,g, or c
  SITE (29478): n equals a,t,g, or c
  SITE (29479): n equals a,t,g, or c
  SITE (29480): n equals a,t,g, or c
  SITE (29481): n equals a,t,g, or c
  SITE (29482): n equals a,t,g, or c
  SITE (29483): n equals a,t,g, or c
  SITE (29484): n equals a,t,g, or c
  SITE (29485): n equals a,t,g, or c
  SITE (29486): n equals a,t,g, or c
  SITE (29487): n equals a,t,g, or c
  SITE (29488): n equals a,t,g, or c
  SITE (29489): n equals a,t,g, or c
  SITE (29490): n equals a,t,g, or c
  SITE (29491): n equals a,t,g, or c
  SITE (29492): n equals a,t,g, or c
  SITE (29493): n equals a,t,g, or c
  SITE (29494): n equals a,t,g, or c
  SITE (29495): n equals a,t,g, or c
  SITE (29496): n equals a,t,g, or c
  SITE (29497): n equals a,t,g, or c
  SITE (29498): n equals a,t,g, or c
  SITE (29499): n equals a,t,g, or c
  SITE (29500): n equals a,t,g, or c
  SITE (29501): n equals a,t,g, or c
  SITE (29502): n equals a,t,g, or c
  SITE (29503): n equals a,t,g, or c
  SITE (29504): n equals a,t,g, or c
  SITE (29505): n equals a,t,g, or c
  SITE (29506): n equals a,t,g, or c
  SITE (29507): n equals a,t,g, or c
  SITE (29508): n equals a,t,g, or c
  SITE (29509): n equals a,t,g, or c
  SITE (29510): n equals a,t,g, or c
  SITE (29511): n equals a,t,g, or c
  SITE (29512): n equals a,t,g, or c
  SITE (29513): n equals a,t,g, or c
  SITE (29514): n equals a,t,g, or c
  SITE (29515): n equals a,t,g, or c
  SITE (29516): n equals a,t,g, or c
  SITE (29517): n equals a,t,g, or c
  SITE (29518): n equals a,t,g, or c
  SITE (29519): n equals a,t,g, or c
  SITE (29520): n equals a,t,g, or c
  SITE (29521): n equals a,t,g, or c
  SITE (29522): n equals a,t,g, or c
  SITE (29523): n equals a,t,g, or c
  SITE (29524): n equals a,t,g, or c
  SITE (29525): n equals a,t,g, or c
  SITE (29526): n equals a,t,g, or c
  SITE (29527): n equals a,t,g, or c
  SITE (29528): n equals a,t,g, or c
  SITE (29529): n equals a,t,g, or c
  SITE (29530): n equals a,t,g, or c
  SITE (29531): n equals a,t,g, or c
  SITE (29532): n equals a,t,g, or c
  SITE (29533): n equals a,t,g, or c
  SITE (29534): n equals a,t,g, or c
  SITE (29535): n equals a,t,g, or c
  SITE (29536): n equals a,t,g, or c
  SITE (29537): n equals a,t,g, or c
  SITE (29538): n equals a,t,g, or c
  SITE (29539): n equals a,t,g, or c
  SITE (29540): n equals a,t,g, or c
  SITE (29541): n equals a,t,g, or c
  SITE (29542): n equals a,t,g, or c
  SITE (29543): n equals a,t,g, or c
  SITE (29544): n equals a,t,g, or c
  SITE (29545): n equals a,t,g, or c
  SITE (29546): n equals a,t,g, or c
  SITE (29547): n equals a,t,g, or c
  SITE (29548): n equals a,t,g, or c
  SITE (29549): n equals a,t,g, or c
  SITE (29550): n equals a,t,g, or c
  SITE (29551): n equals a,t,g, or c
  SITE (29552): n equals a,t,g, or c
  SITE (29553): n equals a,t,g, or c
  SITE (29554): n equals a,t,g, or c
  SITE (29555): n equals a,t,g, or c
  SITE (29556): n equals a,t,g, or c
  SITE (29557): n equals a,t,g, or c
  SITE (29558): n equals a,t,g, or c
  SITE (29559): n equals a,t,g, or c
  SITE (29560): n equals a,t,g, or c
  SITE (29561): n equals a,t,g, or c
  SITE (29562): n equals a,t,g, or c
  SITE (29563): n equals a,t,g, or c
  SITE (29564): n equals a,t,g, or c
  SITE (29565): n equals a,t,g, or c
  SITE (29566): n equals a,t,g, or c
  SITE (29567): n equals a,t,g, or c
  SITE (29568): n equals a,t,g, or c
  SITE (29569): n equals a,t,g, or c
  SITE (29570): n equals a,t,g, or c
  SITE (29571): n equals a,t,g, or c
  SITE (29572): n equals a,t,g, or c
  SITE (29573): n equals a,t,g, or c
  SITE (29574): n equals a,t,g, or c
  SITE (29575): n equals a,t,g, or c
  SITE (29576): n equals a,t,g, or c
  SITE (29577): n equals a,t,g, or c
  SITE (29578): n equals a,t,g, or c
  SITE (29579): n equals a,t,g, or c
  SITE (29580): n equals a,t,g, or c
  SITE (29581): n equals a,t,g, or c
  SITE (29582): n equals a,t,g, or c
  SITE (29583): n equals a,t,g, or c
  SITE (29584): n equals a,t,g, or c
  SITE (29585): n equals a,t,g, or c
  SITE (29586): n equals a,t,g, or c
  SITE (29587): n equals a,t,g, or c
  SITE (29588): n equals a,t,g, or c
  SITE (29589): n equals a,t,g, or c
  SITE (29590): n equals a,t,g, or c
  SITE (29591): n equals a,t,g, or c
  SITE (29592): n equals a,t,g, or c
  SITE (29593): n equals a,t,g, or c
  SITE (29594): n equals a,t,g, or c
  SITE (29595): n equals a,t,g, or c
  SITE (29596): n equals a,t,g, or c
  SITE (29597): n equals a,t,g, or c
  SITE (29598): n equals a,t,g, or c
  SITE (29599): n equals a,t,g, or c
  SITE (29600): n equals a,t,g, or c
  SITE (29601): n equals a,t,g, or c
  SITE (29602): n equals a,t,g, or c
  SITE (29603): n equals a,t,g, or c
  SITE (29604): n equals a,t,g, or c
  SITE (29605): n equals a,t,g, or c
  SITE (29606): n equals a,t,g, or c
  SITE (29607): n equals a,t,g, or c
  SITE (29608): n equals a,t,g, or c
  SITE (29609): n equals a,t,g, or c
  SITE (29610): n equals a,t,g, or c
  SITE (29611): n equals a,t,g, or c
  SITE (29612): n equals a,t,g, or c
  SITE (29613): n equals a,t,g, or c
  SITE (29614): n equals a,t,g, or c
  SITE (29615): n equals a,t,g, or c
  SITE (29616): n equals a,t,g, or c
  SITE (29617): n equals a,t,g, or c
  SITE (29618): n equals a,t,g, or c
  SITE (29619): n equals a,t,g, or c
  SITE (29620): n equals a,t,g, or c
  SITE (29621): n equals a,t,g, or c
  SITE (29622): n equals a,t,g, or c
  SITE (29623): n equals a,t,g, or c
  SITE (29624): n equals a,t,g, or c
  SITE (29625): n equals a,t,g, or c
  SITE (29626): n equals a,t,g, or c
  SITE (29627): n equals a,t,g, or c
  SITE (29628): n equals a,t,g, or c
  SITE (29629): n equals a,t,g, or c
  SITE (29630): n equals a,t,g, or c
  SITE (29631): n equals a,t,g, or c
  SITE (29632): n equals a,t,g, or c
  SITE (29633): n equals a,t,g, or c
  SITE (29634): n equals a,t,g, or c
  SITE (29635): n equals a,t,g, or c
  SITE (29636): n equals a,t,g, or c
  SITE (29637): n equals a,t,g, or c
  SITE (29638): n equals a,t,g, or c
  SITE (29639): n equals a,t,g, or c
  SITE (29640): n equals a,t,g, or c
  SITE (29641): n equals a,t,g, or c
  SITE (29642): n equals a,t,g, or c
  SITE (29643): n equals a,t,g, or c
  SITE (29644): n equals a,t,g, or c
  SITE (29645): n equals a,t,g, or c
  SITE (29646): n equals a,t,g, or c
  SITE (29647): n equals a,t,g, or c
  SITE (29648): n equals a,t,g, or c
  SITE (29649): n equals a,t,g, or c
  SITE (29650): n equals a,t,g, or c
  SITE (29651): n equals a,t,g, or c
  SITE (29652): n equals a,t,g, or c
  SITE (29653): n equals a,t,g, or c
  SITE (29654): n equals a,t,g, or c
  SITE (29655): n equals a,t,g, or c
  SITE (29656): n equals a,t,g, or c
  SITE (29657): n equals a,t,g, or c
  SITE (29658): n equals a,t,g, or c
  SITE (29659): n equals a,t,g, or c
  SITE (29660): n equals a,t,g, or c
  SITE (29661): n equals a,t,g, or c
  SITE (29662): n equals a,t,g, or c
  SITE (29663): n equals a,t,g, or c
  SITE (29664): n equals a,t,g, or c
  SITE (29665): n equals a,t,g, or c
  SITE (29666): n equals a,t,g, or c
  SITE (29667): n equals a,t,g, or c
  SITE (29668): n equals a,t,g, or c
  SITE (29669): n equals a,t,g, or c
  SITE (29670): n equals a,t,g, or c
  SITE (29671): n equals a,t,g, or c
  SITE (29672): n equals a,t,g, or c
  SITE (29673): n equals a,t,g, or c
  SITE (29674): n equals a,t,g, or c
  SITE (29675): n equals a,t,g, or c
  SITE (29676): n equals a,t,g, or c
  SITE (29677): n equals a,t,g, or c
  SITE (29678): n equals a,t,g, or c
  SITE (29679): n equals a,t,g, or c
  SITE (29680): n equals a,t,g, or c
  SITE (29681): n equals a,t,g, or c
  SITE (29682): n equals a,t,g, or c
  SITE (29683): n equals a,t,g, or c
  SITE (29684): n equals a,t,g, or c
  SITE (29685): n equals a,t,g, or c
  SITE (29686): n equals a,t,g, or c
  SITE (29687): n equals a,t,g, or c
  SITE (29688): n equals a,t,g, or c
  SITE (29689): n equals a,t,g, or c
  SITE (29690): n equals a,t,g, or c
  SITE (29691): n equals a,t,g, or c
  SITE (29692): n equals a,t,g, or c
  SITE (29693): n equals a,t,g, or c
  SITE (29694): n equals a,t,g, or c
  SITE (29695): n equals a,t,g, or c
  SITE (29696): n equals a,t,g, or c
  SITE (29697): n equals a,t,g, or c
  SITE (29698): n equals a,t,g, or c
  SITE (29699): n equals a,t,g, or c
  SITE (29700): n equals a,t,g, or c
  SITE (29701): n equals a,t,g, or c
  SITE (29702): n equals a,t,g, or c
  SITE (29703): n equals a,t,g, or c
  SITE (29704): n equals a,t,g, or c
  SITE (29705): n equals a,t,g, or c
  SITE (29706): n equals a,t,g, or c
  SITE (29707): n equals a,t,g, or c
  SITE (29708): n equals a,t,g, or c
  SITE (29709): n equals a,t,g, or c
  SITE (29710): n equals a,t,g, or c
  SITE (29711): n equals a,t,g, or c
  SITE (29712): n equals a,t,g, or c
  SITE (29713): n equals a,t,g, or c
  SITE (29714): n equals a,t,g, or c
  SITE (29715): n equals a,t,g, or c
  SITE (29716): n equals a,t,g, or c
  SITE (29717): n equals a,t,g, or c
  SITE (29718): n equals a,t,g, or c
  SITE (29719): n equals a,t,g, or c
  SITE (29720): n equals a,t,g, or c
  SITE (29721): n equals a,t,g, or c
  SITE (29722): n equals a,t,g, or c
  SITE (29723): n equals a,t,g, or c
  SITE (29724): n equals a,t,g, or c
  SITE (29725): n equals a,t,g, or c
  SITE (29726): n equals a,t,g, or c
  SITE (29727): n equals a,t,g, or c
  SITE (29728): n equals a,t,g, or c
  SITE (29729): n equals a,t,g, or c
  SITE (29730): n equals a,t,g, or c
  SITE (29731): n equals a,t,g, or c
  SITE (29732): n equals a,t,g, or c
  SITE (29733): n equals a,t,g, or c
  SITE (29734): n equals a,t,g, or c
  SITE (29735): n equals a,t,g, or c
  SITE (29736): n equals a,t,g, or c
  SITE (29737): n equals a,t,g, or c
  SITE (29738): n equals a,t,g, or c
  SITE (29739): n equals a,t,g, or c
  SITE (29740): n equals a,t,g, or c
  SITE (29741): n equals a,t,g, or c
  SITE (29742): n equals a,t,g, or c
  SITE (29743): n equals a,t,g, or c
  SITE (29744): n equals a,t,g, or c
  SITE (29745): n equals a,t,g, or c
  SITE (29746): n equals a,t,g, or c
  SITE (29747): n equals a,t,g, or c
  SITE (29748): n equals a,t,g, or c
  SITE (29749): n equals a,t,g, or c
  SITE (29750): n equals a,t,g, or c
  SITE (29751): n equals a,t,g, or c
  SITE (29752): n equals a,t,g, or c
  SITE (29753): n equals a,t,g, or c
  SITE (29754): n equals a,t,g, or c
  SITE (29755): n equals a,t,g, or c
  SITE (29756): n equals a,t,g, or c
  SITE (29757): n equals a,t,g, or c
  SITE (29758): n equals a,t,g, or c
  SITE (29759): n equals a,t,g, or c
  SITE (29760): n equals a,t,g, or c
  SITE (29761): n equals a,t,g, or c
  SITE (29762): n equals a,t,g, or c
  SITE (29763): n equals a,t,g, or c
  SITE (29764): n equals a,t,g, or c
  SITE (29765): n equals a,t,g, or c
  SITE (29766): n equals a,t,g, or c
  SITE (29767): n equals a,t,g, or c
  SITE (29768): n equals a,t,g, or c
  SITE (29769): n equals a,t,g, or c
  SITE (29770): n equals a,t,g, or c
  SITE (29771): n equals a,t,g, or c
  SITE (29772): n equals a,t,g, or c
  SITE (29773): n equals a,t,g, or c
  SITE (29774): n equals a,t,g, or c
  SITE (29775): n equals a,t,g, or c
  SITE (29776): n equals a,t,g, or c
  SITE (29777): n equals a,t,g, or c
  SITE (29778): n equals a,t,g, or c
  SITE (29779): n equals a,t,g, or c
  SITE (29780): n equals a,t,g, or c
  SITE (29781): n equals a,t,g, or c
  SITE (29782): n equals a,t,g, or c
  SITE (29783): n equals a,t,g, or c
  SITE (29784): n equals a,t,g, or c
  SITE (29785): n equals a,t,g, or c
  SITE (29786): n equals a,t,g, or c
  SITE (29787): n equals a,t,g, or c
  SITE (29788): n equals a,t,g, or c
  SITE (29789): n equals a,t,g, or c
  SITE (29790): n equals a,t,g, or c
  SITE (29791): n equals a,t,g, or c
  SITE (29792): n equals a,t,g, or c
  SITE (29793): n equals a,t,g, or c
  SITE (29794): n equals a,t,g, or c
  SITE (29795): n equals a,t,g, or c
  SITE (29796): n equals a,t,g, or c
  SITE (29797): n equals a,t,g, or c
  SITE (29798): n equals a,t,g, or c
  SITE (29799): n equals a,t,g, or c
  SITE (29800): n equals a,t,g, or c
  SITE (29801): n equals a,t,g, or c
  SITE (29802): n equals a,t,g, or c
  SITE (29803): n equals a,t,g, or c
  SITE (29804): n equals a,t,g, or c
  SITE (29805): n equals a,t,g, or c
  SITE (29806): n equals a,t,g, or c
  SITE (29807): n equals a,t,g, or c
  SITE (29808): n equals a,t,g, or c
  SITE (29809): n equals a,t,g, or c
  SITE (29810): n equals a,t,g, or c
  SITE (29811): n equals a,t,g, or c
  SITE (29812): n equals a,t,g, or c
  SITE (29813): n equals a,t,g, or c
  SITE (29814): n equals a,t,g, or c
  SITE (29815): n equals a,t,g, or c
  SITE (29816): n equals a,t,g, or c
  SITE (29817): n equals a,t,g, or c
  SITE (29818): n equals a,t,g, or c
  SITE (29819): n equals a,t,g, or c
  SITE (29820): n equals a,t,g, or c
  SITE (29821): n equals a,t,g, or c
  SITE (29822): n equals a,t,g, or c
  SITE (29823): n equals a,t,g, or c
  SITE (29824): n equals a,t,g, or c
  SITE (29825): n equals a,t,g, or c
  SITE (29826): n equals a,t,g, or c
  SITE (29827): n equals a,t,g, or c
  SITE (29828): n equals a,t,g, or c
  SITE (29829): n equals a,t,g, or c
  SITE (29830): n equals a,t,g, or c
  SITE (29831): n equals a,t,g, or c
  SITE (29832): n equals a,t,g, or c
  SITE (29833): n equals a,t,g, or c
  SITE (29834): n equals a,t,g, or c
  SITE (29835): n equals a,t,g, or c
  SITE (29836): n equals a,t,g, or c
  SITE (29837): n equals a,t,g, or c
  SITE (29838): n equals a,t,g, or c
  SITE (29839): n equals a,t,g, or c
  SITE (29840): n equals a,t,g, or c
  SITE (29841): n equals a,t,g, or c
  SITE (29842): n equals a,t,g, or c
  SITE (29843): n equals a,t,g, or c
  SITE (29844): n equals a,t,g, or c
  SITE (29845): n equals a,t,g, or c
  SITE (29846): n equals a,t,g, or c
  SITE (29847): n equals a,t,g, or c
  SITE (29848): n equals a,t,g, or c
  SITE (29849): n equals a,t,g, or c
  SITE (29850): n equals a,t,g, or c
  SITE (29851): n equals a,t,g, or c
  SITE (29852): n equals a,t,g, or c
  SITE (29853): n equals a,t,g, or c
  SITE (29854): n equals a,t,g, or c
  SITE (29855): n equals a,t,g, or c
  SITE (29856): n equals a,t,g, or c
  SITE (29857): n equals a,t,g, or c
  SITE (29858): n equals a,t,g, or c
  SITE (29859): n equals a,t,g, or c
  SITE (29860): n equals a,t,g, or c
  SITE (29861): n equals a,t,g, or c
  SITE (29862): n equals a,t,g, or c
  SITE (29863): n equals a,t,g, or c
  SITE (29864): n equals a,t,g, or c
  SITE (29865): n equals a,t,g, or c
  SITE (29866): n equals a,t,g, or c
  SITE (29867): n equals a,t,g, or c
  SITE (29868): n equals a,t,g, or c
  SITE (29869): n equals a,t,g, or c
  SITE (29870): n equals a,t,g, or c
  SITE (29871): n equals a,t,g, or c
  SITE (29872): n equals a,t,g, or c
  SITE (29873): n equals a,t,g, or c
  SITE (29874): n equals a,t,g, or c
  SITE (29875): n equals a,t,g, or c
  SITE (29876): n equals a,t,g, or c
  SITE (29877): n equals a,t,g, or c
  SITE (29878): n equals a,t,g, or c
  SITE (29879): n equals a,t,g, or c
  SITE (29880): n equals a,t,g, or c
  SITE (29881): n equals a,t,g, or c
  SITE (29882): n equals a,t,g, or c
  SITE (29883): n equals a,t,g, or c
  SITE (29884): n equals a,t,g, or c
  SITE (29885): n equals a,t,g, or c
  SITE (29886): n equals a,t,g, or c
  SITE (29887): n equals a,t,g, or c
  SITE (29888): n equals a,t,g, or c
  SITE (29889): n equals a,t,g, or c
  SITE (29890): n equals a,t,g, or c
  SITE (29891): n equals a,t,g, or c
  SITE (29892): n equals a,t,g, or c
  SITE (29893): n equals a,t,g, or c
  SITE (29894): n equals a,t,g, or c
  SITE (29895): n equals a,t,g, or c
  SITE (29896): n equals a,t,g, or c
  SITE (29897): n equals a,t,g, or c
  SITE (29898): n equals a,t,g, or c
  SITE (29899): n equals a,t,g, or c
  SITE (29900): n equals a,t,g, or c
  SITE (29901): n equals a,t,g, or c
  SITE (29902): n equals a,t,g, or c
  SITE (29903): n equals a,t,g, or c
  SITE (29904): n equals a,t,g, or c
  SITE (29905): n equals a,t,g, or c
  SITE (29906): n equals a,t,g, or c
  SITE (29907): n equals a,t,g, or c
  SITE (29908): n equals a,t,g, or c
  SITE (29909): n equals a,t,g, or c
  SITE (29910): n equals a,t,g, or c
  SITE (29911): n equals a,t,g, or c
  SITE (29912): n equals a,t,g, or c
  SITE (29913): n equals a,t,g, or c
  SITE (29914): n equals a,t,g, or c
  SITE (29915): n equals a,t,g, or c
  SITE (29916): n equals a,t,g, or c
  SITE (29917): n equals a,t,g, or c
  SITE (29918): n equals a,t,g, or c
  SITE (29919): n equals a,t,g, or c
  SITE (29920): n equals a,t,g, or c
  SITE (29921): n equals a,t,g, or c
  SITE (29922): n equals a,t,g, or c
  SITE (29923): n equals a,t,g, or c
  SITE (29924): n equals a,t,g, or c
  SITE (29925): n equals a,t,g, or c
  SITE (29926): n equals a,t,g, or c
  SITE (29927): n equals a,t,g, or c
  SITE (29928): n equals a,t,g, or c
  SITE (29929): n equals a,t,g, or c
  SITE (29930): n equals a,t,g, or c
  SITE (29931): n equals a,t,g, or c
  SITE (29932): n equals a,t,g, or c
  SITE (29933): n equals a,t,g, or c
  SITE (29934): n equals a,t,g, or c
  SITE (29935): n equals a,t,g, or c
  SITE (29936): n equals a,t,g, or c
  SITE (29937): n equals a,t,g, or c
  SITE (29938): n equals a,t,g, or c
  SITE (29939): n equals a,t,g, or c
  SITE (29940): n equals a,t,g, or c
  SITE (29941): n equals a,t,g, or c
  SITE (29942): n equals a,t,g, or c
  SITE (29943): n equals a,t,g, or c
  SITE (29944): n equals a,t,g, or c
  SITE (29945): n equals a,t,g, or c
  SITE (29946): n equals a,t,g, or c
  SITE (29947): n equals a,t,g, or c
  SITE (29948): n equals a,t,g, or c
  SITE (29949): n equals a,t,g, or c
  SITE (29950): n equals a,t,g, or c
  SITE (29951): n equals a,t,g, or c
  SITE (29952): n equals a,t,g, or c
  SITE (29953): n equals a,t,g, or c
  SITE (29954): n equals a,t,g, or c
  SITE (29955): n equals a,t,g, or c
  SITE (29956): n equals a,t,g, or c
  SITE (29957): n equals a,t,g, or c
  SITE (29958): n equals a,t,g, or c
  SITE (29959): n equals a,t,g, or c
  SITE (29960): n equals a,t,g, or c
  SITE (29961): n equals a,t,g, or c
  SITE (29962): n equals a,t,g, or c
  SITE (29963): n equals a,t,g, or c
  SITE (29964): n equals a,t,g, or c
  SITE (29965): n equals a,t,g, or c
  SITE (29966): n equals a,t,g, or c
  SITE (29967): n equals a,t,g, or c
  SITE (29968): n equals a,t,g, or c
  SITE (29969): n equals a,t,g, or c
  SITE (29970): n equals a,t,g, or c
  SITE (29971): n equals a,t,g, or c
  SITE (29972): n equals a,t,g, or c
  SITE (29973): n equals a,t,g, or c
  SITE (29974): n equals a,t,g, or c
  SITE (29975): n equals a,t,g, or c
  SITE (29976): n equals a,t,g, or c
  SITE (29977): n equals a,t,g, or c
  SITE (29978): n equals a,t,g, or c
  SITE (29979): n equals a,t,g, or c
  SITE (29980): n equals a,t,g, or c
  SITE (29981): n equals a,t,g, or c
  SITE (29982): n equals a,t,g, or c
  SITE (29983): n equals a,t,g, or c
  SITE (29984): n equals a,t,g, or c
  SITE (29985): n equals a,t,g, or c
  SITE (29986): n equals a,t,g, or c
  SITE (29987): n equals a,t,g, or c
  SITE (29988): n equals a,t,g, or c
  SITE (29989): n equals a,t,g, or c
  SITE (29990): n equals a,t,g, or c
  SITE (29991): n equals a,t,g, or c
  SITE (29992): n equals a,t,g, or c
  SITE (29993): n equals a,t,g, or c
  SITE (29994): n equals a,t,g, or c
  SITE (29995): n equals a,t,g, or c
  SITE (29996): n equals a,t,g, or c
  SITE (29997): n equals a,t,g, or c
  SITE (29998): n equals a,t,g, or c
  SITE (29999): n equals a,t,g, or c
  SITE (30000): n equals a,t,g, or c
  SITE (30001): n equals a,t,g, or c
  SITE (30002): n equals a,t,g, or c
  SITE (30003): n equals a,t,g, or c
  SITE (30004): n equals a,t,g, or c
  SITE (30005): n equals a,t,g, or c
  SITE (30006): n equals a,t,g, or c
  SITE (30007): n equals a,t,g, or c
  SITE (30008): n equals a,t,g, or c
  SITE (30009): n equals a,t,g, or c
  SITE (30010): n equals a,t,g, or c
  SITE (30011): n equals a,t,g, or c
  SITE (30012): n equals a,t,g, or c
  SITE (30013): n equals a,t,g, or c
  SITE (30014): n equals a,t,g, or c
  SITE (30015): n equals a,t,g, or c
  SITE (30016): n equals a,t,g, or c
  SITE (30017): n equals a,t,g, or c
  SITE (30018): n equals a,t,g, or c
  SITE (30019): n equals a,t,g, or c
  SITE (30020): n equals a,t,g, or c
  SITE (30021): n equals a,t,g, or c
  SITE (30022): n equals a,t,g, or c
  SITE (30023): n equals a,t,g, or c
  SITE (30024): n equals a,t,g, or c
  SITE (30025): n equals a,t,g, or c
  SITE (30026): n equals a,t,g, or c
  SITE (30027): n equals a,t,g, or c
  SITE (30028): n equals a,t,g, or c
  SITE (30029): n equals a,t,g, or c
  SITE (30030): n equals a,t,g, or c
  SITE (30031): n equals a,t,g, or c
  SITE (30032): n equals a,t,g, or c
  SITE (30033): n equals a,t,g, or c
  SITE (30034): n equals a,t,g, or c
  SITE (30035): n equals a,t,g, or c
  SITE (30036): n equals a,t,g, or c
  SITE (30037): n equals a,t,g, or c
  SITE (30038): n equals a,t,g, or c
  SITE (30039): n equals a,t,g, or c
  SITE (30040): n equals a,t,g, or c
  SITE (30041): n equals a,t,g, or c
  SITE (30042): n equals a,t,g, or c
  SITE (30043): n equals a,t,g, or c
  SITE (30044): n equals a,t,g, or c
  SITE (30045): n equals a,t,g, or c
  SITE (30046): n equals a,t,g, or c
  SITE (30047): n equals a,t,g, or c
  SITE (30048): n equals a,t,g, or c
  SITE (30049): n equals a,t,g, or c
  SITE (30050): n equals a,t,g, or c
  SITE (30051): n equals a,t,g, or c
  SITE (30052): n equals a,t,g, or c
  SITE (30053): n equals a,t,g, or c
  SITE (30054): n equals a,t,g, or c
  SITE (30055): n equals a,t,g, or c
  SITE (30056): n equals a,t,g, or c
  SITE (30057): n equals a,t,g, or c
  SITE (30058): n equals a,t,g, or c
  SITE (30059): n equals a,t,g, or c
  SITE (30060): n equals a,t,g, or c
  SITE (30061): n equals a,t,g, or c
  SITE (30062): n equals a,t,g, or c
  SITE (30063): n equals a,t,g, or c
  SITE (30064): n equals a,t,g, or c
  SITE (30065): n equals a,t,g, or c
  SITE (30066): n equals a,t,g, or c
  SITE (30067): n equals a,t,g, or c
  SITE (30068): n equals a,t,g, or c
  SITE (30069): n equals a,t,g, or c
  SITE (30070): n equals a,t,g, or c
  SITE (30071): n equals a,t,g, or c
  SITE (30072): n equals a,t,g, or c
  SITE (30073): n equals a,t,g, or c
  SITE (30074): n equals a,t,g, or c
  SITE (30075): n equals a,t,g, or c
  SITE (30076): n equals a,t,g, or c
  SITE (30077): n equals a,t,g, or c
  SITE (30078): n equals a,t,g, or c
  SITE (30079): n equals a,t,g, or c
  SITE (30080): n equals a,t,g, or c
  SITE (30081): n equals a,t,g, or c
  SITE (30082): n equals a,t,g, or c
  SITE (30083): n equals a,t,g, or c
  SITE (30084): n equals a,t,g, or c
  SITE (30085): n equals a,t,g, or c
  SITE (30086): n equals a,t,g, or c
  SITE (30087): n equals a,t,g, or c
  SITE (30088): n equals a,t,g, or c
  SITE (30089): n equals a,t,g, or c
  SITE (30090): n equals a,t,g, or c
  SITE (30091): n equals a,t,g, or c
  SITE (30092): n equals a,t,g, or c
  SITE (30093): n equals a,t,g, or c
  SITE (30094): n equals a,t,g, or c
  SITE (30095): n equals a,t,g, or c
  SITE (30096): n equals a,t,g, or c
  SITE (30097): n equals a,t,g, or c
  SITE (30098): n equals a,t,g, or c
  SITE (30099): n equals a,t,g, or c
  SITE (30100): n equals a,t,g, or c
  SITE (30101): n equals a,t,g, or c
  SITE (30102): n equals a,t,g, or c
  SITE (30103): n equals a,t,g, or c
  SITE (30104): n equals a,t,g, or c
  SITE (30105): n equals a,t,g, or c
  SITE (30106): n equals a,t,g, or c
  SITE (30107): n equals a,t,g, or c
  SITE (30108): n equals a,t,g, or c
  SITE (30109): n equals a,t,g, or c
  SITE (30110): n equals a,t,g, or c
  SITE (30111): n equals a,t,g, or c
  SITE (30112): n equals a,t,g, or c
  SITE (30113): n equals a,t,g, or c
  SITE (30114): n equals a,t,g, or c
  SITE (30115): n equals a,t,g, or c
  SITE (30116): n equals a,t,g, or c
  SITE (30117): n equals a,t,g, or c
  SITE (30118): n equals a,t,g, or c
  SITE (30119): n equals a,t,g, or c
  SITE (30120): n equals a,t,g, or c
  SITE (30121): n equals a,t,g, or c
  SITE (30122): n equals a,t,g, or c
  SITE (30123): n equals a,t,g, or c
  SITE (30124): n equals a,t,g, or c
  SITE (30125): n equals a,t,g, or c
  SITE (30126): n equals a,t,g, or c
  SITE (30127): n equals a,t,g, or c
  SITE (30128): n equals a,t,g, or c
  SITE (30129): n equals a,t,g, or c
  SITE (30130): n equals a,t,g, or c
  SITE (30131): n equals a,t,g, or c
  SITE (30132): n equals a,t,g, or c
  SITE (30133): n equals a,t,g, or c
  SITE (30134): n equals a,t,g, or c
  SITE (30135): n equals a,t,g, or c
  SITE (30136): n equals a,t,g, or c
  SITE (30137): n equals a,t,g, or c
  SITE (30138): n equals a,t,g, or c
  SITE (30139): n equals a,t,g, or c
  SITE (30140): n equals a,t,g, or c
  SITE (30141): n equals a,t,g, or c
  SITE (30142): n equals a,t,g, or c
  SITE (30143): n equals a,t,g, or c
  SITE (30144): n equals a,t,g, or c
  SITE (30145): n equals a,t,g, or c
  SITE (30146): n equals a,t,g, or c
  SITE (30147): n equals a,t,g, or c
  SITE (30148): n equals a,t,g, or c
  SITE (30149): n equals a,t,g, or c
  SITE (30150): n equals a,t,g, or c
  SITE (30151): n equals a,t,g, or c
  SITE (30152): n equals a,t,g, or c
  SITE (30153): n equals a,t,g, or c
  SITE (30154): n equals a,t,g, or c
  SITE (30155): n equals a,t,g, or c
  SITE (30156): n equals a,t,g, or c
  SITE (30157): n equals a,t,g, or c
  SITE (30158): n equals a,t,g, or c
  SITE (30159): n equals a,t,g, or c
  SITE (30160): n equals a,t,g, or c
  SITE (30161): n equals a,t,g, or c
  SITE (30162): n equals a,t,g, or c
  SITE (30163): n equals a,t,g, or c
  SITE (30164): n equals a,t,g, or c
  SITE (30165): n equals a,t,g, or c
  SITE (30166): n equals a,t,g, or c
  SITE (30167): n equals a,t,g, or c
  SITE (30168): n equals a,t,g, or c
  SITE (30169): n equals a,t,g, or c
  SITE (30170): n equals a,t,g, or c
  SITE (30171): n equals a,t,g, or c
  SITE (30172): n equals a,t,g, or c
  SITE (30173): n equals a,t,g, or c
  SITE (30174): n equals a,t,g, or c
  SITE (30175): n equals a,t,g, or c
  SITE (30176): n equals a,t,g, or c
  SITE (30177): n equals a,t,g, or c
  SITE (30178): n equals a,t,g, or c
  SITE (30179): n equals a,t,g, or c
  SITE (30180): n equals a,t,g, or c
  SITE (30181): n equals a,t,g, or c
  SITE (30182): n equals a,t,g, or c
  SITE (30183): n equals a,t,g, or c
  SITE (30184): n equals a,t,g, or c
  SITE (30185): n equals a,t,g, or c
  SITE (30186): n equals a,t,g, or c
  SITE (30187): n equals a,t,g, or c
  SITE (30188): n equals a,t,g, or c
  SITE (30189): n equals a,t,g, or c
  SITE (30190): n equals a,t,g, or c
  SITE (30191): n equals a,t,g, or c
  SITE (30192): n equals a,t,g, or c
  SITE (30193): n equals a,t,g, or c
  SITE (30194): n equals a,t,g, or c
  SITE (30195): n equals a,t,g, or c
  SITE (30196): n equals a,t,g, or c
  SITE (30197): n equals a,t,g, or c
  SITE (30198): n equals a,t,g, or c
  SITE (30199): n equals a,t,g, or c
  SITE (30200): n equals a,t,g, or c
  SITE (30201): n equals a,t,g, or c
  SITE (30202): n equals a,t,g, or c
  SITE (30203): n equals a,t,g, or c
  SITE (30204): n equals a,t,g, or c
  SITE (30205): n equals a,t,g, or c
  SITE (30206): n equals a,t,g, or c
  SITE (30207): n equals a,t,g, or c
  SITE (30208): n equals a,t,g, or c
  SITE (30209): n equals a,t,g, or c
  SITE (30210): n equals a,t,g, or c
  SITE (30211): n equals a,t,g, or c
  SITE (30212): n equals a,t,g, or c
  SITE (30213): n equals a,t,g, or c
  SITE (30214): n equals a,t,g, or c
  SITE (30215): n equals a,t,g, or c
  SITE (30216): n equals a,t,g, or c
  SITE (30217): n equals a,t,g, or c
  SITE (30218): n equals a,t,g, or c
  SITE (30219): n equals a,t,g, or c
  SITE (30220): n equals a,t,g, or c
  SITE (30221): n equals a,t,g, or c
  SITE (30222): n equals a,t,g, or c
  SITE (30223): n equals a,t,g, or c
  SITE (30224): n equals a,t,g, or c
  SITE (30225): n equals a,t,g, or c
  SITE (30226): n equals a,t,g, or c
  SITE (30227): n equals a,t,g, or c
  SITE (30228): n equals a,t,g, or c
  SITE (30229): n equals a,t,g, or c
  SITE (30230): n equals a,t,g, or c
  SITE (30231): n equals a,t,g, or c
  SITE (30232): n equals a,t,g, or c
  SITE (30233): n equals a,t,g, or c
  SITE (30234): n equals a,t,g, or c
  SITE (30235): n equals a,t,g, or c
  SITE (30236): n equals a,t,g, or c
  SITE (30237): n equals a,t,g, or c
  SITE (30238): n equals a,t,g, or c
  SITE (30239): n equals a,t,g, or c
  SITE (30240): n equals a,t,g, or c
  SITE (30241): n equals a,t,g, or c
  SITE (30242): n equals a,t,g, or c
  SITE (30243): n equals a,t,g, or c
  SITE (30244): n equals a,t,g, or c
  SITE (30245): n equals a,t,g, or c
  SITE (30246): n equals a,t,g, or c
  SITE (30247): n equals a,t,g, or c
  SITE (30248): n equals a,t,g, or c
  SITE (30249): n equals a,t,g, or c
  SITE (30250): n equals a,t,g, or c
  SITE (30251): n equals a,t,g, or c
  SITE (30252): n equals a,t,g, or c
  SITE (30253): n equals a,t,g, or c
  SITE (30254): n equals a,t,g, or c
  SITE (30255): n equals a,t,g, or c
  SITE (30256): n equals a,t,g, or c
  SITE (30257): n equals a,t,g, or c
  SITE (30258): n equals a,t,g, or c
  SITE (30259): n equals a,t,g, or c
  SITE (30260): n equals a,t,g, or c
  SITE (30261): n equals a,t,g, or c
  SITE (30262): n equals a,t,g, or c
  SITE (30263): n equals a,t,g, or c
  SITE (30264): n equals a,t,g, or c
  SITE (30265): n equals a,t,g, or c
  SITE (30266): n equals a,t,g, or c
  SITE (30267): n equals a,t,g, or c
  SITE (30268): n equals a,t,g, or c
  SITE (30269): n equals a,t,g, or c
  SITE (30270): n equals a,t,g, or c
  SITE (30271): n equals a,t,g, or c
  SITE (30272): n equals a,t,g, or c
  SITE (30273): n equals a,t,g, or c
  SITE (30274): n equals a,t,g, or c
  SITE (30275): n equals a,t,g, or c
  SITE (30276): n equals a,t,g, or c
  SITE (30277): n equals a,t,g, or c
  SITE (30278): n equals a,t,g, or c
  SITE (30279): n equals a,t,g, or c
  SITE (30280): n equals a,t,g, or c
  SITE (30281): n equals a,t,g, or c
  SITE (30282): n equals a,t,g, or c
  SITE (30283): n equals a,t,g, or c
  SITE (30284): n equals a,t,g, or c
  SITE (30285): n equals a,t,g, or c
  SITE (30286): n equals a,t,g, or c
  SITE (30287): n equals a,t,g, or c
  SITE (30288): n equals a,t,g, or c
  SITE (30289): n equals a,t,g, or c
  SITE (30290): n equals a,t,g, or c
  SITE (30291): n equals a,t,g, or c
  SITE (30292): n equals a,t,g, or c
  SITE (30293): n equals a,t,g, or c
  SITE (30294): n equals a,t,g, or c
  SITE (30295): n equals a,t,g, or c
  SITE (30296): n equals a,t,g, or c
  SITE (30297): n equals a,t,g, or c
  SITE (30298): n equals a,t,g, or c
  SITE (30299): n equals a,t,g, or c
  SITE (30300): n equals a,t,g, or c
  SITE (30301): n equals a,t,g, or c
  SITE (30302): n equals a,t,g, or c
  SITE (30303): n equals a,t,g, or c
  SITE (30304): n equals a,t,g, or c
  SITE (30305): n equals a,t,g, or c
  SITE (30306): n equals a,t,g, or c
  SITE (30307): n equals a,t,g, or c
  SITE (30308): n equals a,t,g, or c
  SITE (30309): n equals a,t,g, or c
  SITE (30310): n equals a,t,g, or c
  SITE (30311): n equals a,t,g, or c
  SITE (30312): n equals a,t,g, or c
  SITE (30313): n equals a,t,g, or c
  SITE (30314): n equals a,t,g, or c
  SITE (30315): n equals a,t,g, or c
  SITE (30316): n equals a,t,g, or c
  SITE (30317): n equals a,t,g, or c
  SITE (30318): n equals a,t,g, or c
  SITE (30319): n equals a,t,g, or c
  SITE (30320): n equals a,t,g, or c
  SITE (30321): n equals a,t,g, or c
  SITE (30322): n equals a,t,g, or c
  SITE (30323): n equals a,t,g, or c
  SITE (30324): n equals a,t,g, or c
  SITE (30325): n equals a,t,g, or c
  SITE (30326): n equals a,t,g, or c
  SITE (30327): n equals a,t,g, or c
  SITE (30328): n equals a,t,g, or c
  SITE (30329): n equals a,t,g, or c
  SITE (30330): n equals a,t,g, or c
  SITE (30331): n equals a,t,g, or c
  SITE (30332): n equals a,t,g, or c
  SITE (30333): n equals a,t,g, or c
  SITE (30334): n equals a,t,g, or c
  SITE (30335): n equals a,t,g, or c
  SITE (30336): n equals a,t,g, or c
  SITE (30337): n equals a,t,g, or c
  SITE (30338): n equals a,t,g, or c
  SITE (30339): n equals a,t,g, or c
  SITE (30340): n equals a,t,g, or c
  SITE (30341): n equals a,t,g, or c
  SITE (30342): n equals a,t,g, or c
  SITE (30343): n equals a,t,g, or c
  SITE (30344): n equals a,t,g, or c
  SITE (30345): n equals a,t,g, or c
  SITE (30346): n equals a,t,g, or c
  SITE (30347): n equals a,t,g, or c
  SITE (30348): n equals a,t,g, or c
  SITE (30349): n equals a,t,g, or c
  SITE (30350): n equals a,t,g, or c
  SITE (30351): n equals a,t,g, or c
  SITE (30352): n equals a,t,g, or c
  SITE (30353): n equals a,t,g, or c
  SITE (30354): n equals a,t,g, or c
  SITE (30355): n equals a,t,g, or c
  SITE (30356): n equals a,t,g, or c
  SITE (30357): n equals a,t,g, or c
  SITE (30358): n equals a,t,g, or c
  SITE (30359): n equals a,t,g, or c
  SITE (30360): n equals a,t,g, or c
  SITE (30361): n equals a,t,g, or c
  SITE (30362): n equals a,t,g, or c
  SITE (30363): n equals a,t,g, or c
  SITE (30364): n equals a,t,g, or c
  SITE (30365): n equals a,t,g, or c
  SITE (30366): n equals a,t,g, or c
  SITE (30367): n equals a,t,g, or c
  SITE (30368): n equals a,t,g, or c
  SITE (30369): n equals a,t,g, or c
  SITE (30370): n equals a,t,g, or c
  SITE (30371): n equals a,t,g, or c
  SITE (30372): n equals a,t,g, or c
  SITE (30373): n equals a,t,g, or c
  SITE (30374): n equals a,t,g, or c
  SITE (30375): n equals a,t,g, or c
  SITE (30376): n equals a,t,g, or c
  SITE (30377): n equals a,t,g, or c
  SITE (30378): n equals a,t,g, or c
  SITE (30379): n equals a,t,g, or c
  SITE (30380): n equals a,t,g, or c
  SITE (30381): n equals a,t,g, or c
  SITE (30382): n equals a,t,g, or c
  SITE (30383): n equals a,t,g, or c
  SITE (30384): n equals a,t,g, or c
  SITE (30385): n equals a,t,g, or c
  SITE (30386): n equals a,t,g, or c
  SITE (30387): n equals a,t,g, or c
  SITE (30388): n equals a,t,g, or c
  SITE (30389): n equals a,t,g, or c
  SITE (30390): n equals a,t,g, or c
  SITE (30391): n equals a,t,g, or c
  SITE (30392): n equals a,t,g, or c
  SITE (30393): n equals a,t,g, or c
  SITE (30394): n equals a,t,g, or c
  SITE (30395): n equals a,t,g, or c
  SITE (30396): n equals a,t,g, or c
  SITE (30397): n equals a,t,g, or c
  SITE (30398): n equals a,t,g, or c
  SITE (30399): n equals a,t,g, or c
  SITE (30400): n equals a,t,g, or c
  SITE (30401): n equals a,t,g, or c
  SITE (30402): n equals a,t,g, or c
  SITE (30403): n equals a,t,g, or c
  SITE (30404): n equals a,t,g, or c
  SITE (30405): n equals a,t,g, or c
  SITE (30406): n equals a,t,g, or c
  SITE (30407): n equals a,t,g, or c
  SITE (30408): n equals a,t,g, or c
  SITE (30409): n equals a,t,g, or c
  SITE (30410): n equals a,t,g, or c
  SITE (30411): n equals a,t,g, or c
  SITE (30412): n equals a,t,g, or c
  SITE (30413): n equals a,t,g, or c
  SITE (30414): n equals a,t,g, or c
  SITE (30415): n equals a,t,g, or c
  SITE (30416): n equals a,t,g, or c
  SITE (30417): n equals a,t,g, or c
  SITE (30418): n equals a,t,g, or c
  SITE (30419): n equals a,t,g, or c
  SITE (30420): n equals a,t,g, or c
  SITE (30421): n equals a,t,g, or c
  SITE (30422): n equals a,t,g, or c
  SITE (30423): n equals a,t,g, or c
  SITE (30424): n equals a,t,g, or c
  SITE (30425): n equals a,t,g, or c
  SITE (30426): n equals a,t,g, or c
  SITE (30427): n equals a,t,g, or c
  SITE (30428): n equals a,t,g, or c
  SITE (30429): n equals a,t,g, or c
  SITE (30430): n equals a,t,g, or c
  SITE (30431): n equals a,t,g, or c
  SITE (30432): n equals a,t,g, or c
  SITE (30433): n equals a,t,g, or c
  SITE (30434): n equals a,t,g, or c
  SITE (30435): n equals a,t,g, or c
  SITE (30436): n equals a,t,g, or c
  SITE (30437): n equals a,t,g, or c
  SITE (30438): n equals a,t,g, or c
  SITE (30439): n equals a,t,g, or c
  SITE (30440): n equals a,t,g, or c
  SITE (30441): n equals a,t,g, or c
  SITE (30442): n equals a,t,g, or c
  SITE (30443): n equals a,t,g, or c
  SITE (30444): n equals a,t,g, or c
  SITE (30445): n equals a,t,g, or c
  SITE (30446): n equals a,t,g, or c
  SITE (30447): n equals a,t,g, or c
  SITE (30448): n equals a,t,g, or c
  SITE (30449): n equals a,t,g, or c
  SITE (30450): n equals a,t,g, or c
  SITE (30451): n equals a,t,g, or c
  SITE (30452): n equals a,t,g, or c
  SITE (30453): n equals a,t,g, or c
  SITE (30454): n equals a,t,g, or c
  SITE (30455): n equals a,t,g, or c
  SITE (30456): n equals a,t,g, or c
  SITE (30457): n equals a,t,g, or c
  SITE (30458): n equals a,t,g, or c
  SITE (30459): n equals a,t,g, or c
  SITE (30460): n equals a,t,g, or c
  SITE (30461): n equals a,t,g, or c
  SITE (30462): n equals a,t,g, or c
  SITE (30463): n equals a,t,g, or c
  SITE (30464): n equals a,t,g, or c
  SITE (30465): n equals a,t,g, or c
  SITE (30466): n equals a,t,g, or c
  SITE (30467): n equals a,t,g, or c
  SITE (30468): n equals a,t,g, or c
  SITE (30469): n equals a,t,g, or c
  SITE (30470): n equals a,t,g, or c
  SITE (30471): n equals a,t,g, or c
  SITE (30472): n equals a,t,g, or c
  SITE (30473): n equals a,t,g, or c
  SITE (30474): n equals a,t,g, or c
  SITE (30475): n equals a,t,g, or c
  SITE (30476): n equals a,t,g, or c
  SITE (30477): n equals a,t,g, or c
  SITE (30478): n equals a,t,g, or c
  SITE (30479): n equals a,t,g, or c
  SITE (30480): n equals a,t,g, or c
  SITE (30481): n equals a,t,g, or c
  SITE (30482): n equals a,t,g, or c
  SITE (30483): n equals a,t,g, or c
  SITE (30484): n equals a,t,g, or c
  SITE (30485): n equals a,t,g, or c
  SITE (30486): n equals a,t,g, or c
  SITE (30487): n equals a,t,g, or c
  SITE (30488): n equals a,t,g, or c
  SITE (30489): n equals a,t,g, or c
  SITE (30490): n equals a,t,g, or c
  SITE (30491): n equals a,t,g, or c
  SITE (30492): n equals a,t,g, or c
  SITE (30493): n equals a,t,g, or c
  SITE (30494): n equals a,t,g, or c
  SITE (30495): n equals a,t,g, or c
  SITE (30496): n equals a,t,g, or c
  SITE (30497): n equals a,t,g, or c
  SITE (30498): n equals a,t,g, or c
  SITE (30499): n equals a,t,g, or c
  SITE (30500): n equals a,t,g, or c
  SITE (30501): n equals a,t,g, or c
  SITE (30502): n equals a,t,g, or c
  SITE (30503): n equals a,t,g, or c
  SITE (30504): n equals a,t,g, or c
  SITE (30505): n equals a,t,g, or c
  SITE (30506): n equals a,t,g, or c
  SITE (30507): n equals a,t,g, or c
  SITE (30508): n equals a,t,g, or c
  SITE (30509): n equals a,t,g, or c
  SITE (30510): n equals a,t,g, or c
  SITE (30511): n equals a,t,g, or c
  SITE (30512): n equals a,t,g, or c
  SITE (30513): n equals a,t,g, or c
  SITE (30514): n equals a,t,g, or c
  SITE (30515): n equals a,t,g, or c
  SITE (30516): n equals a,t,g, or c
  SITE (30517): n equals a,t,g, or c
  SITE (30518): n equals a,t,g, or c
  SITE (30519): n equals a,t,g, or c
  SITE (30520): n equals a,t,g, or c
  SITE (30521): n equals a,t,g, or c
  SITE (30522): n equals a,t,g, or c
  SITE (30523): n equals a,t,g, or c
  SITE (30524): n equals a,t,g, or c
  SITE (30525): n equals a,t,g, or c
  SITE (30526): n equals a,t,g, or c
  SITE (30527): n equals a,t,g, or c
  SITE (30528): n equals a,t,g, or c
  SITE (30529): n equals a,t,g, or c
  SITE (30530): n equals a,t,g, or c
  SITE (30531): n equals a,t,g, or c
  SITE (30532): n equals a,t,g, or c
  SITE (30533): n equals a,t,g, or c
  SITE (30534): n equals a,t,g, or c
  SITE (30535): n equals a,t,g, or c
  SITE (30536): n equals a,t,g, or c
  SITE (30537): n equals a,t,g, or c
  SITE (30538): n equals a,t,g, or c
  SITE (30539): n equals a,t,g, or c
  SITE (30540): n equals a,t,g, or c
  SITE (30541): n equals a,t,g, or c
  SITE (30542): n equals a,t,g, or c
  SITE (30543): n equals a,t,g, or c
  SITE (30544): n equals a,t,g, or c
  SITE (30545): n equals a,t,g, or c
  SITE (30546): n equals a,t,g, or c
  SITE (30547): n equals a,t,g, or c
  SITE (30548): n equals a,t,g, or c
  SITE (30549): n equals a,t,g, or c
  SITE (30550): n equals a,t,g, or c
  SITE (30551): n equals a,t,g, or c
  SITE (30552): n equals a,t,g, or c
  SITE (30553): n equals a,t,g, or c
  SITE (30554): n equals a,t,g, or c
  SITE (30555): n equals a,t,g, or c
  SITE (30556): n equals a,t,g, or c
  SITE (30557): n equals a,t,g, or c
  SITE (30558): n equals a,t,g, or c
  SITE (30559): n equals a,t,g, or c
  SITE (30560): n equals a,t,g, or c
  SITE (30561): n equals a,t,g, or c
  SITE (30562): n equals a,t,g, or c
  SITE (30563): n equals a,t,g, or c
  SITE (30564): n equals a,t,g, or c
  SITE (30565): n equals a,t,g, or c
  SITE (30566): n equals a,t,g, or c
  SITE (30567): n equals a,t,g, or c
  SITE (30568): n equals a,t,g, or c
  SITE (30569): n equals a,t,g, or c
  SITE (30570): n equals a,t,g, or c
  SITE (30571): n equals a,t,g, or c
  SITE (30572): n equals a,t,g, or c
  SITE (30573): n equals a,t,g, or c
  SITE (30574): n equals a,t,g, or c
  SITE (30575): n equals a,t,g, or c
  SITE (30576): n equals a,t,g, or c
  SITE (30577): n equals a,t,g, or c
  SITE (30578): n equals a,t,g, or c
  SITE (30579): n equals a,t,g, or c
  SITE (30580): n equals a,t,g, or c
  SITE (30581): n equals a,t,g, or c
  SITE (30582): n equals a,t,g, or c
  SITE (30583): n equals a,t,g, or c
  SITE (30584): n equals a,t,g, or c
  SITE (30585): n equals a,t,g, or c
  SITE (30586): n equals a,t,g, or c
  SITE (30587): n equals a,t,g, or c
  SITE (30588): n equals a,t,g, or c
  SITE (30589): n equals a,t,g, or c
  SITE (30590): n equals a,t,g, or c
  SITE (30591): n equals a,t,g, or c
  SITE (30592): n equals a,t,g, or c
  SITE (30593): n equals a,t,g, or c
  SITE (30594): n equals a,t,g, or c
  SITE (30595): n equals a,t,g, or c
  SITE (30596): n equals a,t,g, or c
  SITE (30597): n equals a,t,g, or c
  SITE (30598): n equals a,t,g, or c
  SITE (30599): n equals a,t,g, or c
  SITE (30600): n equals a,t,g, or c
  SITE (30601): n equals a,t,g, or c
  SITE (30602): n equals a,t,g, or c
  SITE (30603): n equals a,t,g, or c
  SITE (30604): n equals a,t,g, or c
  SITE (30605): n equals a,t,g, or c
  SITE (30606): n equals a,t,g, or c
  SITE (30607): n equals a,t,g, or c
  SITE (30608): n equals a,t,g, or c
  SITE (30609): n equals a,t,g, or c
  SITE (30610): n equals a,t,g, or c
  SITE (30611): n equals a,t,g, or c
  SITE (30612): n equals a,t,g, or c
  SITE (30613): n equals a,t,g, or c
  SITE (30614): n equals a,t,g, or c
  SITE (30615): n equals a,t,g, or c
  SITE (30616): n equals a,t,g, or c
  SITE (30617): n equals a,t,g, or c
  SITE (30618): n equals a,t,g, or c
  SITE (30619): n equals a,t,g, or c
  SITE (30620): n equals a,t,g, or c
  SITE (30621): n equals a,t,g, or c
  SITE (30622): n equals a,t,g, or c
  SITE (30623): n equals a,t,g, or c
  SITE (30624): n equals a,t,g, or c
  SITE (30625): n equals a,t,g, or c
  SITE (30626): n equals a,t,g, or c
  SITE (30627): n equals a,t,g, or c
  SITE (30628): n equals a,t,g, or c
  SITE (30629): n equals a,t,g, or c
  SITE (30630): n equals a,t,g, or c
  SITE (30631): n equals a,t,g, or c
  SITE (30632): n equals a,t,g, or c
  SITE (30633): n equals a,t,g, or c
  SITE (30634): n equals a,t,g, or c
  SITE (30635): n equals a,t,g, or c
  SITE (30636): n equals a,t,g, or c
  SITE (30637): n equals a,t,g, or c
  SITE (30638): n equals a,t,g, or c
  SITE (30639): n equals a,t,g, or c
  SITE (30640): n equals a,t,g, or c
  SITE (30641): n equals a,t,g, or c
  SITE (30642): n equals a,t,g, or c
  SITE (30643): n equals a,t,g, or c
  SITE (30644): n equals a,t,g, or c
  SITE (30645): n equals a,t,g, or c
  SITE (30646): n equals a,t,g, or c
  SITE (30647): n equals a,t,g, or c
  SITE (30648): n equals a,t,g, or c
  SITE (30649): n equals a,t,g, or c
  SITE (30650): n equals a,t,g, or c
  SITE (30651): n equals a,t,g, or c
  SITE (30652): n equals a,t,g, or c
  SITE (30653): n equals a,t,g, or c
  SITE (30654): n equals a,t,g, or c
  SITE (30655): n equals a,t,g, or c
  SITE (30656): n equals a,t,g, or c
  SITE (30657): n equals a,t,g, or c
  SITE (30658): n equals a,t,g, or c
  SITE (30659): n equals a,t,g, or c
  SITE (30660): n equals a,t,g, or c
  SITE (30661): n equals a,t,g, or c
  SITE (30662): n equals a,t,g, or c
  SITE (30663): n equals a,t,g, or c
  SITE (30664): n equals a,t,g, or c
  SITE (30665): n equals a,t,g, or c
  SITE (30666): n equals a,t,g, or c
  SITE (30667): n equals a,t,g, or c
  SITE (30668): n equals a,t,g, or c
  SITE (30669): n equals a,t,g, or c
  SITE (30670): n equals a,t,g, or c
  SITE (30671): n equals a,t,g, or c
  SITE (30672): n equals a,t,g, or c
  SITE (30673): n equals a,t,g, or c
  SITE (30674): n equals a,t,g, or c
  SITE (30675): n equals a,t,g, or c
  SITE (30676): n equals a,t,g, or c
  SITE (30677): n equals a,t,g, or c
  SITE (30678): n equals a,t,g, or c
  SITE (30679): n equals a,t,g, or c
  SITE (30680): n equals a,t,g, or c
  SITE (30681): n equals a,t,g, or c
  SITE (30682): n equals a,t,g, or c
  SITE (30683): n equals a,t,g, or c
  SITE (30684): n equals a,t,g, or c
  SITE (30685): n equals a,t,g, or c
  SITE (30686): n equals a,t,g, or c
  SITE (30687): n equals a,t,g, or c
  SITE (30688): n equals a,t,g, or c
  SITE (30689): n equals a,t,g, or c
  SITE (30690): n equals a,t,g, or c
  SITE (30691): n equals a,t,g, or c
  SITE (30692): n equals a,t,g, or c
  SITE (30693): n equals a,t,g, or c
  SITE (30694): n equals a,t,g, or c
  SITE (30695): n equals a,t,g, or c
  SITE (30696): n equals a,t,g, or c
  SITE (30697): n equals a,t,g, or c
  SITE (30698): n equals a,t,g, or c
  SITE (30699): n equals a,t,g, or c
  SITE (30700): n equals a,t,g, or c
  SITE (30701): n equals a,t,g, or c
  SITE (30702): n equals a,t,g, or c
  SITE (30703): n equals a,t,g, or c
  SITE (30704): n equals a,t,g, or c
  SITE (30705): n equals a,t,g, or c
  SITE (30706): n equals a,t,g, or c
  SITE (30707): n equals a,t,g, or c
  SITE (30708): n equals a,t,g, or c
  SITE (30709): n equals a,t,g, or c
  SITE (30710): n equals a,t,g, or c
  SITE (30711): n equals a,t,g, or c
  SITE (30712): n equals a,t,g, or c
  SITE (30713): n equals a,t,g, or c
  SITE (30714): n equals a,t,g, or c
  SITE (30715): n equals a,t,g, or c
  SITE (30716): n equals a,t,g, or c
  SITE (30717): n equals a,t,g, or c
  SITE (30718): n equals a,t,g, or c
  SITE (30719): n equals a,t,g, or c
  SITE (30720): n equals a,t,g, or c
  SITE (30721): n equals a,t,g, or c
  SITE (30722): n equals a,t,g, or c
  SITE (30723): n equals a,t,g, or c
  SITE (30724): n equals a,t,g, or c
  SITE (30725): n equals a,t,g, or c
  SITE (30726): n equals a,t,g, or c
  SITE (30727): n equals a,t,g, or c
  SITE (30728): n equals a,t,g, or c
  SITE (30729): n equals a,t,g, or c
  SITE (30730): n equals a,t,g, or c
  SITE (30731): n equals a,t,g, or c
  SITE (30732): n equals a,t,g, or c
  SITE (30733): n equals a,t,g, or c
  SITE (30734): n equals a,t,g, or c
  SITE (30735): n equals a,t,g, or c
  SITE (30736): n equals a,t,g, or c
  SITE (30737): n equals a,t,g, or c
  SITE (30738): n equals a,t,g, or c
  SITE (30739): n equals a,t,g, or c
  SITE (30740): n equals a,t,g, or c
  SITE (30741): n equals a,t,g, or c
  SITE (30742): n equals a,t,g, or c
  SITE (30743): n equals a,t,g, or c
  SITE (30744): n equals a,t,g, or c
  SITE (30745): n equals a,t,g, or c
  SITE (30746): n equals a,t,g, or c
  SITE (30747): n equals a,t,g, or c
  SITE (30748): n equals a,t,g, or c
  SITE (30749): n equals a,t,g, or c
  SITE (30750): n equals a,t,g, or c
  SITE (30751): n equals a,t,g, or c
  SITE (30752): n equals a,t,g, or c
  SITE (30753): n equals a,t,g, or c
  SITE (30754): n equals a,t,g, or c
  SITE (30755): n equals a,t,g, or c
  SITE (30756): n equals a,t,g, or c
  SITE (30757): n equals a,t,g, or c
  SITE (30758): n equals a,t,g, or c
  SITE (30759): n equals a,t,g, or c
  SITE (30760): n equals a,t,g, or c
  SITE (30761): n equals a,t,g, or c
  SITE (30762): n equals a,t,g, or c
  SITE (30763): n equals a,t,g, or c
  SITE (30764): n equals a,t,g, or c
  SITE (30765): n equals a,t,g, or c
  SITE (30766): n equals a,t,g, or c
  SITE (30767): n equals a,t,g, or c
  SITE (30768): n equals a,t,g, or c
  SITE (30769): n equals a,t,g, or c
  SITE (30770): n equals a,t,g, or c
  SITE (30771): n equals a,t,g, or c
  SITE (30772): n equals a,t,g, or c
  SITE (30773): n equals a,t,g, or c
  SITE (30774): n equals a,t,g, or c
  SITE (30775): n equals a,t,g, or c
  SITE (30776): n equals a,t,g, or c
  SITE (30777): n equals a,t,g, or c
  SITE (30778): n equals a,t,g, or c
  SITE (30779): n equals a,t,g, or c
  SITE (30780): n equals a,t,g, or c
  SITE (30781): n equals a,t,g, or c
  SITE (30782): n equals a,t,g, or c
  SITE (30783): n equals a,t,g, or c
  SITE (30784): n equals a,t,g, or c
  SITE (30785): n equals a,t,g, or c
  SITE (30786): n equals a,t,g, or c
  SITE (30787): n equals a,t,g, or c
  SITE (30788): n equals a,t,g, or c
  SITE (30789): n equals a,t,g, or c
  SITE (30790): n equals a,t,g, or c
  SITE (30791): n equals a,t,g, or c
  SITE (30792): n equals a,t,g, or c
  SITE (30793): n equals a,t,g, or c
  SITE (30794): n equals a,t,g, or c
  SITE (30795): n equals a,t,g, or c
  SITE (30796): n equals a,t,g, or c
  SITE (30797): n equals a,t,g, or c
  SITE (30798): n equals a,t,g, or c
  SITE (30799): n equals a,t,g, or c
  SITE (30800): n equals a,t,g, or c
  SITE (30801): n equals a,t,g, or c
  SITE (30802): n equals a,t,g, or c
  SITE (30803): n equals a,t,g, or c
  SITE (30804): n equals a,t,g, or c
  SITE (30805): n equals a,t,g, or c
  SITE (30806): n equals a,t,g, or c
  SITE (30807): n equals a,t,g, or c
  SITE (30808): n equals a,t,g, or c
  SITE (30809): n equals a,t,g, or c
  SITE (30810): n equals a,t,g, or c
  SITE (30811): n equals a,t,g, or c
  SITE (30812): n equals a,t,g, or c
  SITE (30813): n equals a,t,g, or c
  SITE (30814): n equals a,t,g, or c
  SITE (30815): n equals a,t,g, or c
  SITE (30816): n equals a,t,g, or c
  SITE (30817): n equals a,t,g, or c
  SITE (30818): n equals a,t,g, or c
  SITE (30819): n equals a,t,g, or c
  SITE (30820): n equals a,t,g, or c
  SITE (30821): n equals a,t,g, or c
  SITE (30822): n equals a,t,g, or c
  SITE (30823): n equals a,t,g, or c
  SITE (30824): n equals a,t,g, or c
  SITE (30825): n equals a,t,g, or c
  SITE (30826): n equals a,t,g, or c
  SITE (30827): n equals a,t,g, or c
  SITE (30828): n equals a,t,g, or c
  SITE (30829): n equals a,t,g, or c
  SITE (30830): n equals a,t,g, or c
  SITE (30831): n equals a,t,g, or c
  SITE (30832): n equals a,t,g, or c
  SITE (30833): n equals a,t,g, or c
  SITE (30834): n equals a,t,g, or c
  SITE (30835): n equals a,t,g, or c
  SITE (30836): n equals a,t,g, or c
  SITE (30837): n equals a,t,g, or c
  SITE (30838): n equals a,t,g, or c
  SITE (30839): n equals a,t,g, or c
  SITE (30840): n equals a,t,g, or c
  SITE (30841): n equals a,t,g, or c
  SITE (30842): n equals a,t,g, or c
  SITE (30843): n equals a,t,g, or c
  SITE (30844): n equals a,t,g, or c
  SITE (30845): n equals a,t,g, or c
  SITE (30846): n equals a,t,g, or c
  SITE (30847): n equals a,t,g, or c
  SITE (30848): n equals a,t,g, or c
  SITE (30849): n equals a,t,g, or c
  SITE (30850): n equals a,t,g, or c
  SITE (30851): n equals a,t,g, or c
  SITE (30852): n equals a,t,g, or c
  SITE (30853): n equals a,t,g, or c
  SITE (30854): n equals a,t,g, or c
  SITE (30855): n equals a,t,g, or c
  SITE (30856): n equals a,t,g, or c
  SITE (30857): n equals a,t,g, or c
  SITE (30858): n equals a,t,g, or c
  SITE (30859): n equals a,t,g, or c
  SITE (30860): n equals a,t,g, or c
  SITE (30861): n equals a,t,g, or c
  SITE (30862): n equals a,t,g, or c
  SITE (30863): n equals a,t,g, or c
  SITE (30864): n equals a,t,g, or c
  SITE (30865): n equals a,t,g, or c
  SITE (30866): n equals a,t,g, or c
  SITE (30867): n equals a,t,g, or c
  SITE (30868): n equals a,t,g, or c
  SITE (30869): n equals a,t,g, or c
  SITE (30870): n equals a,t,g, or c
  SITE (30871): n equals a,t,g, or c
  SITE (30872): n equals a,t,g, or c
  SITE (30873): n equals a,t,g, or c
  SITE (30874): n equals a,t,g, or c
  SITE (30875): n equals a,t,g, or c
  SITE (30876): n equals a,t,g, or c
  SITE (30877): n equals a,t,g, or c
  SITE (30878): n equals a,t,g, or c
  SITE (30879): n equals a,t,g, or c
  SITE (30880): n equals a,t,g, or c

SEQ ID NO: 9742 - DNA, 90 bp, Homo sapiens
tttttttttttttttttttttttttttttttttttttttttgagacggagtctctctctgccgcccaggctggagtgcagtggcgcgatc

SEQ ID NO: 9743 - DNA, 741 bp, Homo sapiens
tttttcttcctagttacttttttttttttttttttgagacggagtcttgctctgttgcccaggctggagtgcagtggtgcaatcttggctcactgcaacctctgcctcccgggttcaagtgtttctcctgcctcaacctccccagtagctgggactacatgcacgtgccatcacgcccagctagtttttgtatttttagtagagacagggttttaccatgttggccaggctggtcttgaactcctgacctcaggtgatccaccctcctcggcctcccaaagtgctgggattacttttttctttatttattttggcttctgcttttcacatgaggggcttttctccaatatctgatgatccttcattgtccattcatcttcacaagtaaggcaccaaaatgctaactggaaatcacaaaatctctgtatgcctaggcaagcttgtgaactaatgaagcatcactgcaggatggggaagctaggtgttccactggagcaggggtccccagagttcagtatctgagatggtttctcttgggctgatcagtttctctgaagatgaagggtgcaacacatatgaaaatgaatcaatttcatcttcagagctacctgatattttcgattcctgatcctttctgaagcctacctgagtcttctgaggttctgtggaataaattagtttgctccttggccctaccctaactccacacacaccgtgcccacatttcagctttctcttgtc

SEQ ID NO: 9744 - DNA, 129 bp, Homo sapiens
tctttgtttttttttttttttttttttttttttttttttttgagacggagtctcgctctgtcgcccaggctggagtgcagtggcgcgatctcggctcactgcaagctccgcctcccggttacgccattc

SEQ ID NO: 9745 - DNA, 5775 bp, Homo sapiens; identical to SEQ ID NO: 7683

SEQ ID NO: 9746 - DNA, 738 bp, Homo sapiens; identical to SEQ ID NO: 7684

SEQ ID NO: 9747 - DNA, 3098 bp, Homo sapiens
tgtatctataaaaagatatatttttattctttatttttaaaatttatgtatgttcgtgaggcacaagtgcaattctgctacattgatatcttgcttctcagtcccacacaaggaagctgtctcacactatagagaaaatattcatgaacaaattcgtatcagtcacagtgagaggtaacactctaaatagcccatttcatgctcaagacatccaagtcaaagaaacccaatagcacagctgagtcccctctgttcccccccaacaccccactcacatcagggcccctgccctggagtgtcacctttattagctgtgagagacaccccagagccctgggcactgtcagtgattggggtagaacaaaaacaggacctggtcagagcccacagatgtggctagaggaactgtggggtgggtgagctccctcataggctcctgaccacaatatcccaacaatctcagggatcagcctccttcatcttacctgcagcctgagagtagctccctctgtttctatctatgggaagaaaatgtcctgtgagaggccagaaaggaggcagggccataaggtcctagagcaaacccctagtctttgatcccagagaagtttccagaaaagtgtaactgtagatccagggcaggatcaagaaatatgaagaaagcagatgtgggtcctggaccaactgccctcctgaggtctgtcatcagcagggaccttcccctgtgatttgtgactgctgggatcaggtcccatcaccaccataatcatcgaagtgaagaatctgtccttcattttcacaggagctttacaaatgagtaggtgctggcacacagggcccaggctgggtagacccatgagtgtggatggtgcttcccagtaatgaggcagggcacacttctacttggggcttgcaacccccagtgggacaagaaaactcagactccactcctcaccccttcctacctgagctcttcttcctccacatcacagcagcgaccacagctccagtgaccacagctccaaggacaacaaggccagcaacgatgcccacgatggggatggtgggctggggagactgctctgggaaaggaagggaaggtgaggggccctgatctccaggcctcagccctgaccctgctgaagagctccagaagggctcctgctttccctgagaaaagacatgacccctcgttcccctctttacccatctccctccttaccccatctcaggatgaggggctggggcagcccctcgtgctgcacatggcatgtgtatctctgttcctctccaggaggcaccaccacagcggcccacttctggaaggttccatcccctgcaggcctggtctccacaagctctgtgtcctgggtctgttcctccccatcccgctgccaggtcagcgtgatctccgcagggtagaagcccagggcccagcacctcagggtggcctcatggtcagagatggggtggtgggcaacgtgtgcctttggaggatctgagaagagtcagaaaattcaggcactttgcactcctcatgggaaaccccagcagcacccatgtgaccaacctgagaatggacaggacacctggggtggggaagggagcacagaacccagacaccagcctggacacagacacctgggaaaatctcctattccttggaaagttagagtctctgaggggggagcagggacttctggccctgacctaagtggaggccgagggactggaatcagagcctcaaacacattgagtgtgaggcagagaacaaaacttgagagaaaagtcacggggcccaaggctgttggagggctcaaaggggaccgcggatcggtattccagggactgtcttccctccattccctcagaaatttcatcccttaattgtcccagagagcagggcggactctcacagtcactctctggtaccggatctcgaaagccaggaagattcttcctactcaggactagagggagggcgatatcctagcattgggtccactttcctcccaaccttgtgcgaggccatcccaagagatctacaggagatagggaaggcgcccatggcccctggtacctgcgcgctgtagcgtctccttcccattctccaagtatctgcggagcaactccaggcactcgccctccaggtaggtcctgaactcctctgcatattcctctgcctcatagaagcgctgggtgatctgagccacggtgtccgccgcggtccaggagcgcaggtcctcgttcagggagatgtaatccttgccgtcgtacgcgtgctggtgatacccgcggaggaggcgtccgtcgggccccatgtcgcagccattcattccctggagggtgtgagaccctagccggtccccgcagtcagccccgcccagctagccccgccccctccccgcccaacccgcggggattttggcctaaactgaaaatgaacctgggtaaaggcgcctgggactctcccgggtggagggtctgggcgggtcccgctgcctcggggtagatttcggatccggagactctgagggacccgggcggtccgtggcggatggggggtggtcgtgacctgcgcccccggccgggttcactcaccagcctcgctctggttgtagcggcggagcaggttcctcagggccactcggtcagtctgtgcgttggccttggcgtaccctgtggtccactcccaatactgcggcccctcttgctccacccacggctcccgcggctccatcctcggaatcgcggcgtcgctgtcgaaccgcaggaattgcgtgtcgtctacgtactccacggcgatgtagcggggctccccgcggccgggccgcgacacagcggtgctgaaatacctcaaggagtgggagcctgggggcgaggaggggctgagacccgccagaccctcctccggaggcggctccctgagtcctgcgcccccaccgggcgggcccctcactcctccccacagaggccgtttctctctggaccccgcactcacccgcccaagtatcggtcagggccagggcccctgagagcagcaggaggaggcttcggggcgccatgaccccaacctccgcgtctgggaaaaatatgag

SEQ ID NO: 9748 - DNA, 169 bp, Homo sapiens
ggcacgcgcctgtaagtcccagctactagggaggctgaggcaggagaatcgcttgaacctgggaggcagaggttgcagtgagccaagattgcaccactgcactccagcctgggagacagagcaagactccatctcaaaaaaaaaaaaaaaaaaaaaatttctgaaagaa

SEQ ID NO: 9749 - DNA, 4771 bp, Homo sapiens
gggtacggtggctcatgcctgtaatcccggcactttgggaggccgaggtgggtggatcacgaggtcaggagatcaagaccatcctggataacatggtgaaaccccgtctctactaaaatacaaaaaaattagccgggcgtggtggtgggcgcctgtagtcccagctactcgggaggctgaggcaggagaatggcgtgaacccgggaggcggagcttgcagtgagcggagattggcgccactacactccagcctgggcgacagagcgagactccgtctcaaaaaaaaatttttttttttggtagatacggggtcttgctttgtcacccaggctggtctcaaactcctgagctcgagtgctccttctgcctcagcctcccaaagtgctgggattacaggcgtgggctgctgtgcccagcaggaataatttctcagtgcatctctgatggggaggctaatgaagaaaggacacctggtttgaaggcttctctgtgtctgtccgtgggcgctactgatctgagccaagcaccattccgcaggcatgcctgaaatgactcccatggctgtcatggtgccatctggagagcatttgctcactgtaatggtcccgtcacacttgtctgatgaggatctgttggttgactttgacagtgataaacgaacacagcctatctgggtgttttttgcacttatagtttgggggtttgaagtactggctagaagctggcggggtgtgtgtgtgcaggtgtgcgagtgcatgtgcaagtgtgcgtgcaagtgtgagtctgcacttgtgtgcaagagaatgtgtgtgtgtgtgtgtttggagatttggacttgaaaattctagctcaggtctttggggtagtgtttgacctgaactctgaaaggcagagggtcccagactttcctgggatgatgggaactgggcaccccagatgaggctcggttgtgagtaggagcggggtgggccaccgaagagaagacagagtgggcctgtagggccagcccgaggtacccacagtggagggtctacaggctgatttgggaggtggtggtttatacctgtagtcaccttctatcttagttaggaattcaccttcacacttccagaaactgccaagaagaatgccgccgctcaggtttatctggtagaataagctgtttgaacaaagatctggaggttgcacaatcctgtgtcattctggatttatcttggggtcgggagtcaacgatacttcttgtgctgtcgtttctccggccgtgtgaagttaccacctcgtgagtggtcataagttagcgtgtctaaatgcactttgaaatcctaggatgaaaaagccaggccctgtcttttttccttgtctaagcaccatccttgcttaggagagacacggctgtggctctcaggctgtggggcaatgttctgcttataatgtttcaagaggttcaaagcgtgcaggccccatgctccgtgagagccttgacctgggtcagcaggggcggctgggcttgactcgagaattcccacagggcccgagggaagagcagagcaagagggaggagcgcgtggagccctatgtggcctgcgatattggggtggcgtccaggcccgcctagatgggggagggagacaacagagctgccacctgctcaccgcagacccaggggcccaggaggagcggactaggaccggcagtgccttccagcctaggtctcctgcccctgggctggagttcatcttttaggcaaatttggaataggaaccttaaaaatgctttcttcactcgtttaaatagtaatgataagaatatggctgcagggggcagcttatgcctgtaatcccaccattttgggagctcaaggcaggagtattgcttgagcccagaagtttgagaccagtctgggcaacatagtggaaacttgtctctccaaaagctaaaagaaaaagccgtgcatggtggtatgcacctgtagtcccagctacttgggaggctgaggtgggaggatcgcttgagtctgggaggtcgaggctgctgtgagccatgattgcaccactgcattccagcctgggtgacagagcaagatcttgtcttaaaaaaaaaaaaaaaaaaaaaggtgttgtattttatcattagaaggccatcctgtttagaagagtgggtttctcataagaaaaaaaagaaaaaggttgaccttgtaagtatattttcttgggtgaattgtggtggtggtaatggttttaactggtgttaatttcagttcttttaaaagttgtggtaagatacatgcaacataaaatgtgccctcttccccatttttaagtgaacagttcagtggcattaagcacattcagtttgcctgccaccgttaccaccatccatctccaaaattctctccatttacaaaactgaaactctgtccctattaaacactagctccccattccccactgtgccgcccccccaaagcccctggcaccaaccattctacttcctgtctctgagtttgactagggacctcctgtaagtggatttgtacaatatttgtccttttgtgtctggcttcttcatgtagtataatgtcttcaaggttcattcatgttgtagtcaggatcaccttccttttaaaggttgaacgatatcccgttgtatggacagaccacattttatccattcacccagggatggacacctgggttgcttccatctctcggctcttgtgaataatgctgctgtgaacacgggtgtgcagatacctgttcaagtccctgctgttttcttttgagacggagtctcgctctgtctcccaggctggagtgcggtggcaccatctcagctcactgcaagctccgcctcccaggttcaggccattctcctgcctcagcctcccgagtagctgggactacaggtgcccaccaccacgcctggctaattttttgtatttttagtagagacggagtttcaccatgttagccaggatgctctggatctcctgacctcgtgatccacccacctcggcctcccaaactgctgggattacaggcatgagacaccacgccccgccgagtccctgcttttaattctttggggcagggatccccaaccccctggtgatggaccaatactggcctgcggccccttaggaactggactgcacagcaggaggtgagcggcaggtgagcgtgcattcccgccggagccccgcctcccgtcagatcagcggcggcattagattctcataggagcgggaaccctcctgtgaaccctgcataccagggttctccatgcaacaatctaatgcctgatgatctgaagtggaacaggtttttgttttttttttccagacagagtcttgctctttcgcctaggctggagtgcagtggcatgatctcggctcactgcaacccctgcttcctgggttcaagtggttctcctgcctcagcctcccaagtagctgggattacaggtgcccgccaccatggccagctaatttttttgtttatttgtttatttattattttttgaggtggagtcttgctgtcacccaggctggagtgcagtggtgcaatctcagctcactgcaacctctgccttctgggttcaagccattcttgtgcctcagcttcccgagtaggtggaattataggcgtgtgccaccatgcccagctaatttttgtatttttagtagaggcgggatttcaccatgttggccaggctggtctcactcttgacctcaagtgatctgcccgcctcggcctcccaaagtgttgggattacaggtgtgagccaccgtgctcagcctgaagtgaaacagtttcatcccaaaagcatatacctctgccccatccatggaaaaattgcctctcatgaaaccagtccctggtgccaaaaaggttggggaccgcggctctggagtatatgcctaggagtaggagtgtggggtcatatggtaatttatctttaatttttggaggaattgaatttcaattcttattattaccaaaaatacttaaaattcttacagatggcatgggaaagtagcacacagtcgggactctgcagccgagtttgcctccttgaatgcacacataacacaggaacaaagacagagctgcttccctcctgttgggtctctggcggacagtcaggtatgctgagggagacactgttctcaaactccaggccagggtggtttccggagggtccaccggtggtctcatctcttctctctcaaaccatggatggtgccttttaaagaaaatgacaccggccaggtgcggtggctcatggctgtaatcccagcactttgggaggccgaggcgggtggatcacctgaggtcggaagttcaacaccagcctggccaacatggtgaaaccccgtctctattaaaaatacaaaaattaggccgggcgcggtggctcacgcctgtaatcccagcactttgggaggccgaggcgggcggatcacgaggtcaggagatcgagaccatcccggctaaaacggtgaaaccccgtctctactaaaaatacaaaaaattagccgggcgtagtggcgggcgcctgtagtcccagctacttgggaggctgaggcaggagaatggcgtgaacccgggaggcggagcttgcagtgagccgagatcccgccactgcactccagcctgggcgacagagcgagactccgtctcaaaaaaaaaaaaaaaaaaaaaaaaatacaaaaattagctgggtgtggtggtgggcacctgtaatcccagctactgaggaggctgaggca

SEQ ID NO: 9750 - DNA, 787 bp, Homo sapiens
cgagtgttggagtgactgtttgcacacatctgttgtgttttgcctgtgtgcattcctcctcctggtcagagagcccgtctcttccgccctctcccttaccctaggagggctgagtcaggcctccctacccaggcccaagggcagatgcacctgagccattgtgtcccatggttgatacgggacggggctgatttcctgacctggacccctgagacccagtgctcttagctgtgagcctctgggaagaggttctggcaggtggaggggatggacgttacagtgctgtggccacctagaaaagccgtcccggaactgagaccaactgctgagggaggaagggccaccagatcgggggccgggccggggtgagcacctgaagccggctccacctgctcttctcagctgtgcgcctccaggaatttgcactcgcttcagctgatttgggttggatttctagcgtttcacatacaggatctagactcgcacacaactgcattaatatgttggtgtttgataaactagggttgaaggagttccatcagtgaagagagaagccacgtgacctgaggatgcagggcactgttcacgtggacatgagccgtttcttagcatcatgagattttagaaacatgttcttactctgccaggacccagggataggtgaggctctcctattgggataccatttcaccagcagagagattaattggagaatgtgtaattttttcccctttggaaataatttgttcttttttttttttgacagagtttctttctgtcatccagg

SEQ ID NO: 9751 - DNA, 84 bp, Homo sapiens
ggaggcagaggttgcagtgagctgagatcgcgccattgcactccagcctgggcaacagagtgagactctgtctcaaaaaacaaa

SEQ ID NO: 9752 - DNA, 359 bp, Homo sapiens
gtttaacacctcgcagtaagggattcttcacatcccagaagtagctaccctgcatcttaaacagtatgctaggttagattcttgcccgtttgctgttcctgataatgccctttaactcacacaactgagctgttgttagttaggatctacggccacagaaatagtatgtctgaaataaacataaatatgagtaaaatccaggcataccccgctaaatcatgcccttcacttccttcctgtttgtaaatcttttgtaagccttcaactttttttctttttaagcttgtagccatttctttttgaatgactcttagcttactgtgtttccaggggttgaggagccatgtatctgtgggata

SEQ ID NO: 9753 - DNA, 358 bp, Homo sapiens
gtttaacacctcgcagtaagggattcttcacatcccagaagtagctaccctgcatcttaaacagtatgctaggttagattcttgcccgtttgctgttcctgataatgccctttaactcacacaactgagctgttgttagttaggatctacggccacagaaatagtatgtctgaaataaacataaatatgagtaaaatccaggcataccccctaaatcatgcccttcacttccttcctgtttgtaaatcttttgtaagccttcaactttttttctttttaagcttgtagccatttctttttgaatgactcttagcttactgtgtttccaggggttgaggagccatgtatctgtgggata

SEQ ID NO: 9754 - DNA, 147 bp, Homo sapiens
aaaaaaccagccaggcatggtggctcacacctgtaatcccagcactttgggaggccgaggtgggtggatcacttgaggtcaggagttcaagaccagcctggacaacatggtgaaaccctgtctctactaaaaatacaaaaattagcc

SEQ ID NO: 9755 - DNA, 111 bp, Homo sapiens
ggccaggcacggtggctcacacctgtaatcccagcactttgggaggccgaggtgggcggatcacctgaggtcaggagttcgagaccagccccgccaacatggcgaaacccc

SEQ ID NO: 9756 - DNA, 610 bp, Homo sapiens
ggaggaaagagggtggaatctggacagtatgaaggatttgtattgtacctgtaatgtttgatgtctgaagctgggtggtgggcatggctgtttgttattctccatccttttggtatgcctgatacatttcataataattttaaaaaggacaagactattgcagagaaatgcatagagtgagctctgtttgggtttttaaaatgattcctacatctatgcttgcagatgtaagcaccagccctggaaaacattgcaagggattcttagtaggcccaagctttgggaaagggcccagggggctggggagttgattaggaggggatacatgctttttcctgctgccttttgaattttgtaccacacgtagtattacttattaattaaaaaataatctgaactagccaggcgtggtggcacatacctagtctcagttacttggaaggctgaggcaggaggatcacttgagcccaggtggttgcggccagcctgggcaacatagtgagaccctgtctctttagaaaaaacaggccaggcatggtggctcacacctgtaatcccagcactttgggaggctgaggtgggtggatcacctgaggtcgggagctcgaga

SEQ ID NO: 9757 - DNA, 610 bp, Homo sapiens
ggaggaaagagggtggaatctggacagtatgaaggatttgtattgtacctgtaatgtttgatgtctgaagctgggtggtgggcatggctgtttgttattctccatccttttggtatgcctgatacatttcataataattttaaaaaggacaagactactgcagagaaatgcatagagtgagctctgtttgggtttttaaaatgattcctacatctatgcttgcagatgtaagcaccagccctggaaaacattgcaagggattcttagtaggcccaagctttgggaaagggcccagggggctggggagttgattaggaggggatacatgctttttcctgctgccttttgaattttgtaccacacgtagtattacttattaattaaaaaataatctgaactagccaggcgtggtggcacatacctagtctcagttacttggaaggctgaggcaggaggatcacttgagcccaggtggttgcggccagcctgggcaacatagtgagaccctgtctctttagaaaaaacaggccaggcatggtggctcacacctgtaatcccagcactttgggaggctgaggtgggtggatcacctgaggtcgggagctcgaga

SEQ ID NO: 9758 - DNA, 612 bp, Homo sapiens
ggaggaaagagggtggaatctggacagtatgaaggatttgtattgtacctgtaatgtttgatgtctgaagctgggtggtgggcatggctgtttgttattctccatccttttggtatgcctgatacatttcataataattttaaaaaggacaagactactgcagagaaatgcatagagtgagctctgtttgggtttttaaaatgattcctacatctatgcttgcagatgtaagcaccagccctggaaaacattgcaagggattcttagtaggcccaagctttgggaaagggcccagggggctggggagttgattaggaggggatacatgctttttcctgctgccttttgaattttgtaccacacgtagtattacttattaattaaaaaataatctgaactagccaggcgtggtggcacatacctagtctcagttacttggaaggctgaggcaggaggatcacttgagcccaggtggttgcggccagcctgggcaacatagtgagaccctgtctctttagaaaaaaacaggccaggcatggtggcgtcacacctgtaatcccagcactttgggaggctgaggtgggtggatcacctgaggtcgggagctcgaga

SEQ ID NO: 9759 - DNA, 375 bp, Homo sapiens
cagcctacaaagaacaatgatgcctgggaaccatcgccaggctacactgttgactaacaaagccacgggccccgcaagaaacaattcagtaatttccacagggttggagatgactcagcagttccactcctgcacgagcacccgagagttgccctgatagccgtgcacttgggcgttcatcacagcatttgcttcttacatgaatttttaattttggaataatttcagatttacagagaagttacaaatccaatacagagaattcttgtatactaccctgctcagttttctcctacaattaacatcttaatcatgatacatttatgaaaaccaagaaattaacattggtagaatgttgttaattaaatgacagat

SEQ ID NO: 9760 - DNA, 873 bp, Homo sapiens
tttggagctgttgggtacacctgcagaaagcctgtcacttcacacttggaagattacacagcggccaggcagaggcgcccctcacctcccagatggggcggccgggcagaggcgcccctcacctcccagacggggcggccatgcagaggcgcccctcacctcccagacgtgggcggccatgtctaggctcccctctactttcccagacagggcggccgggcagaggcgctctcccccccttttcccaaacggggcggcccggcacttggcgctctctcattttcctagacggggtcagccaatgcgataggcgctatcctcacctccgcagaacgggggcggcccagcagtggcgcccctcacctcccagacggggcggccgggcagaggcacccctcacctcccagacggggcggccaggcagagaaaggagacttcactgcccatccacgagggctggttgcatacactgcagaacatctgtgcaaaggaactggacagcctacaaagaacaatgatgcctgggaaccatcgccaggctacactgttgactaacaaagccacgggccccgcaagaaacaattcagtaatttccacagggttggagatgactcagcagttccactcctgcacgagcacccgagagttgccctgatagccgtgcacttgggcgttcatcacagcatttgcttcttacatgaatttttaattttggaataatttcagatttacagagaagttacaaatccaatacagagaattcttgtatactaccctgctcagttttctcctacaattaacatcttaatcatgatacatttatgaaaaccaagaaattaacattggtagaatgttattaattaaatgacagat

SEQ ID NO: 9761 - DNA, 375 bp, Homo sapiens
cagcctacaaagaacaatgatgcctgggaaccatcgccaggctacactgttgactaacaaagccacgggccccgcaagaaacaattcagtaatttccacagggttggagatgactcagcagttccactcctgcacgagcacccgagagttgccctgatagccgtgcacttgggcgttcatcacagcatttgcttcttacatgaatttttaattttggaataatttcagatttacagagaagttacaaatccaatacagagaattcttgtatactaccctgctcagttttctcctacaattaacatcttaatcatgatacatttatgaaaaccaagaaattaacattggtagaatgttattaattaaatgacagat

SEQ ID NO: 9762 - DNA, 2014 bp, Homo sapiens
tacaattccttttcttgcacagacattttcccaagtcagtacatctgggataatagttctcagagtggctgtatattatattcacatgaagagattttaaaagttataccccatgttcatcgctttatgttcaaaagtgtcttttagggcttttaaatctttactggatttttacataattttgaattacgttccccaaattgcttatttattacaaagagaaagagtgagattagaatcatggtgatatgaatgtgttgataatttcacatgtatacatgtataaaaaatcaagttgtacatcttaaatatatacaatttttgtcaattatacttcaataaagctgaaaaaagaacacactataaacatgtcactttttacatacatatctatttctattgtatttttctaaagctattaatgtacaagttttacaaagaatgtggttaacttataatggacttggaatttgaagaatagtctgtcagactcagggccagcaatataagtcctgattcgttccttcttgagtttcaggggtgtgtgtgtgtgtgaatgcatatgtctgtgtacacacatatgtagtatttatgcctggcatgtatacaatatgggtccatatatgcaactgagcaggtattttagaacatctgatgaccttgtcatttcaagaactgtggccacagattgagaaataaagcaccctttcagtagtctgagtatttctcaacaaaagtagagacttgcccatccttagtcatttctatgggaggagtggcctctcattttatgcttttatagggacgtctattcccagcccatagtttatgagcaacattctgtcagcaggcaggaatagtggctcgctataattaattcccttcttgctcccccacctctgagagtgagaaataaaagggcattaaagggaatgtagttacaacccacaaagggaccacataaaatgtcaccttttggctcaacacattgttcccttcgtgactcctagtcctgaatttccatctcacagggcaggcagagtgtattgtcagctgagacccaagagagacacattggcagtcaatctgcatgatatggtaggggtattagttaaaactttactgaaagttaagatctgtgtcaaaggtttttccttgtcctatgtgcattacatggaaggcagaagaaaacaaggaaaagagatgaattgctgttgcaatttaaagtatgggggcagagagttgagtgtgagctgcagaatttctatgtgacaacatagaatagtggtgaagttacttaacttttgtgggcttcagtcctcctgcctccctttgtagcattagcatcataatacgtgtctcccaatgtttcagggaagagtaagtgggtttagatatatgtagtgaataccacagtacctgacatatagtcagttctcagtgctgataatcatataaattgaaagcaattaaaacacccccatttatcttcccatgcataatttataaagcacattcacatcatgcaaattcatcctcacaacactcaacattcaattaagataagcatgcactcttgtttccctttgcacaacttttgcaagttgaatggctggtttggttagattcaatccagtgttctttccattagagcagctgccacctagagaagaggacaatgtttctcccagccattgaacatgctgcatgtctctgttgaggggccaccatcaaaactcaggccctgctgttctcctctaggaggacagatggtcttaaggaatatagggaccttctagaccggaatcctcacaccaaacctttagtctatggtaatcactgtttacaaaagtttaatcttgttcccttctttaaaagtttcagagcattggtgtttattgacttttttgtttctttaaaaaagaggacaagccaggcacggtggctcacgcttgtaatcccagcactttgggaggctgaggcgggcagatcaccggaggtcaggagctcgaga

SEQ ID NO: 9763 - DNA, 170 bp, Homo sapiens
ttctggccaggcacggtggctcacgcctgtaatcccagcactttgggaggctgaggcgggcggatcacctgaggtcaggagttcgagaccagcctggccaacatggtgaaaccctgtctctactaaaaatacaaaaattagtcgggcatggtggcgggtgcctgtaatcc

SEQ ID NO: 9764 - DNA, 2014 bp, Homo sapiens
tacaattccttttcttgcacagacattttcccaagtcagtacatctgggataatagttctcagagtggctgtatattatattcacatgaagagattttaaaagttataccccatgttcatcgctttatgttcaaaagtgtcttttagggcttttaaatctttactggatttttacataattttgaattacgttccccaaattgcttatttattacaaagagaaagagtgagattagaatcatggtgatatgaatgtgttgataatttcacatgtatacatgtataaaaaatcaagttgtacatcttaaatatatacaatttttgtcaattatacttcaataaagctgaaaaaagaacacactataaacatgtcactttttacatacatatctatttctattgtatttttctaaagctattaatgtacaagttttacaaagaatgtggttaacttataatggacttggaatttgaagaatagtctgtcagactcagggccagcaatataagtcctgattcgttccttcttgagtttcaggggtgtgtgtgtgtgtgaatgcatatgtctgtgtacacacatatgtagtatttatgcctggcatgtatacaatatgggtccatatatgcaactgagcaggtattttagaacatctgatgaccttgtcatttcaagaactgtggccacagattgagaaataaagcaccctttcagtagtctgagtatttctcaacaaaagtagagacttgcccatccttagtcatttctatgggaggagtggcctctcattttatgcttttatagggacgtctattcccagcccatagtttatgagcaacattctgtcagcaggcaggaatagtggctcgctataattaattcccttcttgctcccccacctctgagagtgagaaataaaagggcattaaagggaatgtagttacaacccacaaagggaccacataaaatgtcaccttttggctcaacacattgttcccttcgtgactcctagtcctgaatttccatctcacagggcaggcagagtgtattgtcagctgagacccaagagagacacattggcagtcaatctgcatgatatggtaggggtattagttaaaactttactgaaagttaagatctgtgtcaaaggtttttccttgtcctatgtgcattacatggaagacagaagaaaacaaggaaaagagatgaattgctgttgcaatttaaagtatgggggcagagagttgagtgtgagctgcagaatttctatgtgacaacatagaatagtggtgaagttacttaacttttgtgggcttcagtcctcctgcctccctttgtagcattagcatcataatacgtgtctcccaatgtttcagggaagagtaagtgggtttagatatatgtagtgaataccacagtacctgacatatagtcagttctcagtgctgataatcatataaattgaaagcaattaaaacacccccatttatcttcccatgcataatttataaagcacattcacatcatgcaaattcatcctcacaacactcaacattcaattaagataagcatgcactcttgtttccctttgcacaacttttgcaagttgaatggctggtttggttagattcaatccagtgttctttccattagagcagctgccacctagagaagaggacaatgtttctcccagccattgaacatgctgcatgtctctgttgaggggccaccatcaaaactcaggccctgctgttctcctctaggaggacagatggtcttaaggaatatagggaccttctagaccggaatcctcacaccaaacctttagtctatggtaatcactgtttacaaaagtttaatcttgttcccttctttaaaagtttcagagcattggtgtttattgacttttttgtttctttaaaaaagaggacaagccaggcacggtggctcacgcttgtaatcccagcactttgggaggctgaggcgggcagatcaccggaggtcaggagctcgaga

SEQ ID NO: 9765 - DNA, 1685 bp, Homo sapiens
gtagattcctatcaggttcatttgatcctgtgctgagttcaggttctaaatatctttgttaattttctgccttgatgatctgtctaatgttgtcagtggggtgttaaagtttccccctcttattttgtgggagtataagtctcttcgaagatctctaaaaacttgctttataaatctgggtgctcccgtgttgggtgaatatatatttaggatagtttgttcttcttgttgaacattttaccattatgttactataatgcccttatttgtctttttttgatctttgctggtttgaagtctgttttatgagaacctaggattgaaacccctgctttttttttctgttttccatttccttgagagatttttgttcatccctttattttgagtctatgtgtgtctttgcttgtgagataggtctcttaaagacagcataaaaatagatcttggttctttatccatcttgccactctgttttttgaccagggcatttagctcatttacatttaaggttagcattgttatatgtgaatttgatcctgtcatcataatgctagctggttattttgcagacttgtttatgtggttgcctcatagtgtaacttgtctgtgtacttcagtgtgtttttgttgtggctggtaatagttttttctttccatatttagcacttccttcaaaggctcttgcaaagtaggcctggttgtgatgaatttcctcatcatttgcttgtctgaaaagggtcttatttctcattcgcttttgaagtttagtttggccagatatgaaattaagggttggaaattcatttctttaataatgtcaaatattggcccccagtttcttctggcctgtagggtttctgctgagaggtccactgttagtctgatggaattccctttgtagatgacctgacctttctctctggttgcccttaacattttttctttcattttgaccttggataatctgattattacgtgttttggggttgatcttcttgtttagtatattactggtgttctctgcagtttctgaatttgaatgttggcccacttttctaggttgaggaagttttcctggatgatagcctgaagtatgttttctaacttggttccattctccccatctctttcaggtaccccaatcagtcataggttcaatctctttacataatcccatatttctcagaggttttgctcattcctttttatttgtttttctctatttttgtatgcctgtctcatttcaaatagttttcaagctctgagagtcttttccctgcttgttctattctgctactgatacttgtgattgcattgtgaagttctcgtgttatgtttttcagcttcttctggttagttatgttcctctccaaactggaaaatgctatggttctggcaggcttgtaaaggtgctgtgctgatggtcttagacaagatctggaataattatttggattatcagacagagattctcattctttttctgttactttctctcaaacaaatggagtctctctctctctgtgttcttagctgcctggagttggcagtggagtgacacaagcacccctatggctactgccactagggcggcactacatcagatctgaagacagcacagtgctgggtctcacccatggcctgctgcaaccactcctggctactgcctatatttgctcgag

SEQ ID NO: 9766 - DNA, 6694 bp, Homo sapiens
ttttttttgtttgtttggttttttttttttgagacggagtctcgctctgttgcccaggctggagagtgcagtggcgcgacctcggctcactgcaagctccgcctcccaggttcacgccattctcctgcctcagcctcccgagtagctgggactacaggtgcccaccaccatgcccagctaattttttgtatttttagtagagacggggtttcactgtgttagccaggatggtctcgatctcctgacctcgtgatccgcccacctcagcctcccaaagtgctgggattacaggcgtgagctaccacgcctggccctaatttttgtatttttagtagagatggggttttgccatgttggccaggctggtctcaaactcctggcctcaggtgatcctcctgcctcagcatcccaaagtgctgggattacaggcgtgagccaccgcacccagcccaccccagctgttcttctcaggccagttcttgacagcactcaactcaagccccggtaggtggcagggactcattctcctgttaggaaagggccactggatggggaaggaaagatgaatggagcagcatgtgtgcacaactattctggtagtgcttcctctacaaagactagtgtgaacattttccatttgttggtagtcccaagaaaatgtggcttgtagatattgatgatgatgacaatggtagaaataacagtgaacacttatgtagcatctcttatgttccaggtgctattttgagtgctttacatatattacatcattaaaacctcataacagagatttctctagtcaagaaataagaactgtgagacacaatgagtttctcctttaccttttctcctgaaaagcttagagttgggtgcctggaaaacttctgtctactcctctggcttctttcaaagcttctgggttctatgctatctttagacacctcagcctgctacatttcattctgtatgccatccccagggcttgggaagtaggaggagttcacaattttaacacaggtccaaaaggacatgatccagtgtaaaactccacaggtccaccctgtctttcccatcccacatcacccaggagaggactcccacgggactcaacacacgggctaacccaaagtcacccaccactcccggggccatcaccatgggagctgccaatcccagggcccttcagaggctcagcccagcagcccttcccatgcccaccgcagtccccagaagccacccactgctttggtttcttgccccttttctgctaatcttgtggtttgtagggagaaaaaggggcctttactcactgctgtcgcatcatggggatattgacacagttagccgcagccacagcggcaaagggcacccagcggcccaccaagggcggcgctttctgttgggggaagagaacagtaggagttgttcagaagcgctggaagatgggaggggagggggctgaacgactagaatacaaaaaagaaaactaggccttgctaccgccacacatccagacacccagtctgggaaccccaaactccctcaaaggcccaagaagaaccaacctggggacggccctggtgtatttctcatcacttggccagccgggctctggccattcccaactcacccagcctggggaactgtccctgggggaaggacgttttccctaggactctgctgcccccgcgtggccaccatgctgcagcggccccagaccatacctttgtcaacatgttcatgcccacagccgtggccacagcagtggttgtggctgtgaagtaggaaagggccatctgcctgggggaggagagagatgcttgggagtggggcccctgccggctgagggccaaaccacgggcttgagggagaaagtcggctggcgaggcttcgtgcgtgaaaaccgcacaggatctgtccccagccttatcttgtgaccctctccccctcactcacagtgccccagcccccttggacttctttcagtactgtgaacatgccaagttcctccctgcctcggagcctctgcacacggctgctccctatgcggggaggtgttccctgggctcttgggtcattcatccctcatccttcaggacagttgaaatgtcgtcttcacagatgggactgctctaagtggcctaactacacagacaccgctctgctgttctctgccttgcaaccctggttttctgggtggttttttttgtttgttttgagactgatcttaggcaatctgcctgcctcagcctcccaaagcgctaggattacaggtgagaaccaccgtgcctggcccaaccacatgtcttaacaatgtatcccagcatctagaaccatgcacatccccagcacataagacacactcaagaagaaatatttagagaatgaatgaataaacacatttggaattggtctaggaagaagatccacccctactcagcttgagaaaatatttccaaaccctgggaaagggtgacttggtcacctgctcagtgcaggtgctacccaggaaggactgacagcccagaaccctttagaaaagctgttcgtggggagacacgaggacagcctggggttcaggtctcctacctgactgatgtgggggaagccgcattcctgttggtgtagttgactaaggcattgaaggactggttcacccactgccagaagatcaccgccggcatcgtcctaccagtgaggaaggccaggagaggcagagagaagtcagatggcagggagtcctgagggtatgccagtcaaagcacatgatctgcaggtccccacactgttcccatactagttttttatttttatttttttgagacggagtctcactctgtcacccaggctggagtgcagtggtacgatctcagctcactgcaacctccgcctcccaggttcaagcaattctcctgtctcagcctcccaagtggctgggactacaggcacacaccaccacgcctggctaatttttgtatttttagtagagacggggtttcaccatgttggtcacgctggtcttgaactcttgacctcaagtaatccacccgccttggcttcccaaagtgctgggattacagacatgagccaccgtgcccagcttgttcccatactgttttatgcacctgggcttttgcgcaggctggcccctctgcctcaaatatctccccctcctccttccatacatggccaaccctgccctgttgagagggatcacttcctccatggaaccttcccgaccctttccctgcccctcctgagacagagtaagtcactccatgctcctgctcccacaaccccatgttcttcctccaacctaccacttaccaagctgtactgtaactgtttacttcttggtctcctcaacaaaactgggagctccttgacgggaggttactgaagccttcacattcccaacacccggcccaaagcccagctcaatagctgaaccaatcaatgcgtggggtgggggacgcaggggaggaaggaagaggtaggaagaagagtcacatgtccagcagctacagaggcagtctattctctccccagccaagccaagaaagggacttcctattgttttgtttgggtgttacataattaaaatcattgtggaataagtactttttaaagagggaattggggtagcttatttgttgagggttctacacaggactgcctcagttaaaatccaggcacccatatttcctgcctgtttaaacctggacaagttcttcagcttctctagaactctagttcttcatctataaaatggaaataatagtacctatagtgtagggttgttgagagggttaaatgaagcaatacgagcaaagaatgtagcatagtgcctggtatctggtaagtgaccaatcaagagaactattattattatcatagtatgactccctgaccagcagatccaggcagctgtacctcccacggccctgcccccaggtcccacctgtagaactggagcatgaagcccgtgatgatcatgccgccaggaagctggaaagacatgcgcccgatgacattcatcttctccccagtgtcggggtggaaggccgagtcatacagcttcttggcatacagcagctgctccacttgggtgcctgggggcacaacccccatcctgccacccaaggacagcaggcagtcaccatcctgcctgatcaatgtctcccagtctccccactctcacttcttccagcccccagccctgagatttctgcctattccttcaccttcggtttccacctcctcccaagaggaccccatcaatgttaccctactacttccagccccttccccgacccctcacctgctcttctccaccatcaccttggcccagtccagctcccgctcagatacaaagacagtgcgggggtccgtgatgtttaggaagtgcttcactctccccaggaaggtgcgctggtcccaacggggggcatcgatgttaaagccagacaggtcagcctccatcttgctcacacataaaactgtggacctaagggacaaaggaagaagatgactgtcccctaaatcaaagcccaccacagaggacctgagcaggtcccactgttgcagactgcctgctctcaccagctactgggcatcgtctgactcagcttgggagggcccaagtgaatggtcatcagattgagcaactgggcaccaacatgtgtttcctgagggcctgctggtggccagctctgtgcttgaccatacagcaggagggactggaaaaggggacaatacagtgcctgtgcttggggagctctgggaacaaaagcccacccattaaatagtataatacccccaggtgtttctggcaggggagatgggaaaagtagccattttgaaaaacagccagctgggtgcagtggctcatgcctgtaatcccagtactttgggaggccgaggcagggggatcatgaggtcaggagtttgagaccagcctggccaacatggtgaaaccccatctctactaaaaatacaaaaatgagccgggcgcagtgccaggcacctgtaatcccagctactcaggaggctgaggcagaaaaattgcttgaacccaggaggcagaggttgcagtgagctgagatcacaccactgcactccagcctgagcctgggtgacagagcaagacttcatcttggggggaaaaacaaaacaaaacaaacaaacaaaaaaacacccaaagccctttatacttcttttttttatttaattttactttttttttgagacagggtctcattctctcacccaggctgggatgcagtggtgtgatcatggttcaatgcaactattacctcccaggtcagcctcctgagtaactgggactacaggcacataccaccaccctggctaatttttgtatttttttgtagagatggcacctcgctatgttgcccaggctggtttcaaactcctaggttcaagcaatccttctgcctcggcctcccaaagtgctgggattacaggtgtgagctgccgcatctggcctgttttattatttagagacagagtctcattattttatccaggctggagtgaatggtaattgacaggcatgattatagctcactgcaacctcgaactcctgggctcaagcaatcctccaacctcagcctcccaagtagctgggactacaggcatgcactatcatgtccagcccttttattcttcttaacaaggtctacccttgagggaaactattttaccagagcctaaccatcttgggttgtaccagaacttaagtgacttggggaaagagaactccagccacctcttgccttcctgcctcacctaaagaggacaaggggaggctgagaagctcttgtgaaggttcaggggcacaggctccccagaagactgagacctcatcacaggactgtagatcctccactccctcacctcaccactgcaccagcagggctcctgtatcattacaaggattataacaaaaagagtaacaagtcttaggccctatttaagaagtctctagagacccatagacagcaagggagataagaacaaggacaccagaagaaaatttagccttttatacctatagctacagcaaacagtaaacatagcctagataaacaaaacctcacccctcagttcctctcacagggtacatcatgtccagctttcagtgaaaaattacaaggcatactaaaaagaaaaaaaaaaaaaaacgcagtttgaagaaacaggccaagtatcagaatcagatttagatatgagattttagaattatcagaccaggaattttaaataactatggttaaaattaattaattaattaattacaacgatggttaatattctaaggactctgaagggaaaagtggacaacagacaagaacagacaaataacataagcagtgatggaaaatctttttttttttgagacggagtcttgctctgccaccaggctggagtacaatggcacgatctcggctcacttcaacctctgcctcccgtgttcaagtggttctcctgcctcagcctcccaagtagctgagactacaggcgtgcaccaccatgcccagctattttttgtatttttagtagagatggggtttcaccatgttagccaggatggtctcgatctcctgacctcgtgatccgcccacctcggcctcccaaagtgctgggattacaggcgtgagccaccacgtcc

SEQ ID NO: 9767 - DNA, 738 bp, Homo sapiens
gacacaaaaagcattaaagtattaagtaatggcaactggaactttaacaacacttctgtccttctgtagtctgttgatatagattggatgtgtgtcctctgcagatctcatgttggaatgtgatccccattgttggagctggggcctaatgggaagtattggttcatgggggcacatcccacataaatcgcttagtgacatccccttggtgataagtgagttccttctttgagttcatgcggggtctggttgtctaaaagagtatggcacctctccccagctctctcttgctccttctcaccatatatcatggtagttcccatttgccttccaccatgattgtaagtttcctaaggcctcaccaggaacaggtgccagcaccatgcttcctgcatagttgttcactcttattcttcagaatggctactgcaaatattgtccagatgtcaaagctccctactccactctgtgcccctcctacactcaacttgttaactctttgctcccgatgcaaactcacttgtcctttctgtcaccgtggatgtctctctcctcccagtgcagttaccctcctgtgatttggtttccatttcctttcctttcattaggaactttagatcattcattttaaactctcctctgtgtccttaagtttttccactagtcattggtatcgacattttaacatgctcaagtctcctctatttctccctccctccaaaaaaaaagaaaagaaaa

SEQ ID NO: 9768 - DNA, 738 bp, Homo sapiens
gacacaaaaagcattaaagtattaagtaatggcaactggaactttaacaacccttctgtccttctgtagtctgttgatatagattggatgtgtgtcctctgcagatctcatgttggaatgtgatccccattgttggagctggggcctaatgggaagtattggttcatgggggcacatcccacataaatcgcttagtgacatccccttggtgataagtgagttccttctttgagttcatgcggggtctggttgtctaaaagagtatggcacctctccccagctctctcttgctccttctcaccatatatcatggtagttcccatttgccttccaccatgattgtaagtttcctaaggcctcaccaggaacaggtgccagcaccatgcttcctgcatagttgttcactcttattcttcagaatggctactgcaaatattgtccagatgtcaaagctccctactccactctgtgcccctcctacactcaacttgttaactctttgctcccgatgcaaactcacttgtcctttctgtcaccgtggatgtctctctcctcccagtgcagttaccctcctgtgatttggtttccatttcctttcctttcattaggaactttagatcattcattttaaactctcctctgtgtccttaagtttttccactagtcattggtatcgacattttaacatgctcaagtctcctctatttctccctccctccaaaaaaaaagaaaagaaaa

SEQ ID NO: 9769 - DNA, 763 bp, Homo sapiens
taatttctggagtttcaggagctttatcctaaggtggctgtgataacctggattgttgtgtaaattgcacatttggggcttggcaagtggcagatgggagttctggctgttttattaccagtaactgggacatgggcttgggttcgaggaggccacgtggctcctgacacagccttaaggatctgaggtggcccctgccctgggcacctggggtgggaagggaggtgcagggaacagggagacttatttttcactgtgatcttttcgaaccatttgaatgtattataccttgtgtgttttattcaaaaatgggtagatttgttaaacaaaacctaaaaaaaatatgagcaggagtgacagaaaacagagaccactgagtctgagtccaggttggcccctcccggtgtaaccttgatgcaacattgagcaggcctgagctggggtgacctcactgacagctaggagaggaatgagactctcctctgggtcactcggtggtaggggtgagctggggtggcctcactgaccgctaggagaggaatgagactctcctccgggtcgcttggtggtaggggttcagtgggaatgggtttggggcctctgacatatctggctcaggaagccagggtaaatttcagccttaaaggagaaaggctcgtgtcagcccccacagtctgcaggggctgtccctcctgggctcctctccacccctggtgatgtgaccacttgggtctctcctctaggacaggcccggcccctcgag

SEQ ID NO: 9770 - DNA, 9799 bp, Homo sapiens
aaggcggctggggagaaggtgtattggacctgccgggaccaggcccgcatgggctgccgcagccgcgccatcacccagggccgacgggtgactgtcatgcgtggtcactgccacccgcccgacctgggaggcctggaggccctgaggcagcgggagaaacgccccaacacggcgcagcgggggagcccaggtacctgggggtgggctgggagctgggccccaggaagcaggcaggagccccacactgcctttccctctccatgctgcggctccccctggcaaacgtcctcttcccttctttgaacatcctagaaggaactatggccctggcctcctactccttggcccccctgatgccgctttcaatgggtctcaccttcctgctcagcccagcctcccccttccagcctgacctgccccacagtagcagcagcagggatagacctccctgccctcctcttcctccgtttgtcttaagagttcatagtagtaatagagggtgttgactgcacatggtcagtctcgttgctatggtggaaggctgtcttaacgtctgagtggttaaggattgaggaggtgatatttacttacatgcagccggtttctcctctcggcccgctgttccatagacacccataatgtcctgaaacgctggcccgaggagggtcccggctgtctccatctttatccacacggtcggccccccgcagtgcctggtgttttgacttcacaaccacagttgcgtaaatgtccccatagcgtctggctgaggagccatttcatcgtggcctcctccactcacctgctcttccttcacgccccaaggcgctggcctctctttccagtggctcttccggatcctgcagcttttgggtcatgtgagttgcctcatggccctaaagttctctcggacttgagagctgtgattgtctttctctttttgttccatctccagagagacagtgctgcgaggtccccgcctcgtcctcacccccgctcctgaccccacaagtaactaagcaattgtttcttagggtcttggctgccctatttcctaaaatgtgcctccactactattaattggtttttccatttccttgtcagctactcagtgcacttcttgcacaggcttttttttttttttttttctttgagacggagtcttgctttatcacccaggctggtgtgcagtggcgtgatcttggctcactgcaacctccgcctcccgggttcaagcaattctcctgcctcagcctcctgagtagctgggattacaggcgcctgccacctcgcccagctatttttgtatatttagcagagacagagttttaccatgttggccaggctggtctcaaactcccaacctcaggtgatctgcctgcctcggcctcccaaagtgctgggattacaggcgtgagccaccatacccggccacgtttggtttcactttagcctagaaacctgctcgcggctgactggggggtgctctgtggtcccatcttcctaacacagctctgtcttctctgtggggtggcagctgctgcgtttgtttgcctgcttttgtgtgtccaggtcgaccccacctggatccgatcatccacaaccgcaggttgctggaacctcccagtgcagcctggcctgggggcagaggccgggcccagctgtccctcggggttcactgtgctgactccctgcttctgggcctgcctttctctttcttggttttctttataattttgtggtttggagaagtcctgcctcccgtcgtttcctgggccggtcccgggaggtagcacgttgaggcctttcatgtctgaaatgtctgtcgcttccctccgccggaggggcagcctggcctccgtggtgtcacaggtgcagagcctgcccttgaacgtccctgccgcttttgcgtgactgatcctctgtgtgccgtcagctttgcttgaggttttagggtctttgctccctcccagctgtacctggctgtgctgggggcctttttaggctttgggcttgtgtccttcatcgtggggtcatcctctcgtgctctttgttaacttccccatcatcatccctttctgttgctcctgttaatcagatgttgatcctcccagatgagggcgtcttttttttttttttgagacagtttcactcttgtcgcccaggctggagtgtagtggcgtggtcttggctcactgcaacctctgtctcccaggttcaagtgattttcctgtctcagccttctgagtagctgggattacaggtgcacaccaccacgcccagctaattttttgtatttttttagtagagatggggtttcaccatgttggccaggctggtcttgaactcctgacctcgtgatccgcctgcctcggcctcccaaagtgctgggattacaggcgtgagccaccgtgcgcagccccttgctggatattttcatccgtgtggaaggggataaagcgtgccccatggtcacaccaccccctcccgtggcctggcgtccccaccttcgtcctgacctcttctgtctcgtggtccccaggctcctgtgctgctgtgcccctcagggtcctcctgcctcccgagcctccctgctccacatggcccctgcccagccctctccatccctcttgaaggtagttccacagccagacaccctcccgccccccgctggcctctcctctagggcttgctacccacccccatcccctgcttccactgccacccgatgtgtccacgatgccccaggccacctccccacctctgtggcccctgagcctgcacggaggaaagggtatcctctgggcaaggcacagccacccgccaggtcctccctctcaccacatccaggacagtggacgctgctccctgcctcttcctcagagtcctggggtcacacctctacctgcgcggctctcgggggccacccctctcagccccatccggctcctgagcagctttgtccccagagggccccgggtcattcctctgaccaaccaggcacggcgcaccctgcatgcaagcctgggcgggtgctggggacggacgagtgacgcagcagacactgcctccctgaaggcatggcaaggtgggacgcttggccgccacctgcaggggcctcacctgaccagtccccagcctcaggaggcggaccccagcagctggagccccagcagagttggggggatggtggcatctgtgtcctgggctccggggccacctcactgtgaggaggaggtgtgggcgttgtgggaggtctcatctcggggccatgctgatctgggctctgagagctggtgtccgctgctcctcccctcccatttctcaacaggaggccccgagttcctgaagacgcccctggggggcagcttcctggtgtacgagtccttcctctaccggcgggagaaggcggccggggagaaggtgtattggacctgccgggaccaggcccgcatgggctgccgcagccgcgccatcacccagggccggcgggtcatggtcatgcgcaggcactgccacccaccggacctgggcgccctggaggcctgcggcagcgggagcacttccccaacctggcgcagtgggacagcccaggtgcgtgtggagggtgctgggctgggtctgcctggtctcccaggacctgtgccccacacgctggctggaggctgcccgtggggtgttgtgtgttgtgcatggtggtctgacagccggggccataaactccccaggggcaggaggctccatctgcgggctccgagctcctgcagctggtcctctgggtagtggggactggctgtcggaggtagaaacccactcagctctctagaggaagaggatggtggccaggggtggcattggcagccacagagagtgcttggcatctgctgacgggccgtacggtggatcctggacactcttggtctacccccacgccacccacactgcttctagtctcacggggttctctctggccaccccaacatcatgtgaccttttagttcagcttgttaaaagtcagctgccagctggctgaggggtaggtggacagggagccaggaggccctggtgcccagcccagaaaggctcagcccctgccctgggggatgcacctgcaagcatgaggtctgaggggttgggagagtccttcaggagcattcagggtccagtgcttgccaggccacgtgcccagtcatccccagagcccttggaaagggccagccagcgtgggagtctgggctgcagggcccagaggggaggagggcagggaccaccgtgcagcgtgctaggggatcgcagattcctggtggggcctggctgggggatacaaatcagacccccagccctgccacccaggcccctgtggccccactcacagtgtcactttccctttcagatcctctccggcccctggagttcctgaggacttccctggggggcaggttcctggtgcacgagtccttcctctacaggaaggagaaggcggctggggagaaggtgtactggatgtgccgggaccaggctcggctgggctgccgcagccgcgccataacccagggccaccgcatcatggtcatgcgcagccactgccatcagcctgacctggcaggcctggaggccttgaggcaacgggagcggctccccaccacggcccagcaggaggacccaggtacaggcaggctgtggggcagaggcagggctgtgggcatcctcatctcttccagctcagaactgatgccccaggccaggcacccactgagcagactgcttttgtgcacacacaaattattcatataaacagaatgtgaaaccagtctttgtttttttttttttttttttttttgagactgagtcttgctctgttgcccaggctggagtgcactggcgcgatctcggctcactgcaagctccgcctcccgggttcacaccattctcctgcctcagcctcccgagtagctgggactacaggtgcctgccaccaagcccagctaattttttgtatttttagtagagacggggtttcaccatgttagccaggatggtcttgatcttctgacctcgtgatccgcctgtcttggcctcccaaagtgctaggattacaggcgtgagtcactgtgcccaaccttttttttttcttgagtcagagttttgctcttgttgcccaggctggagtgcaatggagccatcttggctcactgcaacctctgcctcctgggttcaagtgattctcctgcctcagcctcccgagtaactgggattacaggtgtgcaccaccacacccggccaaaaccaatctttagaaagcattgtgtgtctcactgtcattcatgtgaatattaagggccatgtcctgtataacagtaacaaatccaagttggccaggcacagtggctcacgcctgtaatcccagcactttgggaggctgaggcaggcggatcacctgaggtcaggagttcgagaccatcctgatcaacatggagaaaccccgtctctactaaaaatacaaaattagctggacatggtgacgcatgcctgtaatcccagctacgctgtaatcccagctgcttgggaggcaggagaatcacttgaacctgggaggcggaggttgcagtgagccaagatcgcgccactgccctccagcctgggcaacaagagtgaaactccatctcaaaaaaagagaagaaaagaaaacagcctggccaacatggtgaaaccttgaaagaaaacagcctggccaacatggtgaaaccctgtctctaaaaaaaaagtttataaatcagctgggcacagtggtgcacgcttgtggtctgagctcctcagaaaaggggaggatcactctagcccgggaggttgaggctgcagtgagccatgcactgcagtccagcctgggtgacagaacaagaccctgtctttacaagaaatttttttgagaaaaggatttctttgagaaagccactatcgagcttacagagaaagttgtgctggaggcctggcctttcatctttgatgtctagttgacccccactattttccatgacagcagctgaaggtcaactcttaggagctcaagtagctgctgttacctgggaaggtaattgatgcgttgaattcccagcgttgcttcacccggttgtctttctcctcacagccttgagggcgtcgttaacaaggtgtgtgtccttggttctgtcagcttcaacaagagaagaattattaattcatattttcaattatttttccacagaaaagattcaagttcagctgtgcttcaagacgtgttctcctgaaagccagcagatttatgggtaattgtatttgttatctaatggtgcatgaccaattacaacaaaacgtagtgggcttaaaacaacaaatatttgctgtctcagcttttgtgggtcaacattatgggagtggttgggctgggtggttctgactcctgaggttgaagagaatttgtcagccagggtggcagtcatctgaaggcccaagtgaggctggaggccctgctcctcaccatagggacccctccttgggcccacttgagcatccttcacatgacagccatgggacagagagagaacaagagggaagctgccagcagcagaattcaggttcttctcaaccacagccaggccataaagcaagagtccattattttattttttgagatggagtctgtgtgtggcccaggctggagtacagcggcatgatctcagctcactgcaaactctaccttccgggttcaagcaattctcctgtctcagccccctgagtagctgggattacaggcatgtaccaccacaccgagctgatttttgtatttgcagtagagatagggttttatcatggtggccaggctgagtctcaaacttctgacctcaaatgatcctcctgtctcgggtctcccgagtgctgggattacaggcaagagccactgtgcccagccttgttattggtttgtaattacatcccactatggtcaaagaacatactttgtatcatttcagtcctttcacggctggatacagtggctcatacctgtaattccagcactttgggaggccaaggcaggcagatcatttgtaattccagcactttgggaggccaaggcaggcagatcatttgaggtcaggagttcgagaccagcctggccaacatggtgaaaccccatctctactaaaaatacaaaaattagtcaggcatggtggtacatgcatgtaatccaagctattcgggaggcagaggttgcagtgagccaagattgtgccactgcactccagcctaggtgacaaacaaaaaccaaatcaaaaacagagaaatttgggaaactcagaaatacgtagaaattaaagaacacacttataagaaaccagtgagtcagactgggcatggtggctcacgcctgtaatctcaacactctgggaggcagaggcaggaggatcacttgagcccaggagtttgaaaccagttggggcaacagagcatgaccctgtgtgtaatttaaaacaaacaaaacaatgagccaaagaagataattataaaatactttgaaataaaacttatgggatgcactgaaagccgtgcttagagggaaatctatagctaaaaacacttctattaaaaaggaagaagcctgggcaacatggtgagacctcgtctctgccaaaaactcagccagtcatggtagcatgtgctggtagtatcgcttgaacctgggagattgaggctgcagtgaagcatgattgtaccactgcactccagcctgggagacagagcaagatcccatctctaaatgaataaacagggccaagcatggtggctcacacctgtaatcctagcattttgggtggctagggtgggaggatcgcttgagcccaggagttccatactagcatgggcaagacctcatctccacaaaaaatagaaaaactaaaaaaaaaagaactaaaagtctgggcgtggtggctcacacctgtaatcccagcacactgggagaccgagggaggtagatcacgagaccacgggttcaagaccagcctgaccaacatggtgaaaccccatctctactaaagatagaaaaattagccaggcgtggtggtgggagcctgtagcaggagaattgcttgaacccaggaggtggaggttgcagtgagtcgagattgcgccactgcactccagcctgggcgacagagcaagactcatctcaaaaaaaaaaaaaaaaaaaaaaaaaaaactgaagcagaaggaaggaaataaataataaatgaaaccaaaagttggttctgtataaggatcaataaaattgacaaatatttagctctatctacagatcaaaaaaattgaaaagcaagaatactgaaaatactaaaatcaggaataaagatgagaccttactatggacctcattctggcagagtctcattctgacacccaggctggagtgcagtggtgccatctcagctcacttgaacctcaccctcctgagtagctgggactacatgcacgcaccaccacgcctggctaatttttctatttttagtagaaacggggttttcccatgttgtccaggctggtctccaactcctgggctcaatcagtccacctgccttggcctcccaaagtgctggcattacaagcatgagccgcaatgcttggccccagctcattctctaagaccagtatcaccctgatatcaaaaccaagcaaaggaatcacaaagagaaaactacagaccagtatttcttaggaacgtagaataccagcaaacagaatccagcaacataaaaaaggattatataccatgaccaagtaagatttatcccaggaatgcatcaacatgcaaaaccaattaatgtaacacagcaggcctgagactgctgccctaagaacagcctgtgtgcaaggttcacccttggctggcatctgggaacttttttttttttttttttttttttgagacggagtctcactctgtcgcccaggctggagtgcagtggtgtgatcttggctcactgcaagatcactgtgagtgatcccaggtagctgggattagaagtgcgcaccaccacgctcagctaatttttgtatttttagtggagacggggtttcgctatgttggctaggctggtcacgaactcccgacctcaagtgatccacccgcctcggactcctaaagtgctgggattacaggcatgagccaccacgcccagctggcatctgggaacttgactggtaaagagctcctatgtggatacaatactatccccaaataacaactgctcactcttttctatacaaatcatgtgatatttgctgaacacttgcttttcttctgagcctggcatttcggtgaccatattcagtcacgcaggcacaacgtacctacatgagcaacccccagtgaaaaccctggactcctgggctcaggcaggcttccctggtagagaacactttgcacatgtcacagctcgaggctggaggattcagcacattctgcgggaggggaccccaggggaggggactctgggggcttgtacctggtttcctccggccctcaccccaaatgcatcttcctgttactaattctgcgtcgcatcttttcaccgtagtaaatcccagccactagtatgatggtaggctaagtcctgtgagtccctcaagtgcagtcaccaagcctagtgtgtgatggggatgcctgcataccagatcagtagagaaaaggacaaaaaccgtgtgatcactgaatagacacaaaacatttgacaacctccaacacgctttcatgataaaaacattcaac

SEQ ID NO: 9771 - DNA, 131 bp, Homo sapiens
gccaggcgtggtagcgggcgcctgtagtcccagctactcgggaggctgaggcaggagaatggcgtgaacccgggaggcggagcttgccgtgggccaagatcgtgccaccgcactccagcctgggcaaaaga

SEQ ID NO: 9772 - DNA, 1193 bp, Homo sapiens
cgaccactcacaggtgccagggctctgacatctcgccaggcatagctaaaggttatactcatctatccccttctgcttctgttacttttggtgtgtggaacaagacccatgggagctggtgcctttggctacttggccttgccttgtctggtttgcttgacatatctgttacctaccttatctagaaaccattctcagatgggatgataaattaagagaacttacactcacagaaactccaaaacaattccaactgggcttttcttcatgttgaatcataatatactgtaatgatttactaatgaaataccattttgtttatcaaattaaatgagcaaatttaaaatactgatagccaagtgtggtggctcatgcctgtaatccccagcactttgtgaaggtgaggcaggaggatcacttgagcccaggagttcgagaccagcctgggtgacatagtgagacaccatctctacaaaaaacataaaattagccaggtgtggtagcatgcaactacagtcccagctactcaggagactgaggtaggaggaccacttaagcctgggagatggaggctgcagtgaggtgtgatcatgccactgcactccagcccagtgaaagagcaagaccctgtctcacaaaaataaaataaaataattgatattaccctttatacatggttgttgaaatagggtggtgcccttttggaaaatcacttgacagtatatccagaaatgctgatatgttttcacacaaaaactttgttttactttcagaaatttatcctaaatcttggccagacgcagtggctcatgtctgtaatcccagaactttgggaggctgaggcaggcgaatctcttgaagccaggagttccagacaaatttagcccatgtggcaaaaacctgtctctactacaaatacaaaaattagccgggcatggtggtacatgcctgtaatctcagccactcgggaggctgaggcatgagaatcgcttgaacctgggaggcagaggtttcagtgagccaagatcacaccactgtacttcagactgggtgacagagtgagactctgtctcaaaaaaaaaaaatcttaaatctagaaaactgtagatgtgccaggcatggtggatcacgcctgtaatcccagcactttgggaagctgaggtgagtggatcatttgaggtcaggagctcaag

SEQ ID NO: 9773 - DNA, 196 bp, Homo sapiens
aaaccctgtctctactaaaaatacaaaaattagccgggcatggtggtgggctcctgcagtcccagctactcgggaggctgaggcaggagaatcacttgaacccgggaggcggaggttgcagtgggctgagatcacgccactgcactccagcctgggcaacagagtgagactccgtctcaaaaaaaaaaaaaaaaag

SEQ ID NO: 9774 - DNA, 149 bp, Homo sapiens
gcctgtaatcccagctacttgggaggctgaggcaggagaatcgcttgaacctgggaggcggaggttgccatgagccgagattgcgccattgcactccagcctgggcaacaagagcgaaactccatctcaaaaaaaaaaaaaaaaagaaa

SEQ ID NO: 9775 - DNA, 763 bp, Homo sapiens
aaaagtttcagttctggggatgattttgttcctattcttgataccaagcgataaaatcaggctgctaagagaaaatgaaaaggaaatagccagctagtgtcattgaatcatatcccgaggcagtgagtttcttccagcacattttggcctcagtcctgaggctggaccttaactagtgaactgcaaactcactcaattatgcagtctgcttggtgcgatggaagtgaaaatgtcctagagagttgggtgctagtatgcattttgatagtctcctagcctgtgacccaggacagattccttgcatgcataggagtttgtcaccatgcaaaatctggctgttgttcttctgagaacatgggggagctggactgtcaacaatgagccatatcaggctgaaactgggaaactgttctgctccttcagagtcaagacaagccagaatgagtgtcaaatttccttcctctgtgcttcctcagatgtggtcagattcatagccttcagtctattctaattggtagctagcctggtgtggacttttgaccacccaccaatcaaccaactcccaccctcaccatttactgcacgagtaaagccacgcttcctaggaactaccattggtagagatgttactgagtcataggccctgagataggaatgatctataaaggccatccacgccagttcttgaacccttctacaacagtccagactcatctttgcccaatctctcctctgacaatgaaagcctaaggaccaaaaaaaa

SEQ ID NO: 9776 - DNA, 778 bp, Homo sapiens
aaaagtttcagttctggggatgattttgttcctattcttgataccaagcgataaaatcaggctgctaagagaaaatgaaaaggaaatagccagctagtgtcattgaatcatatcccgaggcagtgagtttcttccagcacattttggcctcagtcctgaggctggaccttaactagtgaactgcaaactcactcaattatgcagtctgcttggtgcgatggaagtgaaaatgtcctagagagttgggtgctagtatgcattttgatagtctcctagcctgtgacccaggacagattccttgcatgcataggagtttgtcaccatgcaaaatctggctgttgttcttctgagaacatgggggagctggactgtcaacaatgagccatatcaggctgaaactgggaaactgttctgctccttcagagtcaagacaagccagaatgagtgtcaaatttccttcctctgtgcttcctcagatgtggtcagattcatagccttcagtctattctaattggtagctagcctggtgtggacttttgaccacccaccaatcaaccaactcccaccctcaccatttactgcacgagtaaagccacgcttcctaggaactaccattggtagagatgttactgagtcataggccctgagataggaatgatctataaaggccatccacgccagttcttgaacccttctacaacagtccagactcatctttgcccaatctctcctctgacaatgaaagcctaaggaccaaaaaaaaaaaaaaaaaaaaaaa

SEQ ID NO: 9777 - DNA, 101 bp, Homo sapiens
tttcttttttttttttgagatggaatctcactctgtcgcccaggctggagtgcagtggtgccatctcagctcactgcaacctccacctcctgggttcaagc

SEQ ID NO: 9778 - DNA, 1174 bp, Homo sapiens
cagaggctgattctctgtaatcctaccctccccttctccccatcagggcccttcttagcactctgggtggttgctccaaccatgcacctggaagcttgggcttgggttacaatgctctgtttatgtgtttgtctcccctgattgcctgccagtgattcttccttctcatatctcagcacttaacatagttcttgatatatattaggtgataaaaattgtctcttcttttagcactggagccatgagatacccctgagaagtggtgagcttgtggcgtgaagagctgggtgacctcctcttccttttggtggcctgagccagagatgtcacttcctcacctgctcttttctgctttcatgtctcaagctgcctgggggcttctttttttaggtctcttacactcgactaatctgcgaatgggccaagaacccacaatggggaaaggacagactcttcaatacgcaggttgggaaaacaaaatattcacctgcagaagaattaaattggagccttgtctcacatcttatataaaaatcaactgaaaatggattaaggactttaacataagatgtgaaactagaagaaaacataggggaaaagcttcttgacattggtctgggcaatgattttttttttttttaatatatgatcccaaagctcaagaaaaaaaaataggtgaatggggccaggcacggtggctcatgcctgtaatcccagcactttgggagaccaaggcgggcagatcacttgaggtcaggagttcaagaccagcctggccaacatggtgaaacctcgtctctactaaaaatacaaaaactagccaggcatggtggtgggcacctgcaatcccagctccttgggagcctgaggcagaagaatcacttgaacctgggaggcagaggtggcagtgagccaagatcgtaccactgcactcctgcctgggcaacagagtgagacttcgtctcaaataaataaataaataaataaataaaacaaaaatacaaaaattagccaggcatggtagtgcatgactgtaatcccagctattcggtaggctgaggtgggaggatcaactgagcccaggaggcagaggttgcagtgagccaagatcaagctattgtattccagcctgggtgacagagtgagacactgtctcaaaaacaaaacaaaaaac

SEQ ID NO: 9779 - DNA, 142 bp, Homo sapiens
agttcaggagttcgagaccaggctggccaacatgatgaaaccccatctctactaaaaatacaaaaagtagccgggtgtggtggcaggcacctgtaatcccagctactcaggaagctgaggcaggagaatcacttgaacccgg

SEQ ID NO: 9780 - DNA, 8876 bp, Homo sapiens
gcgatgggcggggcaggcgcgcggggattggcgggatgcggcgcgccgcgcggtgagtggggtccagggaaacggggtcagctgggggtggcagttccaggccgcgaggccgggctcctgggtcggtgggctggtgtcttggcggacgtcccgcagctgccgcgtggatccgagccggggcacccgccgtgactgggacagcccccagggcgctctcggccccatcccgagtagcgcggcctggctgctgccgccatcaagcacgttcgagccaaaagctcctaacgagtcactcgttagacacgtgtgcggagcctgtgtcccaggccagtgctgtcccgtggagatagattgcaagccgctagggaattttttaactttctagtaggtgtacgaaaaaagtaaaacgaaacaaatcaattggagtaaatccataaatatattcaaactattatttcaattgtatgtgaaaaaattattgggatattctttgtactattcttagaaatccattgtgtgtccaacccaaacatcacagttggactcaccacatctcctgtacttcgtagccctaggtggctagtggcataagacacaaaaatctcagctctcctggagcttatggtctagttggagcaggcagacaatacatttaaaatatacagtttgttagaaggtaaatgttgtaaacaacaataacagttgaagtactggggagagttgcagttgtaaatcagatgggcagggcacaaggtaacatttgagtaaagatgtaagaacttgaaggagatgggcaagtgagctctataagtatacgggagaggggcaagcaagagttcagaggccccttgctgtggggagggatccaaggtggaggagtgggaaccaggaggggagaggaccagtggagcagatctcataggcagttgtaaggacttggggccttattcaatgaaatgaggacactttggagagttttgaacagagcagtgactgatttatgttttggttttggtttagttctattattatttaataataggcttattatttcacagaagttttatttaataaggcagacctcttgtctggaaatgagacaggtgccggagagctggatggaggcagatcgggaattccatttggggcaaactgaacttgattgagaccctggtagttgtccagatggaacaggacacctgagtctagggttcgggaagaactccagatgggacaaacactcctagctttccttttctctttttggatgaccgctacagggtgagacatcggtatccaggcacgataaatttccaagtggacacaatgtctggtgtcaactacagctgttctccttcttttcccagtatcctttgggtgcagtgagacaccaggagagctgctgctttgggggatggacaggggcagcaggaatgcctttgtgttttcgcagtgaacctccttggcctgggcgaagctgtgtggaccaagcaagtcaggagtgtggccatgttttctgagcaggctgcccagagggcccacactctactgtccccaccatcagccaacaatgccacctttgcccgggtgccagtggcaacctacaccaactcctcacaacccttccggctaggagagcgcagctttagccggcagtatgcccacatttatgccacccgcctcatccaaatgagacccttcctggagaaccgggcccagcagcactggggtaagtgagagtttgggaaggtgcttcccccacagcatccctgaacttagaagtgttctgcaagagaatgggaacagtttatctaattgatcccacttcctgttaccttgggaaaattaacctctttttccctcagtttcttcttaagatagtaacaaggattaaattaagtaatttgtgggtttggagttagttttagttcagaggctggttggagatgaggacttagttctggcggtgatggcgattacttcactggcagaggaaaatggttttcctatcttcagtgcagattattcaggtatttgcctgtgctgtagccagagagcccctcagtgtggcaagcctggcgccaggcaccaggagccaagactggtgaggatgcactctctggtctcgaggggaccccctctgttcactcatgtctgtttgcctctcctcctggcccccatatttgctggccatgaattttcctgtcccttgggccctctgtctttcctaataaagtggcctgcccaacacaacccttgttctttgcccccatttcttccctggtgatctctcctgcagttggattactcttggtggtgaagcagggacccccatctccccctttgagtttatttgagttttaggtgctgctgcattcccccattcctaccacttacataagagtggctttccaggtaattttcaaatccatctcctattatatttttaaactgaggatttagtaggtgagaccaggtcttactcatttttactgtccttggcaccaggcaaaatggatctcagccctagttgcacattggaatcccctggggagctttgagaagcccatctcatcccatgccaagccaagatcaattctcgttataggcaggcaggagaaccctgggcctagaaatctagctagaacctcaaattcattagggatatgtattagtccattttcacattgctataaaaaactacctgagatagggtaatttataaagaaaagaggtttaattgactcacagttcctcatggctggggaggcctcaggaaacttaacaatcatggcagaaggtgaagggaaagcaaggctcttttacatgatagcaggagagagagagcaaggggaactgccaaccatttttaaaccatcagatcgcatgatggcttgatctcactcaccatcacaagaacagcatgggggaaatccacccccacaatccagtcacctcccaccaggtccctccgtcaacaccgtgtggattataattccagatgagatgtgggtggggacacagagccaaatcatatcaggatgttttctgttttgtttacctgagacaaagtgctgttcacctctcctctcccacataatcaggggctccctcctgcggctccggtagcttttcctcactttcctttcagccctcgggacaccttccttggctcctttcagagctcagttactacttgggcccaatgtcaatgccaccttctagattctttccggcagcacctcctctggtcgcacatttctcttccagttattggagctgtcaaaaaagctccccagtgatggacgatagcgatttcactgtgctcacagactggtcaggaaaccaaacagctgccacagtgaatgtgttgatagcagcggggcagcagtagcactcgctcacaggcctggtggttggtgctggcccccaccctgaatacctacatgtggcttctccatgtggcctgtgcatcctcactgaagctcagcctgtctctccaaattggtctttccactcacctgttccccaaacctgcccagaccttcctgctgtaggcttttcccttcacttggcacactctttcccttgtcttcccatggccccatctaagccccactgtcagctgaagtgttatattctttgaggggccacctgaagccaccttgcaatgagggcctccgttttctacctcagctcaccatttgttcacagcacttgtcactgtggcgagttacttgtctatggcctgttgtcgttctcctgcctagacccagtgggctgagtgggggcaagtgttggcttttatgtccagttttgatcttggtgccagcacattgcctgggtggaagcatgtcctactatcggttacagggatgtcattctgcccagtgctcaggggcatacacttggatcccagttgtgtgcccttggacacattgcttaacctctctgtgcatcagttgggtgataatatctactcctggcacattttcagcgttggctgagttacatgtacagtgcttaggccacctgggggagagtaagagtgggatacgtgaggatgtggagtctgttgcatttctgtctgctgctggcatccttcttgtcttgttttgagttgctcgcctctgtctgctccctagggcgtagatttgaggaatattcctggttcttcccaggcagcaggggctcaggctgtgctggagtcagctaggctaaggggctggtctggcatccgcgttgtcctgtcacctccttggtgttttctccaggcctggatctgtgctgtgtgggcacctgtattcctccctcctgccctcactgattctccatacctttcttctcgagagtgccaagcccctcccatgtgttcttgttcatacctaggatcccgggaaggggctggggaagacggtgcccaggtgccctgggtaaacaaagccacctgactccacgggaatggaatgggtggaggggatctgaggtctgcattttgagtatctctggtctcagaggatgaagcatttggtgggggttgggggtggggggtagggtggaagaatctaaagtcttaaaagaaaatggcagttatttgtgggacagggctgtgttgagacttggcatgcttctttttaagagtcagtgttgtaatttaggtataagtgaagcagtactttgtattagtttcctgtaggcgctgtaacaaagcaccacaaactggttgacttaaaacaacagacatggccgggcacggtggctcacgactgtaatcccagcactttgggaggccgaggcgggcagatcacaaggtcaagagattgagaccatcctggctaacacggtgaaaccctgtctctactaaaaatacaaaaaaaaaaaaattagctgggcgtggtggcacacgcctgtagtcccagctactcgggaggctgaggcaggagaatggcgtgaacccgggaggcggagcttgcagtgagctgagatcgcgccactgcactccagcctggatgacagcgagactccgcctcaaaacaaaaacaaaaacagaaacaacaataacagaaaaacacagacatttactctctggcagttctggaggccagaagttgaaatccagatgtcagcaggattggctccttctgaaggcccgaggggagggtccttcctggcctcctccctggtgttcctgggcttgtggccgcatcactccgctctgcccgtcttcacactccctcttgtctgtgtgtctgtctctctgttctcatgaggacacttggcatccagggcccaaccacacccagagtccctggtctcctgtggctgactcactttttactgtcaccgtgaagtccagggggtccttgtacttgatgttctctcctggcaaggccagggccctgtgattggcctctcatggagtgctgggcagggcctccatggcctctgtcgggcgggggggctacttcatctctgagtctgtacccctcgtgtcccaggcagtggagtgggagtgaagaagctgtgtgaactgcagcctgaggagaagtgctgtgtggtgggcactctgttcaaggccatgccgctgcagccctccatcctgcgggaggtcagcgaggaggtgaggcagggtgctacacagtggggccgccaggcagacctggcctcccactagaacacctccctggaggtggggttgtggggaagcaggttcagagacaatggactccagaggggtgggggctgcggtgccagctcactaacaccagagctttggtgggctctggccccaagattatacctcctgtctctgcattccagcacaacctgctcccccagcctcctcggagtaaatacatacacccagatgacgagctggtcttggaagatgaactgcagcgtatcaaactaaaaggcaccattgacgtgtcaaagctggttacgggtagggagcccaatgagaggatgtgggtgatgcaggtgaagagcccagcggtggtgtgttagggatggtgtgagtggggagcctggggggagtgggggggtgtggcctgggcacacgtgtgttcttgaggaggtaggtgaggctccaggcggtcggaggccatcagattgggtgagacctggctgggagatgggtctccccacctccatccaagggcagtgactccaggaagcaggcatgcatcctggagtcctaggtgagaattcaccaatgtggttgtggagaactggcttgttttgcccgttggggtgactggaaggagtggtagcacctggggctccctgctcaggcctgatgccactgctccccagggactgtcctggctgtgtttggctccgtgagagacgacgggaagtttctggtggaggactattgctttgctgaccttgctccccagaagcccgcacccccacttgacacagataggtgagcagcagttctcgggagctggaaccagctcatggtcagtggaatctttgagttgcacctaggaggggctgcctcccttctcggcaccctggaggaccccaccttctcccgcaggtttgtgctactggtgtccggcctgggcctgggtggcggtggaggcgagagcctgctgggcacccagctgctggtggatgtggtgacggggcagcttggggacgaaggggagcagtgcagcgccgcccacgtctcccgggttatcctcgctggcaacctcctcagccacagcacccagagcagggattctatcaataaggtatggagcccacctggctgcattcagccccagcccaggagcctgcaagcctgtaagaccctccttccccagggcgagtagggtaccctgtgaggtctcgcaggtcggtgggaagcgccctgcagtgactctggggcctcctgcaatggggctcctcatgcccaggccctcgctgaggatggtgggaggcttgaagggagtgagggtctatgggacaacaactgcatcttccagctggtggggctctactctcctctgagcctgggactcgcctgggcctgatggccttctgggcttctattccaggccaaatacctcaccaagaaaacccaggcagccagcgtggaggctgttaagatgctggatgagatcctcctgcagctgagcgtgagcgagctgggggctggaggggtgatggggattgcagtcttcaaagctgccactgggcaacagaaggcaggcaggagggcagggggagtggccggagttggtgtagggggctccttcggggccctgtgagctctccctgccctgtgccttccaggcctcagtgcccgtggacgtgatgccaggcgagtttgatcccaccaattacacgctcccccagcagcccctccacccctgcatgttcccgctggccactgcctactccacgctccagctggtcaccaacccctaccaggccaccattgatggagtcaggtagctggcacagccacacttcagtctgacccagccttttgcctcaggaggcacaaagaagggaggggagggagggcccaggaaggtggcagggctgcagaggcccacctagcatctgttccttctctctggggcatccccacaagagcgccagatgagctctgggctgaccactatgggtggcacccaaagccaagagtcagctgagctttgccttgcagatttttggggacatcaggacagaacgtgagtgacattttccgatacagcagcatggaggatcacttggagatcctggagtggaccctgcgggtccgtcacatcagccccacagcccctgacactctaggtaacaggctcagccatacagggtgggagcagagggccaggaggcctggcaggaccctgaagtgcacagggtccccctgtgggtttgcacttgccagcattgctgagaactgtctgaggagaagttcagaggcttggcacctgctctggaagctactctggaatcttaattctaaggccaatggctgcccaccccaacgggcagcaacagcagggccaaggtcttgtgacaatgtctggaggtgcccctattgtcacactgggggtctcctactggcctgcaatgggaggaggggctgcagccccacatcctgtgcagagtgctagtgctgaggcggaaccctcctcagagctgccccttctcctccaggttgttaccccttctacaaaactgacccgttcatcttcccagagtgcccgcatgtctacttttgtggcaacacccccagctttggctccaaaatcatccgaggtaatttttgtcttctgggggcccaggctgatttgctgatttgctctcacctggggacaaggttcacagagaagaaaacctgcattgtggagtccccctggcccttgtgggatggacagctgaggtcttctgcacagctgccatttcactgtgggagccaagctgcctcgccagctgggcagggactggaacggctcccagcctgtgtgcctctcaaggctaatctctggtctcctattgtcactgccccactgtgtgccaatggggactcctgtttatttctggcagcttctctttgaggcaggacttacttggaacctacagtgggtcctatgtgacttctttgcaggtcctgaggaccagacagtgctgttggtgactgtccctgacttcagtgccacgcagaccgcctgccttgtgaacctgcgcagcctggcctgccagcccatcagcttctcgggcttcggggcagaggacgatgacctgggaggcctggggctgggcccctgactcaaaaaagtggttttgaccagagaggcccagatggaggctgttcattccctgcagtgtcggcattgtaaataaagcctgagcacttgctgatgcga

SEQ ID NO: 9781 - DNA, 10211 bp, Homo sapiens
cagtccgtgccatgagcttgttttattggagtgaccttggctccctccctctgcccctactccaacactgcagcaaccccatctcttacgagactggcaggtggagcaggagcctctacacagcctctggctcttaggtcccagtcatgtttgcaccccctcaaaggggcaggaccagcccttcctttcagtgtccataccaggggccttccatgtgctgatgggtgatgtgactgtggtcagcaggcttgggaagtgctgctgctgtagcttgagttgggctggggtcttggtaggacgctgatctcagaagtccccaaagttcactgtgtaggtctctactgttgtgaaggggaatgcctggccagtggctatctcctcctctttctcctcctcctcctcttcctcaaactcgggttccagctgggtctcaaactcaggctccaactgggtctcaaactcgggctccaccttggtcccaaactcgggctccacctcggtcccaaactctgtcaccacctctgtgtaggtctcagtctccgactcctcccagccagcggtggttggcggtatgaggccccagggctctatggtagtgctcagggtggtggcaggggcagggggcagcgtgggaggcacagtgtgggggcctagggtggtggtggcgttgaggcgccgcagccgcatctgtgcccgaagccgcaggcggtgttgtaggcgtcgctgctgcaggcgtcgctgttggggggtcatagggcgcgatgggtctatgtgtgggataggccggttcccgttcatggccatgatctcccggatgcgcttccagttggagcgagccaggatgaagttgcactgagtggccccgatgtcatagtcaacattgcaggtcttggcgctcggggtgtagccctccgcgtgggctgtcacgcggtactcacccgggttcaagattcgccagtaatcaccaccactggctgcggagggagaacgatccggctgccccagagcgcccctcccaggcccccaccctcccactcagtcctgcccccagccccgccctccccctctgagttcccgcccccagcaccgccctccctctctgaatttcgcccccaggctccccagactctacctgctcgctgagttcctcaagcccccaccctctctggcgggtcctccctcagaaagatggggtaaaggtgtgcacactaggtacctgtcttcacgccgtgattaatgccactcacagagatggtggcgttggcaatggggatgccttgctcgtccgtcaccacccccttaatgccgcggtgcacctagggaagcaggtgagggctgctggtcctcaggaaggtccaatgtggtccgctgctccctcccgcccatccaggagcctgtgcagcctcctctccccaggcattgccctagccaccccacctgctccatgaaggtgagcagcgcctccttgttgttctcccactcgcggggcagctcactctcatgagggaacttgtcacagcccaggtagaaggagagctccaggcagttggtatgcaggtaactgaagtcattgatagctggccggggacagatacagacccaaagtcagcccctctccggaccaggccccgcccacagcccctcccaggctgactcactcccggtccgggggttccacttggccccgttgacgatgcccatgccgccggtgtagtcctgggcttggcagcctccgcggtagggctcggtcaaggtgaggtgtgcggaggcgaaggagatggcaagccaccggaagatggcgtggtctggagtctcctgggcctcggagacctcgtcctcatcctccccccgggctgctgccatggctgcggccagcagctgctcctgggtaggcgtgcgggccatatcgtaggggtaggatactagccgctcgccgccgttcagatttgctcccagcacgaaggggttcttctccatccaggcaatgatggcccggacctccgtggatacctggagtggccagcacgtgtgaggccagggctgcagctccggccactatccccaacctagcccgatcaccctccatgaagcttcacaccagtactcgcacgatcccctgtcccccaacccccagagcctcagcgtctggagttcaggcaccgtcagccccacccccaagcccagaacaccaggaccccagggtccagctgctccctcctgccctttcagccaggctgtagcctcaccgtggcatctggcgaaaggtagcgttcagggatgggcaagttattgttggggacccggtaggggacccatttcctctcctcagctccccagagcacagagttgagatccgggaaatcttcaaagatgtcaaagccctcctcagtccacagtcccagcgcccagttcccaaactctgagccctgtggggagccagcagggtaggcatcggctacccacacccccacaacccccagctgcctggaccctggccagcctcacccttcaacccaccatctgcgctgccacctcgtagccatcagggttcagtgagggcaccaggtggatgcgtgtgtcctgcaccaggctgcgcacacgtgggttcccatcgcggtactctcggcacaggtactgcatgagcagcagcaacagctctcggcccagcacctcgttgccatggatcccagcagtgtagcggaactcgggctcccctgcaagggcgggagcctcagtgagcactcagtctcccgaggcccagggcagctgaggaaggacccagacccacctcatacccgagggtctgggggacagctggggctcctagggccctgtaagacaagccagaatccccagagaggctccggaacaggcgggaggcagtgagctctgcacatcagcagcagaggccagctgctggcccccacagaccctcacccagttcatgctccccagggttgtctgagatctccatggcatagatcttgaggcctcgtgagctcttgcccaggctgtaagtgcgggtgatggtggggcactcctcgttcaccaccttcatgagctggggcagagggggaggacgtggaatcaatcatgcaatccgtcccccgctgaccatgccccttccacttccagggcctgctctatggcgagggacgggcatgaccccttcacgcagcccccaggtactggcctccttcctaaggtgagggacagccagcatccctggaaccagtagggactgggcccagtgacagaagcaccaggcacacactcccgtcagccacagacaggtcccacccccagccccaggatatatgctcccaacctggcgcatgtccttgtagctgtggtgccggaaatccaggtcatcggtggccaccacctcattctgtgcgtagtagctgtagacagctgcaagggaggcggggttgtctttagctgggtgccggctggcccaccctagcaccccacctccactcagagcccctgccagccctccacactcacgggccacagagcaccccagcacctccaggcgcatgcacaggctgccattccaggtgagtgggtagatgcggatgaaacgagccaccaccggctctgggagctcactcagcacgggtgtgtccttgtccacgttcccatgaaaggtctggggagaggcaggcctcagagcagtactgccagcccctctgagagcccacccctcgcccagacaatgggagcagagccaagagcctgggcatggtgcccaccatttcctcatagccgttggtgtacatcacccatgtctggctgtcattgctgaagcccacgaagaaggtggtcacaaaatcgtcactgtggagtggacagtggtcagagcaagggtcttccccctcccaggccctcaggtggcctgagcctccctcttccgagccccaagaatttaagagctagcagggtggtgctgcacggcccaggtgttgagcctgggtcctatgcccgtcacatagccatgggcaggtgatctgtccctaaactcatgtgctatcaggacacaggggctgactgaccaggctgaggagtggggatgggcagggtgagtccctcactgatctttttggccttctttggctgggccaaagaagggcccactggaatctccttaatgggacacagagccatgcctatgtagccactcccctctgccaactatccatgagcctggccacgcactggatgctggagtctctgccctgggtgatgacgcctgtgaaccgggtagtcctcctggtgtccacctctatccactgggtcctggcatcgtcctcggcacaccacgcaccatcatagtagtcgtcctcagtggcaccggtctgtccagggggcaggggaggctgagcatgggcggaggagtcccttatcccagttgggagatgggcccatcccaatgcccacctgcatgttgagccggccgcgctgtgcccccaggccgtggcgcagcatggaggaggctcggatctggttgtcctcaatacggtgtgactccatcccaatggggggacactctgaggacgcgtaccccagaatggtggctcactagctccatccttccctccaccaaacccagaaccaaggagcccagagcccactcccggcacatcgggggcacagtcagagggcagctctggtcagctggtggctccctggtgccctgcaccagcccacctggaatcgactcaaagccaggccaggagctgtttccaatcccagcctgtgcttcccctccctgggcctcagctgccccatctggagaacgggctgaccatgcccagctctcaggggacacacgtgaaatcacaggtagagctcccccagggcgcagccacagatgtcatccagatggggaccgtctgcacaatggccctgcagggatacctgtgaaggtacctgaggtcctcactccccaccaaggccccaggtcctccccctaccacgcccagccactaggggccctggggagctgccaccctcctgaagcaggccagcctggggtccagggctggggcagccaagcgaggctatcctgggctcccggggcccctcccttctgggtcccaagaatctgagtaggaaagggttccggggacctgggtcctgtttgtgacattgggccagtcacttgtcccagcacccccatcctgtggcccccaccctcacccccttgtgccccccacttactgactttctccgtaggcgtccactcctcctccaactcctcgccctttcggggctctagggacaatgaagggaggacatggcaccaagggcccgggaggcaatcaggagtccagatgctgccccacagggacccaggccccaagccccagccacacacctttgtggtccttgcccttctccactgcccacttgtcggtctcctccttggggctgctgtcctcctttttgggtttctctggaaggtgcaaggtaggaggggccagtcagcctggctctgggctttgaggaccatgtggggtggatcaggcaggccccaggtggccttcagggcaggcctggtgtgggaagtccttggtcccactcactcagctcctccttctcttcgtctgtctggcgctcagcatcgggcttctggggcggaggaggcccaaagtaatagtccactatggggagggagagccagctgaggctgccctgaccctgctgcggggcctcagctcctgggtccacaggagctcagcaggacaggaccgcgccagaggggaggaggacgggagatgggggacagctgagttgggagagggtcttgcaggagtcaggagcagcccgagctcaggggcagctgagcaagaccctgctgaagtcaccagcccggccttccaggagcatctggcctggggaaaggactcgaggcccagggcatgggaaaggcctggagggacaactggcacctgtgcctggggttgcgggctggggggtgagatggggagacattggaggcactgatggggacctgggggcagggaaatggcgatgcacgggctgccacccaggaggaaagggaacctgagggctccagggacgcaggggcatgagcaacagggaggcaaaagccctcgggctccctgaagagagtggggcagtggccacgagccagcgggaagccagttagagcacaggactgggagggctggaacccacatgggtgacagggcagagtgtgtgcctagggacacccctgtgggggtcacagccaagcaggaaccagggaagcggccaaggaaagaccagcctgagggcagaggagacagggcagtggctggggtgggcacgcagggacagcagggacagcgaggtaaccacgggcacaggtggggttgcaaggtgggtgagttgccccagctggctcctgaccacaccccagccccgacccccacctgcctatgtccctcagactctggggtgctgggtactcactgtcatcgtagttggggatcacgtaaccatcaccatagtcagggggcagcgggggcagcagaggcttcacaggaggctctggggaggcggggaggttaggagggggccagagcgccgtggccatggcacctcctctcctgccccccatcctaccaatcctctcctccggggctggggccggggccttctcctcagggggctctggccagacccgctcgggcctcctccttctgcttgggggtggcctgggttgcttctggcgccgaatgtactcaactgagggggaggctggctcagagtggggcccaaggctgggatgggcccattggcacatcccccaggccaggggtccgacccaggtggggctggcaggaccctactcacagtcctcatagtcctccctctcgatctggtcattgtagtccagtgtgggttgctcggtctcctcctccggctctgaggggaaagcgctggtagctgcctgacaaccccacccaggcctactctggggaagccctcagtccaaccagccagggcagctggccccaaggccaggcggatgacggccactcaccaggctggtgctcccgtgcctccacatgggtctcctctcctggattctgccagttatttgagaggggcgcccctgcaacacaggagttccagaagcaggtgggcgggaggcctgctctgaccaccttgggagcctcaggccaccagccacccatagagcccacacagagcctgtggacaccctcctgaggccgagctcactccaaggaggcctgagctcctctggccttcagcatcctgctggcatctcatggggccagagagctgggcccaccttctggggaacctactgtgctgctggaggccctaccacaaagctgtccccagcgggagaaggcaggagggaactccatgggctcagagcccagggacatctgggcaggggcctgagggacagaggtcccacccaaaaggctgccaagccctctccctacccaaaagaggctacagcactgagggagcccaccaatcaaattgtgaaatttatagcaaaagtgaggttcccatccagtggggagctgaaggtctataggaagcagggccccagaaacctgcctcccactccctgcctccacccgagcaggcagtcagagccccatcaccccagaggagcccggcacaaacctccctcctggggtagctcctcggggccagggctggggggtgggggcagtggccactccagggtttctgagggagccagaatggggggcctcttccctgacgggggcttcttggtggccttgggtggcttctctttgggcttcttggtggccttgggtggcttctccttgggcttcttggtggccttaggtggcttctccttgggcttcttggtggccttgggtggcttctccttccccttcttgggcggcctgggggacccctccaaggactccttgggcaccttggggcctttgtctttcttgcctttcttccctttgtctttggtcttttccggaggcactgtccaagatgcagactcgtgtcaaatgaacagagccagctctgtgcccccatgaggcccctctctagatgcccagaacctgggcacagggactcttgtcagttcccagtgcggatcagcaaactgagaggttaagtcatttgcccaagtggcaaactgggatccggacccagattttctgtctgcaagtctggggctgtgaccaccaatctcaacctctctaaagactgagcgtagggttcccagttcccagggggaggccctcatccccccacctgccaaaacctcaataggggttccttactatccactcctccactattctgttctgggcacagaaggggcagagaggtgactgagccatccaggcctggaggagcatctggtcatccctgccaactgccatacaaaggaagggacatgggcccaagaccttcccctggtctcctacggggcaagaaaagcttcaaagaaaagggacacttggttgagtattgaagcccaaagaagaggaagtggtctcctttcgagaagtaaggggtttggaattgattggaaggatagggagtcctggggggttcagggatcacacagaggacagaaaagacaggtagggagcttgtggctgcacactcatttcagagtctgggagagggagcagggactggttgtgaggattccccatgggaatcctcccaggaccctaagcaggagctgcaagtgctgttgagaacctgatgagaggtggggagcatgagggaagtttggcagaaacacaggaaagctaccaaatgcagacagccaggggacgcagggctgctagagcggtgccccagagccaggagagcaagcctggaaggagagccagaggcaggaggggcacaggcagcccagggtgtgggaagcagccaggaaagatctagagctggggtggcaggggaggggctgctgacatcaggaatgttggatggtgccttggaatctcctgggagacagggatcacaagaccctctgccaccttccagagggccacgatgaaaacagctaagatttactgacaactgattatgcaagaggccgtgggttaaatgcttcagtgatgcatcacctcatctaatttcctgtactaatgtaggaccacccattgctcaccaccacctgaagccctgtgctcaccaccacctgaaactctctcacctacgtgagacctcctggagtaggagggcaaaggcaggagggagggacgacgtgaagctgtgccaccaacagggagagtggtcccattagtatggcagggggtgacacagcacagtcccctgtggctcaagcctagtacctgtcgcgtactggaggaatggggataagcgacccgtacaaccacagcaccaaccctagagccaccggcccccaaaagcggccctgccgcccgggtgctggatgtgcctccacgccagcgctgacctcggcctagcacagggtccctccaggcatctgggctcgcgtgcgcattagtaagccagccattcctcccctagcagactggggagtggccagaccctaccgaatccccctgttcccacctgagatgccagccccccacacccccgccctgccctgggctcttaccttctgcggccgtccctggccgcttccctggcttgccccccgcctgggcttttcggacccgcggggtgggctcgggaggcggcggggcctccacgtcgtcctcccggggctcaggttctagctctgacaggaagccctcgaggaactcctcgatctcgtcgtcggtcagcaccgtctgcgggcgccctccagggcacagggccagcaacgccaggaggcagctgagcaggggcgccccgcgcacggccgccatggccgcggcacgcgcggggggctccggggagggcgcggggggtcaggggctctgggtctctgggaaagggcggagaggggatcgagacgggtgagggaatccaggaaggggcgggagagaggatggggtgagcgagggaatccgggaaagggagggagagtggattagggtgggcgaggggacccgggaaggggtgctggggggctccgaagccagaggggctcaggggtggtcggggcgctccgaggtctggcggctaataggcgctccggccccgcgtggcgcactcccgcgcggatagccgtctcc

SEQ ID NO: 9782 - DNA, 1314 bp, Homo sapiens
caaccattagacattgaagtgatgaatcgttatccgtgctgcacttagaccgaggctatccagtagcttatttatggtggcagtgtatctcaccaaaacactatgctttccagcttccctttcagcgacccatgttctttcattgcttctggtcagtgaaatctaagcaagtattttttgggtgagtcttccaggaaagtgtttagggggtgtggttaatttttgttctgccaggaaaatgagtgggatagctggaatcatgatagtcatggcatctctgttaatgtttttggtgcctttgaacagaataggaagaatcccccatctttgcagatgagttagaaaatttcctcctctgggtagaaggaatccctcagaatacacagcccccactcacttcttggtcaggtgtcttcacagtaaataaactacacaactgtatggggtggcctggacagccatattggactatgaagcaggaaaggaagccatgctctaaagatagcaaacccaaggagaaaagcagcctggtccttgctgaccatggatgtgccatatcagccctgcattgactacttccagacttcctttatgtgagagaaaaataacatttattttgttactgttatttctgatttattttactagcagctaattgcttgtaaagttaagactacatgatatgatttgagaattgctatcattaattaattaagcaattgttccttgtgaattctgtatcagaaattctatgatgtactagagataaagacagaatttgcaatctaggatgtgaaagacagatgtgtacacatacaggtaattatagcataatgtcatatgcttgttcagtttgcatgctggatagagacatctaggcaaaaggttagtggggactgtgctttgatagactgcatgcacccagagggaaacatatcctaattcatctccacaaacggggtacctctttttaaaaatgcttcaaccaataataatgctttattatcatttagttcagtgattaccaaacttattttagcagccattagccttctttgaaagaataataatacagaaacacaacttattagttcagatgttttggagagatctaactcagattagatctaaaagagaatttgctggttaatttaaccacacttactgtaagagagttgggcacagcctgttaagggagtacatagcagggtttttagaaaaagcttcacagaggaagtgatgcttgaggtgaatcttgaaggatgattttaagaaaaggacaaaatgggaaacagcatactatgctgaggaaag

SEQ ID NO: 9783 - DNA, 1316 bp, Homo sapiens
caaccattagacattgaagtgatgaatcgttatccgtgctgcacttagaccgaggctatccagtagcttatttatggtggcagtgtatctcaccaaaacactatgctttccagcttccctttcagcgacccatgttctttcattgcttctggtcagtgaaatctaagcaagtattttttgggtgagtcttccaggaaagtgtttaggggtgtggttaatttttgttctgccaggaaaatgagtgggatagctggaatcatgatagtcatggcatctctgttaatgtttttggtgcctttgaacagaataggaagaatcccccatctttgcagatgagttagaaaatttcctcctctgggtagaaggaatccctcagaatacacagcccccactcacttcttggtcaggtgtcttcacagtaaataaactacacaactgtatggggtggcctggacagccatattggactatgaagcaggaaaggaagccatgctctaaagatagcaaacccaaggagaaaagcagcctggtccttgctgaccatggatgtgccatatcagccctgcattgactacttccagacttcctttatgtgagagaaaaataacatttattttgttactgttatttctgatttattttactagcagctaattgcttgtaaagttaagactacatgatatgatttgagaattgctatcattaattaattaagcaattgttccttgtgaattctgtatcagaaattctatgatgtactagagataaagacagaatttgcaatctaggatgtgaaagacagatgtgtacacatacaggtaattatagcataatgtcatatgcttgttcagtttgcatgctggatagagacatctaggcaaaaggttagtggggactgtgctttgatagactgcatgcacccagagggaaacatatcctaattcatctccacaaacggggtacctctttttaaaaatgcttcaaccaataataatgctttattatcatttagttcagtgattaccaaacttattttagcagccattagccttctttgaaagaataataatacagaaacacaacttattagttcagatgtttttttgagagatctaactcagattagatctaaaagagaatttgctaggttaatttaaccacacttactgtaagagagttgggcacagcctgttaagggagtacatagcagggtttttagaaaaagcttcacagaggaagtgatgcttgaggtgaatcttgaaggatgattttaagaaaaggacaaaatgggaaacagcatactatgctgaggaaag

SEQ ID NO: 9784 - DNA, 1503 bp, Homo sapiens
ctccacttgaatttgcttagggacctcttcctccatttgactaaactcccagtgccgtgcaatggggtcacttcttgtctttccacggtcatcctatgcactccttcacctcatcggagtctgattccttatctcatgctcagccttgtggcgggcacgtgacaagcatcacctcctgaatttctcatggcaccggcgcaaggtacaggctcttgacaaccctgtgttatgtgtcaggaaactgaaattgaaatgaattatccatggctaaatgcattatccatggctaccagcagggaaatggaaaatatttgaaccccagaactgttgatcgagaattctttcaagttttatatttggcctcttctccttaatttagatattcagtcctatttccctgatgcctacaatgtgccaaagtcgcttatacttctttgcctttcgagttgctgttttcttgtctcaaaacatcctactcttgagttctttgtgcggttaatattttgtcatcctttagttctcagctgaagtgtcatattctcaggtaggaattttctacccacttttccataagcagaatatccttagtttctgtctgctttcacagagtgcttactgcctatttttaaatttactacactctataattatgttactgatctggttactgtcacctgatataattatttaatgtgcctggcttagtgtatgtagttgtgcagtaaatattcattgaatgaataaacgttaaaggttatgaaactgtgacgtaaaaatcttatgaataaaaaatggaagatgggaaaagtcagaaacagcttcattacatgtgtaaaacacaaaccaattatgtccaaagaaaagcaaatattatttccacagaattaataatttaatattatgtgaagtcggggtcattgaatacttgtaaattggcaattgattctcgatatattcctttaaagttataatcttcttgaagtttaagggaagaaaggtgctatgagagggcacaatggatgttgaataataaatttttaaaaacactttattcttagaagtttcactttggtttatcttccttagttaaatttcctttgtagcaaatgtgtgtacccttgatcacactgaagaaaatttggatgttgacagcacatggaagcattgttttcagatatcttcaacttagcaacttttggatgtcaggctccaaaaacatcacaggagggaaaataccctgactttattgtttgatgaaaatttgtggattgtgcaattattttgggtttgtatgatttgcttttatttactttatatattacatacagtataaaatgtacactttatctactttttataagtcacaattttatgggttttgctttacttatagcgttttcctcaagcaattcttcagatactgagcatcagaaaccaagtatttggaaactgagaaatgtgagctgaacagctgagtgaatcagacagggccctaatgaaaac

SEQ ID NO: 9785 - DNA, 659 bp, Homo sapiens
acaaaatgattatgcctttatgtgttgtgtgtatcgtactaaacccagtgctgtgcatagaggaaattttacagtctatagtgttacataagtactggggccttgcataaagtagatatctggtaattatttgttgactactccatgtctagtcaaatggcactttaattttatgttttggaacagttcagtattaaggattagtaataggaaaaagacttaacattttaattctgtgaatttaagtcattgtcttctgaagatggagtactttaaaagctccaaggagttatctggaaaaaaaatgtaagcagctttccatcaaaagacattatggttaaggtttgtactgtaggcctggtgtggtggctcacgcctgtaatcccagcacattgggagactgagtcgggtggatcacgaggtcaggagatcgagaccatcctggacaacatggtgaaaccccgtctctactaaaaataacagaaatttgttgaatgtggtggtgtgtgcctatagtctcagctactcaggaggctgaggcaggagaattgcttgaatccaggaggtggaggctgcagtgagccaagatggcgccactgcactctagcctgggcgacagagtgagactctgtcccaaaaaaaaaaaaaaaaaaaatttg

SEQ ID NO: 9786 - DNA, 300 bp, Homo sapiens
tagctcatgcctgcattaccagcactttaggaggctgaggcaagaggattgcttgaggccaggagtttgagaccagcttgggcaaatacagggactctgtctctacaaataaaattatttagccaggcatggtggtgcacacctgtagtcctagctatttgggaggctgaggcaggactcaactccttgagcccaggaggttacagaaagctatcattgtgccaatgtactccagccagcctgggtgaaaaagtgaaacacctttctttaaaaaaaaaaaaagaaaagaaaaaaaagaaa

SEQ ID NO: 9787 - DNA, 167 bp, Homo sapiens
aaagaataagaaaaggataatctgatattgctggcagtctgcactcttgcctttctgggccaagacatgcttttccaaataaaatcaaggaaatagtaaaccactagtaaaaatgaataaagcatccaagagtttgcctcctgtcatgtcctgttttctcctttttg

SEQ ID NO: 9788 - DNA, 687 bp, Homo sapiens
agccgaggcctgaattgtgcaaagagtcaaacaggaatgcaatcattcaaaataaaacagtgtagaagtacatttgaatgaaacattatgggaataacaccgaaaaaatacaaatattttcttgagtctcatgtcttttggctcgtgacctgcggcatcagctggccaaagaggtcaatcactggcatgtcaatcacgcaggcctctggccatggtaacagcagtctgtcagccagtcctcactgctcctgtctttgctctcctgctgccagctgtggcccgaagcccgtctgtcggagcagccttggagccagggaaaaggaaccgtagggtgaagagaggctgtggggtgccatttatgtagaaactgggcgcctgacttggctcttttcccaagctgtccacctaaaaaatgctatgtcgaatatcaccaatgatcagaaataacagggcagacttcgactctaaactaaagcttgcagaaagtttgatgtatgtgtgtgactatgctatggatataaagcctgttatcattttgaaaagggggaactttgtaaggtaagtaactttccaaataagtgattaaaatgttgataagcttttgacacatgtggaataattttttgatagatagttggcctgaatttcccttatttttcttgggaaaaacaaagcggattactggag

SEQ ID NO: 9789 - DNA, 15462 bp, Homo sapiens
cgtagtttgcgaagccccccatgacagctgggtccacgatgccgttcaggagcatggagagcgggttgatgggcaggctggggtcatccaggtgctgctgcaccatgctgttgatcttgtcgttcgtcagctgcatggtctcaatggcattctccagggggctgatttccacctgcaaagagagaggagagcccgatgtcagccccacagctgcctccactcccagggtctcaccagaggagccacgtgctctggggcaggcttcctgctcctccgtgaacctttcttccaaacagaatttttgggtggctgggcattttattattattgtttgttcccagagatgaaaattccaaaggaacaaagcaaagctgctgctcagctctgggggcggggctgtgtgtgtgcatgtggctatgcacatatgtggtcatcccaggaaaacacgcagccttgagtgcttgaatacacctgcttcagaacagacacttccaatcctgttcttgttctctgcttgttgtgctgagggagaagatgttcgggaattttgaggaatctaagcccgggcagcctgcactacctgtccggttagggagggcaaaggaggtcaaggcagggctccgccatggcaccacacaccatcatgtgaaggaagagtgatgggcaggcgtggtggctcctgcctgcaatcctagcactttgggaggctgaggtgggcgggtcacctgaggtcaggagttcaagaccagcctggccaacatagcaaaaccttgtctctactaaaaacacaaaaattagccaggtgtggtggtgcatgcctgtaatcccagctactcgggaggctaaggcaggataattacttgaacccaggaggcaggggttgcagtgagccgagattgagccactgtattcaggctgggcaacagagtgagactccaaaaaacaaacaaacaacaacaaagagagctcatggcccctggggtcgggaggaaaaggctgcttggagcactccaggccaccctcacaggcttcatttgcacacttgccatggttaatgacaccttcagtgcaggaggtaggggactgaccactgtcctcctggctccagtgcgtgtctctcagggacctccaccctctttctctgagggccccacagggcctggcctggccgagtcccagcccagtgccctccagctcagccctaaggtgccagggcaacgtggctgggtctaaggcagggaccacagctgccctgaggtcttgcttgagcagaccaaacctcctcctcacactgggccacggggaccatgtcccagggtgacctcagcaataactttgctccttccaaaggaagcgtgatgggcccccacccatgcccaagagcccttggtatcttcatgtccggctttcttcctgctacagcctctagcggactgcctgggagctgggggtggggcagggcagagatgaacagcgaatgggcgattctgtccgtcagcaaccctagactggcactcctaggtggctgtggacataacagaggttgtctgcccactgatgtcactgtccttgcactgatggagggacagccttggggagattgtgatgcactggtgtggccagccacgtgcaccctgctgagagggccccttgtccggtgtcctggacagcaggcatagccatgctgtcctgaccccacaacttactttgccaggccctacgacatttcatcccgggcacacagcttcaacaaatgcacactccagggcagtattccaccaggactgactgttacctccctgttactaatctcatttgcactgagaaagaatcccttcctatttttattgaagaaggttagctgctgctcccacagatatcccacgggggttggtcccaggtggcacgaggagggcatcagggtttggtagcaggacgtgagtcctgccattctgggattatttgccttcctgccctcttagtctgttcaaaatggccaaagcagcccgaggagaagctgcatcctcacgaaaggtcagggctcccctctccacctccctaagctcctgcatccggcagctgttggctggcaggccccgattacaaagggctcatgggcagagggtgattaagaggatcacggcctgtttaggtggagggcctgctcttctgttgtctctcacatgtacaatgcctcactagctacaaagggacccagcaaagggagtgcatttttaccacctgacacataactcccacagccttctatctgtcaggcactgcctggctgctaggggcacagaaagggaactccagagcagaaagtgaccccaggaggggtaggtgaagagccctgggtgctttgagtataaagcagtggctctgactgcgggcaacctctcagagagtggcccatagctgcccatagctcatgctggtgtgggcaaaggagaaggctcggcgctggacacgcagctgggcagagagatgccggcccctagagacaaataatcaggtgtttcggggggactcattgaaaactaaatggcaagtgccaccccctcagtgagttcttgccaggtgaaaacaaaaggcactgagacacatgaacaaaaacgtacagatttcaatcagatgtttttatattgccagttgccttggccctgacatttcaatactgtcaataaatctgcagcccaactctggttcatgtaaatgaaactgtccaatagctcactgcaaatgtgagtttcacgtaaatgaaactgccccatctcaaagcaaagtttagctttgttgagagctggaaatcgttatttctttaaaaagggtcagggaggggtatgttctcaggctatttttacttgaaatgggcaaggactattaattaatagttgtttgtcatgtaaatggcaataaaaccatcaggaaaaaaatctttaaaaaagtttatgtagactggaatttgtcttcaacttttcacttggttaacacaaagcattgtcaaaacagcacagctatgactgaatttaaatacattgtaagaagaaatgaaatcttcattctggttttttgataagctagagttggtcgtgattacacagcatttccactaaaatatggctaggcgaggagatatcgatgctctcaagaacaggtggggtggttatgggaactgtagagtctgctgtgtgcacgctgccacagtgaccacggggcatgagcaggtgaagaaggcgtggcagactgtattgaggaagggaacggacaattccttctggggtggggccatccttaccatgaaaacagacttgacctcaaaccaccttaaaattccaggtaatttatatgcagttgtatatatggttctctcgatccacatattctgcaaaggaaacacacacacacaacacgggttagaaggatgtcagcaggtggacagctctgccctaagggggatttatagaataactccaaaggagtcaggtccttcagcaggacagggtctgtggtgctcagcacagggcatgtgtgccttcaggtagcacctcacaagccacgctctacctaacggtcgctcaggatacatcaaagtatcccctgtcccctagccaacattgcccaccactctggtatttgacaatgaaagtatactaggtgagtgagaaagatgtgtatactccaaaatgaggtatggggagcccctcttgagcaaacagattttgaggaaggctccaaagaagtcttacattagctacagtgttcataagaaactaaaaggggcaaatacatctttgggagactggatttaatcaaagtgacctctgatgttctgataaaaccagtcggtattttaaactttaaaatgttttgacgtaactaatatatgtttatatgagaacataaagatatggaaagagcaggaggaaaaaccatcccctacctgaagctgataacctatatgctttagtatctattgttcaagacttcttactaagtattaaaaagtgtgtctatgcatattttaaataaaaacatcatttgacaatgtgttctttgtaaaacagtatattacctattgcaggaaactgttctaacccaataaatacaattctactactctttaaggattgcacaaaaactccaatgcaggggtcaactggaaatcctttatcctactgcctcgttcgtactgtctagcttgcaacaatcttctgccattccaacctccctgcactgcagggtcactgagcagtctgagtgtcaacaggaatctagacttaagcagatgggataatggaatgccagtcattccagaaaactgggacaagcgtggggggctcacgtctgtaatcccagcactttgggaggccagggcgggcagattgcctgagctcaggacttcgagaccaggccgggcaacgtggcaaaatcccgtctctactaaaaatacaaaaattagccagatgtggtggcatgtgcctatagtctcagctactcaggaggctgaggcatgagaatcgcttgaactcgggaggcggaggttgcagggagctgacattacaccactgcacttcagcctaggcaacagagcaagactctctctcaaaaaaaaaaaattttcagaaaactgacttggatcttggaaagcatttatcccaaacttcttacgttccataggaggaaagggaaggagctggctgaagccataaggacacaggcaaggcctccgtgtcccacaccagtcctctttgccccatggggacggctccctcaggtttttgtcctggcaatggaaacaggtctggccctctcacatccacctctagaccagattccagtgctttctctcatgtcaacatgccctgagacggacctctgggttccatcctgggctttacggccagctcctcctcacgcaggccctgtctcatcttcctcctcgtcagtgccctcactccccagcacatcagtcaccccttgccaggtctgcagggatgagccacctcgcactgctctcggcctggtgggcagcttccccagccccctgcacttggagccaggctccccgctggaggggccgaggctggcttcccagtagagcaaaagacgttgcacttatctaaggctttgtggggcatgtgaaggaccaaatcctgcagcttccgaacactttgtccaagtgcccggacctcaacagggccattaggggatttcagggccatttagaagaagcatagcctctgaggctcagcatagctcaaaatgtcaagagccttcgttattcttagctctgcacccaactggccgcgcaccctccagtggctcacttgacctccttgtgtctatttctttatagtctaagaatatatctacttgccagatgggagaggtgtgagggaaattcaagaactgcctataaatcccacagttgagggactccatataaacactagcgttagtgcttatgatgacagtaacaggtgcagtctgctctgaaagccactgcccttagcgagggtgtccaggttggacgtgcctaggttctgcccgcactgttgcagacaatggacactgtagtgaccagtcctggaggaggtccagggtgctgggttcaccaacaaatagggtgaacataatcttcaaacaaccagcctgctgggactgcacaatactgcagatttcaccaactccaagctcctttgtgctccttggtgacacacaaggaatctggcctcggggctggaaggaacttccccatggctcttaagagctgagctaggagactcacaggtactgccctgaggatcccatgactggcagacccctgagggattgggagggagactgggtagccaccactctttacttgaggcaaccctgctggaagggttccgagctttgctctggtcaggagtagggtgttaattcacctttgacctttgcagcctagatgccttcggacggcacacaagagaagccattctcagcagagccggtcctccttgggggtccccgggctaatgcctccttgcaatacaggagtacagaaggatttccggaggtttcccaggcaagacggataaacattaacattttaaaaaaattatggcttatttgatgccttttcaacatggatccactcacttgagcccaggagttcaagaccagcctgagcaacatagaccccacctctatataaaaaaataaataaaataaaaatacaaatgaatccatgaaagcagtttgtatgtagaatttttaaaaggctctagggccaggcgcggtggctcacgcctgtaatcccagcactttgggaggctgaggcggggggatcacgaggtcaggagatcgagaccattctggctaacaccgtgaaaccccgtctctactaaaaatacaaaaaattagccgggcgtagtggcgggcacctgtagtcccagctacttgggagggtgaggcaggagaatggcgtgaacctgggaggcggagcttgcagtgagctgagatcatggcactgcattccagcttgggcgacagagcgaggctctgtctcaaaaaaaataaacaaataaaaataaaaaaataaagaaaaaaggctctaaagatgtttgctgttatttctacaactcgaatgccgtggtttgcaacaaggggcagatgttttattttgcaatgtctggaaactttatttttttgatggagtttcactctcgttccccaggctggagtgcaatggagcgatcttggctcactgcaacctctgcctcctgggttcaagcgattctcccgcctcagcctcccaaatagctgggattacaggcgtgcaccaccacgcccggctaatgttgtacttttagtagagacagtgttttaccatgttggtcaggctggtctcgaactcctgaactaatttgatctacctgcctcagcctcccaaagtgttgggattacaggtgtgagccaccatgcctggcctggaaatctttttgattggttgtcccaactggggtggtggcactggcacctagtaggcagtgttcagggatgctgccaaacatccctggatgcactggatggtccccaccacagagaataacccggtccgtattgctagtagtgctggggtcaaccctgcagttgtgtgttgtgctccactgaagttcaggtgctggatactgaatgaggaatgagcacccgggtccagatccagttcatgtgctgactgctgtgtcacctgcagaaagccacgtcagcaccccgcacctcagcactcggtgggtccatttttaactagagatgacaggcacctgctctctcacctggggctcgcagggaaggcagtgcgctactcatatgggagctccggcatttggacggcacagtctccttattaaatatctcagtgaccttagtcatattgttagtgaaatggcaattagtttttctaactttggagggggtaatagattaagatttctgcacataatacacaaagacatttaatatggctccgtggctgcctctgaggccacgcttctccagtggcagttctactggtggcggaatgatattttttgttgtttggtttggtggtttgtttgttttttaccgcaaattcattgtctgggtttttctctcccttccggattggccgagaatattcaaatcgctggacctcgttcaccctgtaaaaactgtacagagacagacagatcattagatatttaacccggcaaatagccaatttgcttttggacacggggtctggccttagaacatgtcactgcctcctgtaaaatgtccctaaccttgacctgaagccatcgccttggtgtcctctcccagccagggaaatgttggcaggtggaaaaattaacttgagtttttgcctcttccctgtccctgccaaccctcgagggaaaacagaagctgagtaagagtgaaatgagcaaaaacagaggaaaggtgaagcgaaggagagagaaaaaagcttttgtgttcaacgtatgtgtttattattattttaaaaaagtattacataccttagtttcagatctacaaagcacagattttgcaaccaccccaagagtgacacacaggaaacataagtaacctgcctccgcggtcggggtacgaggcaggctttccgcatgcacagggcagggcgtggagagactgagactgatttctcccctgcactgaaatgcaggcaggcttccacagcaaaagaaactactgcatctgagaaggctctaagcgtcactatttgcttaaggcctctgaaaaaaaatgttgcaacccttaaaatgtatgccttgcgagagcaatcatttgtaaataaacagggtcccagtttatttcccattattgctgatgcaaggtcaaagaaacgatgaaaggttaaagaaaccaccaaacttcaggaagcaaaatgaagctgatcctaaggaatatgaggtcatcaaagagattaatattttcaccagaacatggatcaaacagaacagaaaagtcttaatatcaaacacatctgctaaagcaggtctttctatgccattgctaagtcaggtgcgatacaactgacaggcagaaaatctcactcaaatatggacagttgactcaggaggtttaaaagccccctcataaccctacattatggaattgctgtgctgtaaggctgaagggttctcctgtgtgtcaccaggagcaaatgtgcaaatcccatttcccgccttctaaaatgcaaacattcaggccacactcacatgtatgaacttggctttgctgggaacaggcaggacttgtgcactgctgtgaagttccctaggggattgtaccccacagggcaggtctataaaggagaccagacggcctccactgccctcttaggtttttgctgtcagctgactttgggaaaggaataggctttgcacgctcccagcacatggattaacatctcctgtcactttttttggatgctgaaaataattagcttcccttgctcttcaaagaggacagaaagagcatttggaaagcgaatccatggccaaagtccgtcctttaaaaggtggaattattagcaagagatctgtacacagcctcttacaaccctcacgttgggtaagaaaaatgggattattaccttacaatctgctctgacactggcctgtgaaacttaggaggcagatcgagtttgggcttcactgtgaagcactgaatatctgaggtgagggggttaaggatcactaaggcagcatagacatcaaccatgagagaggccccccaccacacccaaccacccaaatgaatggcatcaccatggtttcagagttgatgaggttgtcttaaaggatacactggccaggagagtttttaatatcgtcgcctggtggagatgttgtcttcattttctcggcgtttggaaactgagttaagagccgagcctcaaaatcttcccggcgctcatactctttccctcggtaaatgaaaacttttccctgaaaagggtgacattcatttcataacaccacagagaaagggccaggaagagttcacatgcaatatgctggccttaaaatatgccttacgggttcttacaaaatgtcattaaatttaagaacaacttgtaatttttatttttttttgtacttgcgttggctttgttaatcaagaacacatggtcatcaagcatgtaagttaatactgtttaagaagcactcagcactgcgctactaacatctgtgatatgttttcatcttgacagtaacaactgatttaaaaactatatgaaaaaccaaatgagcactcagaagcccacactagaatgggcatgaaatggttagaagggggcaaggcagccaggacaagtggataatgatgtccacactttttcttgtttttgttttcttctcaggtaggccctaatgaagttgttttcattctgccataaggaatttaagagagcttgagctaaggtggggccccagcacctgcacacggccgccgggcgctgactcctgtgagacacagccgaggcgagcagaacccgaggggaagggatgcagaccagagccgagagctactaagttcctggcctcccccgagtgagtgactggcgatggacggagagcaggacttcccttcctgcattcagaatgtgtgtgcaggtcattattcatcaacacatgtcaagataaaacatacagagctcttcttggaagggctgggtttggtccatctcaaatgacacttttgtcacctccataaattccaagatggaatgtcagtccactggggttgttatagacggctaggctagactaggcagtccggggcggggaggggagttaagtaggtaagtgttcttccttccacgaggctgtcttgttgaggtcatttctgcctgagtgtgacacagtcctctgtaaatatacctgtaaggaacgttttccttgcaagatacaacaggtctccgtttttttcccgatttcaacacgtgtgttctgagtgtgaactcggtcacagaaaggggccaatgagtacctagtgtaatgctgctgctggttttggaagccttctgcctccccccacccatcctgtcccatctggggctgtctcaaccgaaatgaaaactgccacaaggagaagacagcgagcagaagccacaggggtacaagaaacagaagtctggggttgggggggtaacactttccaggacggggcgtggttgctgaggtgcttctgttctttgatcaggggacacgggggaagaacctccaggttggctgctcccaagtcagctgcagccctgccccatctgcagtcattcctggacaggtgccagagagggagacgaacagagacagagacagacagagaggacagcattttgctgcatatttttacacttaccccctaaagactaagattgaagtcaaattaaaatttgtctaactaaaggattttcaaaaggattaagagagattctatgacactgaatcaattgatccctgctgtggtcagaacgtttgtagtccccaaaattcagatgttgaaacctaatcaccaaggtgatagtattagaaggtggggcctctggaaaggctccacccttaggaaagtcatcagtgcctcagaaaagaggccccagagagctgcctgccctttccaccccatgagaacaggtggaaggcgccatctatgaggaatggccctccccagactccaaatctgctggcaccttgatcttggacttcccagcctccggaactgtgaacaatacattcctgttgtttataaagtacccagtctaaggtattttgttacagcagccccagtggactaagacagtccccttcccttgccccagcttattctgagttctcctaaatcgctaaaaaaagaaccagtttaagaattgaattctttttcactttgtgcttagatatgtcttagaagtaccattatggaagaaaaatgctctatttctccccaccgcccccccgaaaaaaaaaagtcaagcagaaaccagataatatgtcatcttaaatacagtctgagcaacttctaaggcttctatataaagccacgcacttccaaaattcagtaagatttaatggataacagactactatcaaactagcaagcatttttcttatgctttacatgagaaaacataataataaaaatgtatataaagactttaatagaaaaaagctagtgagttataggtaaaaacacgaataacattttctgaaaatgtcagttactttgcattctgaagtgatccttttgaacatgaaaacaagggggaaatgtacatatagtcaaagatatttattccttgtaaggtctataaatatcaacatgagcacaaaaaacagtgagaccaatttttagagaaaaacaaagcaaaagggacagctagtcagttcttggaggctcctctccagcagggcatgaagcacgcaaacattctgcccacgttttggtaactgccagtgtcattggcagattgacccctgccagctcatctgtgaagtgtgataaatatattgctgcagacccacagaatgatccaggtgtggcgggaaagtcagttcaatattaatcgagcctgttaacctccattcagacttttcattttgtccttttggtggtggagatgacccagcaccgcccctggagcctgctgtgtgtgagctcctggcacaacctggcatctattggctcgggagctgcaacgtgtcctccgcacccggcactgccctcacataatattccacgcaggctgctcccttgctctggattctgggataaccatcctgcacggatccagagttggtgcctacataccagaggtagatctccatccacaggggccacacgcaccatctaacaccaagcactgcacaaggctgcatggcttagggtccacctgcctccctttcctaaagatgtatgttccggagcacacacacactcgaattaaagcctttagcaacagtaagtggctttaactccaagctcattccacccttcagctttgttttttattgagaatgaagctaatttcaaatttgtctctaatttagagcttgtaactaagcctcctttattcattctttggaagggaagactttgttcagaatctgtgcttctgatcaaccgctgtctttgctgcacgatgaaggcaagaggagaagctgaccagcagtgaccaggagtgaccaggacagggccagacgcctccgtcaccaggcaggacactgagtgggcagccagcctcacctcctagagcaggccagaactgtggtgctcccctgtcaacagtgacatgcccttcctaaggggaggtctgtatcctctgggtgccgtgatgaagagatgtcacactattagtgactcccgtggagtcggaaacacaggaccccaaatgaacaacgtctggaaccaggggaatctcccaactggtttcaactgccccagacggctgtgctcaagacacagagcttctgcttcctaaagccagagcaatcacacatagtctcctaggataagagaaaaccaagtgtccaaaaaaaaaaaaaaaaagtcataagaaatatcaggaaatcatgacccactggtcaatggcatccaaagaatgtgttcttgagaaaatgtataaacaattctatggtaggccaggcagcactattaatatttatgtaacttctcctttggcctcatgtgaatactgggaaatgggcacctggcaggtgatcacggttactgcttcaattacatgtctgaaagcacatgcctgtctcagggatggagcctggtttggagtttctagcaccgtggccatacagatccatttccaatttcccatataattaaaaacatacatcttcatagcagcacattgggcggggacaacccaaatgttcatcagtggatcaatgaataaataaaatgtggcctctccatgcaatgaaataccattcagcctcaaaaaggataaagttctgacacatgctacaacctggatgaaactggaagacattcggccgagtgaaacaagccaaacacagaagggcgaacactgtacaattccactaatacaaggtccctacaacagtcagattcatagagacacaaagtagaacggtggctgctggggctggcaggagggagaatggggagttcgtgtttaatggatgcagaatctcagttttgcaagatgaaaaagttctgaaggtagatggtggtgctggccgcacaacaacgtgactgtattaatgccaccgaactacacacctaaaaatggctaagatggcaaatagtatcacatatcatatatcacacctcaattaaaataatacgtgtaaatctctgaaggagggtccttttacggaaaaatcagatagaaaggttatatgcaaccaaataaaatcctgtcaacccctctctgccccccgggctaaccaccgagctatggcagtgtagagagttgcacgatcccacgcggatgcaaactccccacccttcctcagaacgggaaggggattttctgctgggggaacaatcatggctcagattaggcagaaccaaactttacccgcaggaatgtggggaacccttgtccgtagtagccaacagcaaaatagtcaggcttgggcctgatcactttgacgatgttttcataaaactgagcctgttttttctggaaggaaaaaagaaaatgcatttcaggtttgagtattcaagcatgtgtgcctctggattcttcttgcgggctctttaaaagctctggcaacttctatagggtgggagggggagatggtgggagagggagatggtgggagagggtactgaggcttgcacctgaatttcatctcactccatcgttttgacattatttttcactcattctccatcattccgcaagggaatctgaaccaactagcccaaattcagcaaaaagttgtgacttatgggtgttttcaataaccaaagaagtgccatagaaatggctggcccttagtattttttaaaaggtataggtcagatagtgggatacgttcaaagagaatttaaaggaacagaatcgttctgttctaaattcatgacagacattcccacatcattaaggtgatctgctgaatacaaaaatgacaaggtggaggaggtagcaattagaaactaacagcattcccatggcagaagaaaggtctggtcattatctatccatccctctctcatagaaggggtcaggtttttttgttttttgagacggactctcactctgttgcccaggctggagtgcattggcgcgatctcagctcactgcaacttccacctcctgggttcaagcgattctccagcctcagcctcccaagtagccaggactacaggcgtgtgctaccacgcccggctactttgttgtatttttagtagagatggggtttcaccgtgttagccaggatggtcttgatctcctgacctcgtgatccgcctgccttagcctcccaaagtgctgggattacaggcgtgagccagtgcgcctggcctggggtcagttttaaactagtacaaatgttcacagactcctgggctgtcaagaccgctatacacaaggtcagcagttgtttacgtacaatttattcatagaagccttaagagtttggttataagagctgacttgggactaaaaagtaaatatttatgggccaaatatcaaccagcaaattaactaaaaccatcttcctaggcaaaacggagggacatggccaaggtcccagagtgcctggggtgaaccctaacattgacatggaaagagagattcctgaaaaaccagctgagattgcctgtgttcatttaaataaaaagaaataaagactcaccagcaattcgctgagttgctcataatcaaacatttcgttctcatactgctcggctagctccttgcccaag

SEQ ID NO: 9790 - DNA, 3842 bp, Homo sapiens
tttaaaacataaataggtttgcttctttaattccatatgtgcatttacactcttctttattagtggataaatattagaaaatcatctctcagacagagtggctgagggcgggcccctccaggggctccggcttggtgtgcagggtgaggctgtccctccagggctcgtacaccagcgtggaggtctcggccctcttgatggtgaacttataggatcggttgggcagcaggtttcggacgtcgaaggtgcaggcagccacggggatgacgccacactgggcgcactcctgctgtgtccgcgggtccagcagcctgaagcgcaactcatactgctccgatgtggctggctggatggtgacgaaccagcgcagccgggcccagtcctggtgagccgccgacgcctttcggtcaaacacgacaggcatcttggtgctcagcatgagccagatgtgcgggatcttggtggcactgacatcagacaccaggcggtgcttgacgtgtagccgccccggcaccatcatggtcaggaagctgtccatgacggccgacacgtccgccagccgccgctccaccagcgcccagtcggccaggaagggccgtgggtctggcgaccggagcagggcatccagctcagcacggccatggtcgagctgttccaacaggtccccgagcagcaggagctggatcttggtctgagctgtgcccaccttcttcatgcgctggaacttccaggggtcgatgagctggaacaaggcgctaggcagcaccagcgggttctggtcgcccagggccaggtgcttgggcaggacctcgatgtagtaggagcacttacgcagcagctgcatgcgggcgtggtggcgcttgagcaggtgcggactcaggtccgaggtcaggaactcacgcagggcattgcggcgctcggtgtaggtcttccacgcctctggttccagcagctgctggtcatctgcctcctcctggtccaggaaggactggggattgcccagcttcatcttgtccaggcccaggcctgccacatgggtgctcattatccgggagctggggggagggctgggtgtcagctgccaggcaggctggcctcccctgggctgtggcatgttcgggggatggattcagcccactgaccccatgctggacctctgtccttcttcgggggcacaactcgatgggaagaggctgcctggagggctggatgggcagcctacagatctggacacagtttatactgaggggcaaaaacctctactgacaaccagtggcctgtgggacaggacagggaagaactaggactgcggacttctggccagaaccgcctgacctgtggccttgcaagggccccagttcctaaccctgctgctgaaaggggttgctggcacccctcggggccgtggagaggggacggcgtggtcctaagcagcacaggatccccctcggggacattcgcgggccatcctcccgctccggttctccctggggacgctccacgcctcaccgcagttgtagggcacagagacaggcctcaccaaagacgaggccagctggctggtcagcatgggaggagggcgcccaggcctgggcccggaggagcagccctcctcccacgctgtgggccctcgctgtggacccgggatcctgtccctggtgagctcatggactccacaagtgacactccatttcccagatggagcctgaggctaagaagcttggttcttgttctcatccagggcttgagcccagtgctgagccgagtctgaccctctgtccgtgggtgcaccggctgagtgcagctgtggccccaggctctgccgcagctccctggagagcaagccgcacccctggttgctgccccggctcccagcaaccctggagatctcaggttgtcacagccacttgggccttggacgacccacaaatgagagctaagcagttgctgagttccccagggccacacaggtacgtggtgaagtcatatctgcccgggaagggttgcccttttgggcgtgaggcagatatgacttcacgagcgcactcctcgggaatccctcgagaacaggcccctgggggcagcagggagtgtgtctggggtgaggtgccagctgagagcaggaccccaggaccccaggcctaagccctgctcttgctggaggctggggcggatttcaccgctggagggaaaccgtgcctctgtgacgtgtgagggatgttttctagtctccagcagctgcccaggtggaacacccagagaggctggtcgtgaacccggaaaggtggttctgagcccctcgctgcttcctacacgccccggtcccaggcccgcttccctgagaccaccaggtgcccgcactctaccccctccaccacactccccttggctcccctggcccgggcccacctccccggccgctctgcctgccccttaccttctcgagacccccagccctcctctcccggcccccgccgccgccccaggaccgcgcccacttgccctgcctctgaagcggagccgcgcgcggacttcccagagcccagcctccctccgcactccgcgggttgccctggggaccagcggcctttgtgacgctgcggcccgggggcggggcgggggtggggacccgggaccccgagccgagtaatcttccatccgcttcgcttcctggagagccccagacttctgggggcccgcgtccccgactgaggggccacggcgggtggctggtccaagagccaggctccaaggggggttcccgtcccggagcccttccgcgggcgcaccactccccacgcacccccggcttcgggcggggcgcaggagcctcgggtgactgggagggagttcctgctcaaccccccagtccgagcgcactcctcgggaatccctcggaggaatttgggagagaggcagtggccggtgaccaggcggatggaccacccagcgcctggacagaggagaggggcggcttcccccgccgcgggctctgcccagcaaggccccgcccattacagatgccacccattacaggctcctcccaccgcaggctccccccaccgcaggctcctcaaccacaggctcctcccaccatgggctcccccctcccccgcaacggcccctcccatcataggctcctcccaccgcgggctccccccaccacggcccctcccaccacaggctcctcccagagcaggctcctcccaccgcgggctcccctactacggcccctcccaccacagggtcttcccaccacaggctcctcccagcgcaggctcctcccaccgcgggctccccccaccacggcccctcccatcataggctcctcccactacaggctcctcccactacaggctcctcccaccatgggctccttccacctggggctgcccaagctcaggcaccgacctgactctggataaatggggtctccatagctccagggagccccgcaggggagctctgaggccatctggtcccgtctgtatctgttcagttgggctcagggcctctgggatccccccgttcccccacagcacaccccagctagctgggggtctcctggggtcacaatcttagacaccccaaggtgcccctccttcaccttcaggaagatgctggaggaagacaccctttccatcctcctcatctccacccccacggaggtcagtgctggggcctcttccaggatgggcgtctttgagcccctaccaggctgttctgtaacttgagcctcccccctcctcccggtgaccccaccctggaagagctttcccttggtgcatggaggccccaggggttaggcctggcaggaagtgggtggatgtgggtggtttttt

SEQ ID NO: 9791 - DNA, 3841 bp, Homo sapiens
tttaaaacataaataggtttgcttctttaattccatatgtgcatttacactcttctttattagtggataaatattagaaaatcatctctcagacagagtggctgagggcgggcccctccaggggctccggcttggtgtgcagggtgaggctgtccctccagggctcgtacaccagcgtggaggtctcggccctcttgatggtgaacttataggatcggttgggcagcaggtttcggacgtcgaaggtgcaggcagccacggggatgacgccacactgggcgcactcctgctgtgtccgcgggtccagcagcctgagcgcaactcatactgctccgatgtggctggctggatggtgacgaaccagcgcagccgggcccagtcctggtgagccgccgacgcctttcggtcaaacacgacaggcatcttggtgctcagcatgagccagatgtgcgggatcttggtggcactgacatcagacaccaggcggtgcttgacgtgtagccgccccggcaccatcatggtcaggaagctgtccatgacggccgacacgtccgccagccgccgctccaccagcgcccagtcggccaggaagggccgtgggtctggcgaccggagcagggcatccagctcagcacggccatggtcgagctgttccaacaggtccccgagcagcaggagctggatcttggtctgagctgtgcccaccttcttcatgcgctggaacttccaggggtcgatgagctggaacaaggcgctaggcagcaccagcgggttctggtcgcccagggccaggtgcttgggcaggacctcgatgtagtaggagcacttacgcagcagctgcatgcgggcgtggtggcgcttgagcaggtgcggactcaggtccgaggtcaggaactcacgcagggcattgcggcgctcggtgtaggtcttccacgcctctggttccagcagctgctggtcatctgcctcctcctggtccaggaaggactggggattgcccagcttcatcttgtccaggcccaggcctgccacatgggtgctcattatccgggagctggggggagggctgggtgtcagctgccaggcaggctggcctcccctgggctgtggcatgttcgggggatggattcagcccactgaccccatgctggacctctgtccttcttcgggggcacaactcgatgggaagaggctgcctggagggctggatgggcagcctacagatctggacacagtttatactgaggggcaaaaacctctactgacaaccagtggcctgtgggacaggacagggaagaactaggactgcggacttctggccagaaccgcctgacctgtggccttgcaagggccccagttcctaaccctgctgctgaaaggggttgctggcacccctcggggccgtggagaggggacggcgtggtcctaagcagcacaggatccccctcggggacattcgcgggccatcctcccgctccggttctccctggggacgctccacgcctcaccgcagttgtagggcacagagacaggcctcaccaaagacgaggccagctggctggtcagcatgggaggagggcgcccaggcctgggcccggaggagcagccctcctcccacgctgtgggccctcgctgtggacccgggatcctgtccctggtgagctcatggactccacaagtgacactccatttcccagatggagcctgaggctaagaagcttggttcttgttctcatccagggcttgagcccagtgctgagccgagtctgaccctctgtccgtgggtgcaccggctgagtgcagctgtggccccaggctctgccgcagctccctggagagcaagccgcacccctggttgctgccccggctcccagcaaccctggagatctcaggttgtcacagccacttgggccttggacgacccacaaatgagagctaagcagttgctgagttccccagggccacacaggtacgtggtgaagtcatatctgcccgggaagggttgcccttttgggcgtgaggcagatatgacttcacgagcgcactcctcgggaatccctcgagaacaggcccctgggggcagcagggagtgtgtctggggtgaggtgccagctgagagcaggaccccaggaccccaggcctaagccctgctcttgctggaggctggggcggatttcaccgctggagggaaaccgtgcctctgtgacgtgtgagggatgttttctagtctccagcagctgcccaggtggaacacccagagaggctggtcgtgaacccggaaaggtggttctgagcccctcgctgcttcctacacgccccggtcccaggcccgcttccctgagaccaccaggtgcccgcactctaccccctccaccacactccccttggctcccctggcccgggcccacctccccggccgctctgcctgccccttaccttctcgagacccccagccctcctctcccggcccccgccgccgccccaggaccgcgcccacttgccctgcctctgaagcggagccgcgcgcggacttcccagagcccagcctccctccgcactccgcgggttgccctggggaccagcggcctttgtgacgctgcggcccgggggcggggcgggggtggggacccgggaccccgagccgagtaatcttccatccgcttcgcttcctggagagccccagacttctgggggcccgcgtccccgactgaggggccacggcgggtggctggtccaagagccaggctccaaggggggttcccgtcccggagcccttccgcgggcgcaccactccccacgcacccccggcttcgggcggggcgcaggagcctcgggtgactgggagggagttcctgctcaaccccccagtccgagcgcactcctcgggaatccctcggaggaatttgggagagaggcagtggccggtgaccaggcggatggaccacccagcgcctggacagaggagaggggcggcttcccccgccgcgggctctgcccagcaaggccccgcccattacagatgccacccattacaggctcctcccaccgcaggctccccccaccgcaggctcctcaaccacaggctcctcccaccatgggctcccccctcccccgcaacggcccctcccatcataggctcctcccaccgcgggctccccccaccacggcccctcccaccacaggctcctcccagagcaggctcctcccaccgcgggctcccctactacggcccctcccaccacagggtcttcccaccacaggctcctcccagcgcaggctcctcccaccgcgggctccccccaccacggcccctcccatcataggctcctcccactacaggctcctcccactacaggctcctcccaccatgggctccttccacctggggctgcccaagctcaggcaccgacctgactctggataaatggggtctccatagctccagggagccccgcaggggagctctgaggccatctggtcccgtctgtatctgttcagttgggctcagggcctctgggatccccccgttcccccacagcacaccccagctagctgggggtctcctggggtcacaatcttagacaccccaaggtgcccctccttcaccttcaggaagatgctggaggaagacaccctttccatcctcctcatctccacccccacggaggtcagtgctggggcctcttccaggatgggcgtctttgagcccctaccaggctgttctgtaacttgagcctcccccctcctcccggtgaccccaccctggaagagctttcccttggtgcatggaggccccaggggttaggcctggcaggaagtgggtggatgtgggtggtttttt

SEQ ID NO: 9792 - DNA, 4742 bp, Homo sapiens
gccgacatcaacttcagctgctgctacctctgcatccggctcgaggggctgccggctcccacggccagcccacgccctgggcccagcagcctcggccctggcctgaatgttgaccccggcacgtatacctgggtggcccacgggcagacgcaggactgggaccaggagcgccgggcagaccggcaggaggctcccagacgggtgcacctcttcgtccaccacatgggcatggagaaggttccggaagaggtgctgaggccgggcaccctgttcaccgttgagctgctgcccaagcagcttcctgatctgtgagtggcttccaccagcagaggctgggctgggggaccgccccgggcccctcacttgcaggaggggggagctcgtggggcagcagcccctttcctgggagtcctgttggttttccagtgtctgccttcacccccagccgcaaggaggaagccgtgcgtggactagaggaggcgtccccgctggtcaccagcatcgcactgggccggcctgtcccgcagcccctctgcagaggtaggtctgccccacccctccagcttcccctctggcccccagccccaccctgcatgagtgctcagggaggctgccccctctcagtgatccccagcaggttcctggagcggcagacctacaacatccccggaggccgccacaagctgaaccccagccagaacgtggcggtcagggaggctctggagaagcctttcacggtcattcagggcccaccaggtagggcccatgccgggggagccgcaggctgccttgggccacagggacccacagggtgggctacaatctcctattctctggctgcaggtacagggaagacgatcgtgggcctccacatcgtattctggtttcataaatcaaaccaggagcaggtgcagcccggaggccccccccgtggggagaagcggctggggggtccctgcatcttgtactgcggcccctccaacaagtcggtggatgtcctggcaggtgcgccggggtcggcggtgggggcctttggggagctggcacgcggggcaggactcacgtcccccaactaccctcaggactgctcctgagaaggatggagctgaagcccctccgtgtgtacagtgagcaggctgaggccagcgagttcccagtgccgcgtgtgggcagcaggaagctgctcaggaagagcccccgggaggggaggccgaaccagagcctcaggtgtgcctgctgtctttggggcttgggcggagtggggccgagctgtccagacagtcctgtgtaggtgggtctcactgagctctgcccccgtgatggccctgcgtggacagggctcactgtgtcctgtcccccaggagcatcaccctgcaccaccggatccggcaggcccccaacccttactcgtcggaaatcaaggcctttgacacccggctgcagagaggggagctcttctccagggaggacctggtctggtaagtggcaggggccagggggtggagctgcctgcagcatgggggccctggggtgacaagcagtgtccccggcaggtacaagaaggtcttgtgggaggctcggaagttcgagctggaccggcatgaggtcatcctctgcacctgctcctgtgcagcctctgccagcctcaaaatcctggacgtgaggcagatccttgttgacgaggcaggcatggccacggaacctgaaaccctcatccccctggtgcagttcccacaggccgagaaggttggtcggcggggggtgtgggcagcatgagcaggcgtccctggcacagtctcccacctggggtgccctgtgtgtgcagacgcgggtgtcgtgtggggctggggtccctctgggtctaggggtgtcagggccaggcctgcctattcctccaggtggttcttctcggagaccacaagcagctgcggcctgtggtcaagaatgagcggctgcaaaacctgggtctggaccggtctctgttcgagcggtaccacgaggacgcacatatgctggacactcagtaccgcatggtgagcccgccccactcagcccccagcccacctgcagcccctggggggccacaaccccgcgtggcagcctctgaccagcgcacatccttgcctgcagcatgagggcatctgtgccttcccctctgtggcgttctacaagagcaagctgaagacgtggcagggcctgaggaggccgcccagtgtcctgggccacgctggcaaggagagctgccctgtcatctttggccacgtgcagggccacgagcggagcctgctggtgtccacggacgaagggaatgagaactccaaggccaacctggaggaggtggctgaggtggtgagtgtctggtgcctgtgagtcagggagggctttctggaggaggtggctgaggtggtgagtgtctggtgcttgtgagtcagggagggcttcctggaggagggcaggagagacaccagggtccgctccacctgccccctcggctcctcaggtccgtatcaccaagcagctgaccctggggaggaccgtagagccccaggacatcgccgtcctcacgccctacaacgcgcaggcctctgagatcagcaaggcccttcggcgagagggcatcgccggggtggccgtgtcctccatcaccaagagccagggtgaggctgggggctcgtgggtggggccgggagggtgggcgcagcggcagcagggcctcacctcccatcccgcagggagcgagtggcgctatgtgctggtgagcaccgtccgcacctgtgccaagagcgacctggaccagcggcccaccaagagctggctcaagaagtttctgggcttcgttgtggaccccaaccaagtgaatgtggctgtcacgcgggcccaggaggggctctgcctgatcggtgagggcggggctgggctcttccagggtgggaacacaggtgaggccagggctgggctagggagctgccgactcctgcctgaccctgactccgacctgaccctgactcctcccacctgaccctgactcctcccacctgactctgactgactcccatctgaccctgactcctcccacctgaccctgactcctcccacctgaccctgactgactcccacctgaccctgactcctcccacctgaccctgactccgacctgaccctgactcctcccacctgaccctgactcctcccacctgactctgactgactcccatctgaccctgactcctcccacctgaccctgactcctcccacctgaccctgactcctcccacctgaccctgactcctcccacctgactctgactgactcccatctgaccctgactcctcccacctgaccctgactcctcccacctgaccctgactgactcccacctgaccctgactcctcccacctgaccctgactcctcccacctgaccctgactgactcccatctgactcccaccctcacaggagaccacctccttctgcgctgctgccccctctggcgtagcctcctggacttctgcgaggctcagcagaccctcgtgcctgccggccaggtgcgcgtctgcaggaggccaactatgccttcctgaagagccctctccacctgcaaggtgccaggactgggagggaaagtccagggcccccccaccctccccaccaccctccgccatcagcctgcctgggccagcctgcctcctggcctcaggatctccctggggcaggaagtgggtggacttggaggaggaacggcaagggccggtccccacactcttgctcctcctgggcatctggggacaggaacacctctcagggtggccaagaggggcttccttgggaccagtgcaaggaagttctgctgtccctgggaagtctcagaaccaggaaggaaaccctgtggaggctgccctttgacctttggacgccacctgtaatcactctggatggtgtctgtggagttcaggtttattttctatttaaatgaactaaaagccagcatcctgccgggcgtggtggctcacgcccataatccagcactttgggaagccgaggcgggcagatcacctgaggtcaggagttcgagaccatcctggccaacatggtgaaaccccgtctccactaaaaatacaaaattagctgggcgtggtggcgggcgcctgtaatcccagctacttgggaggctgaggcaggagaatcgcttgactccaggaggcgcaggctgcagtgagctctgatggtaccactgcactccagcctgggtgacagagcgagaccctgtcttaaaaaaaaaaacaaaacaaaaccagcatctgttactggaacagagacctcagcccaagctcaggacaaggaggcctccctgggagagggggcctttctcccaccatcaccgcctgtgtccttcaggggctgctggagggcagcccaaagccaggggcccaccccgccccaccccaccccaccccaccctctgaaatgtgaaaagcctgcactcttcctgtgggctgcgcagtgggctcgggggttggggggtgccggggcgatgcttccaccctggactgagtgttcggggcagcctgctcggctgtatgtttctcgcacgctcacccgcttcagtgcggctctgtccctgctgccgcctccagtcctgagggaggggcttgccccaccttctacattccaatttttatatctttgaattatgtgattagatattaatttaatgataaaaccactctgaaagctcttctca

SEQ ID NO: 9793 - DNA, 192 bp, Homo sapiens
aaaaatacaaaacactagctgggagtggtggcaggcgcctgtagtcccagctactcgggagactgaggcaggagaatggcgtgaacctggaaggtggagcttgcagtgagccgagatcacgccactgcactccagcctgggcgacagagcgagactctgtctcaaaaaaaaaaaaaaaattagctggacgtg

SEQ ID NO: 9794 - DNA, 217 bp, Homo sapiens
gatcgagaccatggtgaaaccccgtctctactaaaaatacaaaacactagctgggagtggtggcaggcgcctgtagtcccagctactcgggagactgaggcaggagaatggcgtgaacctggaaggtggagcttgcagtgagccgagatcacgccactgcactccagcctgggcgacagagcgagactctgtctcaaaaaaaaaaaaaaaaaaatta

SEQ ID NO: 9795 - DNA, 4742 bp, Homo sapiens
gccgacatcaacttcagctgctgctacctctgcatccggctcgaggggctgccggctcccacggccagcccacgccctgggcccagcagcctcggccctggcctgaatgttgaccccggcacgtatacctgggtggcccacgggcagacgcaggactgggaccaggagcgccgggcagaccggcaggaggctcccagacgggtgcacctcttcgtccaccacatgggcatggagaaggttccggaagaggtgctgaggccgggcaccctgttcaccgttgagctgctgcccaagcagcttcctgatctgtgagtggcttccaccagcagaggctgggctgggggaccgccccgggcccctcacttgcaggaggggggagctcgtggggcagcagcccctttcctgggagtcctgttggttttccagtgtctgccttcacccccagccgcaaggaggaagccgtgcgtggactagaggaggcgtccccgctggtcaccagcatcgcactgggccggcctgtcccgcagcccctctgcagaggtaggtctgccccacccctccagcttcccctctggcccccagccccaccctgcatgagtgctcagggaggctgccccctctcagtgatccccagcaggttcctggagcggcagacctacaacatccccggaggccgccacaagctgaaccccagccagaacgtggcggtcagggaggctctggagaagcctttcacggtcattcagggcccaccaggtagggcccacgccgggggagccgcaggctgccttgggccacagggacccacagggtgggctacaatctcctattctctggctgcaggtacagggaagacgatcgtgggcctccacatcgtattctggtttcataaatcaaaccaggagcaggtgcagcccggaggccccccccgtggggagaagcggctggggggtccctgcatcttgtactgcggcccctccaacaagtcggtggatgtcctggcaggtgcgccggggtcggcggtgggggcctttggggagctggcacgcggggcaggactcacgtcccccaactaccctcaggactgctcctgagaaggatggagctgaagcccctccgtgtgtacagtgagcaggctgaggccagcgagttcccagtgccgcgtgtgggcagcaggaagctgctcaggaagagcccccgggaggggaggccgaaccagagcctcaggtgtgcctgctgtctttggggcttgggcggagtggggccgagctgtccagacagtcctgtgtaggtgggtctcactgagctctgcccccgtgatggccctgcgtggacagggctcactgtgtcctgtcccccaggagcatcaccctgcaccaccggatccggcaggcccccaacccttactcgtcggaaatcaaggcctttgacacccggctgcagagaggggagctcttctccagggaggacctggtctggtaagtggcaggggccagggggtggagctgcctgcagcatgggggccctggggtgacaagcagtgtccccggcaggtacaagaaggtcttgtgggaggctcggaagttcgagctggaccggcatgaggtcatcctctgcacctgctcctgtgcagcctctgccagcctcaaaatcctggacgtgaggcagatccttgttgacgaggcaggcatggccacggaacctgaaaccctcatccccctggtgcagttcccacaggccgagaaggttggtcggcggggggtgtgggcagcatgagcaggcgtccctggcacagtctcccacctggggtgccctgtgtgtgcagacgcgggtgtcgtgtggggctggggtccctctgggtctaggggtgtcagggccaggcctgcctattcctccaggtggttcttctcggagaccacaagcagctgcggcctgtggtcaagaatgagcggctgcaaaacctgggtctggaccggtctctgttcgagcggtaccacgaggacgcacatatgctggacactcagtaccgcatggtgagcccgccccactcagcccccagcccacctgcagcccctggggggccacaaccccgcgtggcagcctctgaccagcgcacatccttgcctgcagcatgagggcatctgtgccttcccctctgtggcgttctacaagagcaagctgaagacgtggcagggcctgaggaggccgcccagtgtcctgggccacgctggcaaggagagctgccctgtcatctttggccacgtgcagggccacgagcggagcctgctggtgtccacggacgaagggaatgagaactccaaggccaacctggaggaggtggctgaggtggtgagtgtctggtgcctgtgagtcagggagggctttctggaggaggtggctgaggtggtgagtgtctggtgcttgtgagtcagggagggcttcctggaggagggcaggagagacaccagggtccgctccacctgccccctcggctcctcaggtccgtatcaccaagcagctgaccctggggaggaccgtagagccccaggacatcgccgtcctcacgccctacaacgcgcaggcctctgagatcagcaaggcccttcggcgagagggcatcgccggggtggccgtgtcctccatcaccaagagccagggtgaggctgggggctcgtgggtggggccgggagggtgggcgcagcggcagcagggcctcacctcccatcccgcagggagcgagtggcgctatgtgctggtgagcaccgtccgcacctgtgccaagagcgacctggaccagcggcccaccaagagctggctcaagaagtttctgggcttcgttgtggaccccaaccaagtgaatgtggctgtcacgcgggcccaggaggggctctgcctgatcggtgagggcggggctgggctcttccagggtgggaacacaggtgaggccagggctgggctagggagctgccgactcctgcctgaccctgactccgacctgaccctgactcctcccacctgaccctgactcctcccacctgactctgactgactcccatctgaccctgactcctcccacctgaccctgactcctcccacctgaccctgactgactcccacctgaccctgactcctcccacctgaccctgactccgacctgaccctgactcctcccacctgaccctgactcctcccacctgactctgactgactcccatctgaccctgactcctcccacctgaccctgactcctcccacctgaccctgactcctcccacctgaccctgactcctcccacctgactctgactgactcccatctgaccctgactcctcccacctgaccctgactcctcccacctgaccctgactgactcccacctgaccctgactcctcccacctgaccctgactcctcccacctgaccctgactgactcccatctgactcccaccctcacaggagaccacctccttctgcgctgctgccccctctggcgtagcctcctggacttctgcgaggctcagcagaccctcgtgcctgccggccaggtgcgcgtctgcaggaggccaactatgccttcctgaagagccctctccacctgcaaggtgccaggactgggagggaaagtccagggcccccccaccctccccaccaccctccgccatcagcctgcctgggccagcctgcctcctggcctcaggatctccctggggcaggaagtgggtggacttggaggaggaacggcaagggccggtccccacactcttgcttctcctgggcatctggggacaggaacacctctcagggtggccaagaggggcttccttgggaccagtgtaaggaagttctgctgtccctgggaagtctcagaaccaggaaggaaaccctgtggaggctgccctttgacctttggacgccacctgtaatcactctggatggtgtctgtggagttcaggtttattttctatttaaatgaactaaaagccagcatcctgccgggcgtggtggctcacgcccataatccagcactttgggaagccgaggcgggcagatcacctgaggtcaggagttcgagaccatcctggccaacatggtgaaaccccgtctccactaaaaatacaaaattagctgggcgtggtggcgggcgcctgtaatcccagctacttgggaggctgaggcaggagaatcgcttgactccaggaggcgcaggctgcagtgagctctgatggtaccactgcactccagcctgggtgacagagcgagaccctgtcttaaaaaaaaaaacaaaacaaaaccagcatctgttactggaacagagacctcagcccaagctcaggacaaggaggcctccctgggagaggggccttttctcccaccatcaccgcctgtgtccttcaggggctgctggagggcagcccaaagccaggggcccaccccgccccaccccaccccaccccaccctctgaaatgtgaaaagcctgcactcttcctgtgggctgcgcagtgggctcgggggttggggggtgccggggcgatgcttccaccctggactgagtgttcggggcagcctgctcggctgtatgtttctcgcacgctcacccgcttcagtgcggctctgtccctgctgccgcctccagtcctgagggaggggcttgccccaccttctacattccaatttttatatctttgaattatgtgattagatattaatttaatgataaaaccactctgaaagctcttctca

SEQ ID NO: 9796 - DNA, 858 bp, Homo sapiens
aggtgagaggagaagcaaagaagtggaacaaagacttccaaattaaagagaccacttaagaaaaattacatcaatgtttatactacttataatgtacctcatttgggaaggaaaggctgttagctgctacttgttaccacctgtcaaagcctctgtggcaacagtattgacatttaatccttggaagttctgaagtttttacaaacttggtggtgaggttgagttgatttgttttgcctcaataagaaatgttgatatatggtggctggtaagatggccgaatacgaacagctccggtctgcagctccgagcgggatcaacgcagaaggcgggtgatttctgcattgggtacccggctcatctcactggaactggttggacagtgagtgcagcccatgaagggtgagctgaagcaaggtggggtgttgcctcacccgggaagtgcaggggattggagaactccctctcctagccaagggaagccacgagagactgtgctgtgaggaatggtgctctccagcccagatactacgcttttcccaccatctttgcaacccacagaccaggagattgccttgggtgcctacaccaccagggccctgggattcaagcacaaaactgggtggccatttgggcagacaccaaactagctgcaggagtgtttcttcatactccagtggcacctggaactccaacaacacagaaccattcactcccctggaaagggggcagaagccagggagccaagtggtctagcccagcagatcccacccccacggagcccagcaagccaagatccactggcttgaaattgtcgctgccagcacagcagtctgaggtcaacctgggacactcgag

SEQ ID NO: 9797 - DNA, 13578 bp, Homo sapiens
aaacgttgaaaagaatcagcatgttgtacatggccaagctgggaccagatgtaataactgaagagataaacattgatgatgaagattcgactacagacacagacggtgccgccgagacttgtgtctcagtacagtgtcagaagcaaattaaaggtagaactctttgcttaattattgagcatattttttaccccgttatgatagtgcttctgaaccctgactgcacatcagaatcatgtgggaagctttcaaaatactgatgcctaggcagggcgtggtggctcacgcctgtaatcctagcactttgggaggccaaggcgggtggatcacctgaggtcaggagttggagaccaacttggccaacctggtgaaacccggtctctactaaaaaatacaaaaattagctgggcgtggtggcaggtgcctgtaatcccagctacttgggaggctgaggcgggagaatcacttgaacccaggaggcagaggttgcagtgagccgagattgcgccgttgcactccagcctgagcgacagagcgagactctgtctcaaaaaaaaaaaaaaaaaaaaaacaaaacacaaaactgatgcctgggtcctaccctatccaaaattttgctacaccataggccaattaaatcagaattttggatggggtaggacctaggcatcagtattttgaaagcttcccacatcatttatttatatctccaaatcaccatagggtatataacaattgtgctttatgagttactttcttgtttggaattaagcacttttgaaagtgtctcaatggaagcagccagttatactataaccttaaggatatgtactatatgtcaagatatttttgttaaatgaaagaaacaatgaataaaaatatatttagcgacacccctttttgttggttaacaagtagtgttgtaaggcaagatcatatgatacatctactgaatgcacattcattttactcatacacatgtttatttaaagatgtaggaaagcagttctggctcagtaactattggaacattttaatttagtacacaggtcaaaagcaatattcatttatttgtttggtagataaaatttcaactggaagtataaagaagaaaggatgttacagacaccatctttacctactcttcaacccctcaagctaacacaaaatagaattcatgttggtagggagggagaggaagtttaaaggagttccctttgctcattattctcctttctgttcgagcttgaacaatatggtttcatgttcttctttctggattagccagcaaatggagaaagtgattcagaaataagtctctgagaacttctccaagctgagtttatgtaaaaagtttgatttaatttacaaataaccacataacatattctttattgcacttggaaaacagtaagaaattaaaggcagttaaaacctaagtgacaaaacagtaggccagaatatgaatttgagtagtctgtgctaatctatgtgtattttcaaacatttgagtgacagaagtaactttaacaccagaagcttttgcgcttacagttgataatactctcattctagtgacacacttttcattgaatcctaataataaaactatgaaataaatttaaaaacaaaacacccatgactctagagagaaaattactagaattaacccttctttcaaatagttatattttgaatcagttcaaataatgtctaaggactataaattggcagcaagtcaggatcttttacttctaatcaaaatatccaaattattaacatcccaattgtttatattttattgtgataacagcccatggcattatgaaataaaaaagaaattagtactacaccttaatttgttttgctgaaaacttaaaaaattttacttccaaaatgctagatagttttctagaatgtggttttgatagaatgcaaagaaaacatgatctggtacatttaatgtagtgaggttgcctgatataaaattgttaatatccatggctattttggggagggccacgcaaatgagattctcattgtcctttggttcttcatttctttttaattgttaaataatcttgaccataagctgcacatggactggcattttcaattcttttgaccagattgatttcttattttaaaaataagtttatttatatattttttttctttaaaaatgcagaacttcgagatcaaattgtatctgttcaggaggaaaagaagattttagccattgagctggaaaatctcaagagcaaactcgtagaagtaattgaagaagtatgtatctcaggcctgaaaggcaagggctttagcattttcaaggtgtttggggatttgctaagttaagaacttaatattataagccaatttctaacatgagaaccatgtaccaattttaatcttctctcctcaatttcagacataaaaaaaggtagaggaaataagatgatgaagattcatgtacccactagctagcttaataaataaaattctgaaatagcatggacatgtttcctgttgttcccccagtttttgctatgtaaggcaaatttgtaagaatagtagctactatttcaagtcatatattttattgctgctggtagagaaagaagagcatgttttgcttttccggtgaatgactggttcaattgggaaggactgtccctctgtgcatctccaacacaggcatttatgataggtggtaggatgggttcaagtggttgtttacagaatctttcttttctggtgttttgttttgtttgagacaagacctaactctgtcacactcaggctggagtgcagtggcatgatcacagctcactgccgcctcaacctcccaggctcaaatgatcctcctgcctcagcctcccaaatagctgagagtacaggcatgcgtcaccacgcctgcctgatttttaaaaatttttatagagatgtgggttcctgtatttcccaggcttaccttgaactcctggacttgaatgatcttcccaccttggcctcccaaagtgctgggaccaccaatgcaagccgctgccctggcctctttttccttttgaactgtctttcagaacaagaccctcacaattgccttttatttgcacgaggcttcaaggatttgccttcacagtcttgattctggatttaatttgtatcagtggttcttagattctgtagcccagcacttcccaactgatgtgccaactgcagcttgataaagtgacttatgagcatgccaacgtattgatcctgtcagtgagcagcctcatccagttacctcagtttgcacacacatattgtcattttcttggaggccatgatgtaaaaaaggttggaaagcagtgtctgccaacttcccagcctgagctccttttattattgtggcaaaacattgtaacgaatgggaagaaggaagatgatattttggaaaggaccttaccgttggacaatgtgtaccagttactaatttaaaccaaaaccaaaaataaagcctacactaaaagaaccagttaatagattatctggaggtgctgatggattcagagccactttcaggaccattatctttgtttcttagtgtgctctgttcctcagctgtgattatttactgatgattctctcgcttcccacttacaggtattattggaagacacttcaacaattacttatattatggctgatacacacatctgagaaggcataatgaacagaataatggggctgagttcagtggctcacgcctgtaatcctagcactttgggaggccgaggcaggaggatcacttgagcccaggagttggagatcagcaagacctcctagcaagacctcgtctctcaaaaaaatttttaaaaatattagccaggcatggtggcatgtgcctgtagtcccagctactcagagggctgaggtgggaggattgcttgaacccaggagttccaggctgcaatgagctatgatcgtattaccaccctccagcctgagtgacagactgagaccctgtctctaaaaaaattatttttaatgaacatccatatacctgctacccaacttaattcacagaatattagcatggtgatgaaagccctggtgtaactctttctggttgcatactccttgctccctgcccagtttccctaaacaactgttattctgaacttggtgtttatcatgtcagtgcatatatttacatgttcactacaatacatagtattttgagtgtttttaaatattataaacatgcctgctttctaaattcaatatatttgagatttatcttctaccttgatatatgtagctttactttatgttctttttttttaaaaaaacttttctatagtattctctttcgttgatagacatcaaaagttacttcagaaatttaaatttttgtgggagtatttatatgtgttttatttaagccaagagtcatcagagttcaaagtcttattttaaaagttcatgttcatcttacttaagtcaaaaataatcagcatttttattttattgtattttatttaaattattatactttaagttctagggcacatgtgcacaatgtgcaggtttgttacatatgtatacatgtgccatgttggtgtgctgcacccattaacttgtcatttacattaggtatatctcctaatgctaatcaacatttaaaatgaataccaaaattgagtatcggatcttgactaaatgattcttgtattttctgggtgatctttagttggatttttgcattaaaaatatgaatcatggctgggtatggtggctcacgcctgtaatcccagcacttcgggaggctgaagcaggaggattgcttgagcccaggagttcgagaccagcctcggcaacataggagaccccatctctatattctttgtttttttttaattaaaaaaatatgtatcatatacattggatggctagcatactgttatgtttaggtgccagtgccaactggaatatataaataagttctgtaccaggtatacatcctaacttaaatagctatccttgaagctttaaagaagagctttaataaaaagtcctaacacattgaaaccaatttctgctttaaattgtaacttcatgttgaaagttgaacagcaattgagtatcacacattgccatatgtcctgttttacaatttttggtgttttctcccctcaaaatttcacatttttaggtaaataaagttaaacaagaaaagactgttttaaattcagaagttcttgaacagagaaaagtcttagaaaaatgcaatagaggtaagtctgtccagtctttttttctcaaatacgtatgcggtgtgttctgtttgcatatattgtgtgtcattttacacctgtgcctaaatatgactgtaaataaaatcttctcctatattgtgattttctagcattgtgtctctcccatttccattgttttattacccaacttagagtctggggacatctaaaagtgatttcacttgaggaacaaggaacccactcattttgaaacttcaaaccgaaatactatttctgtcttacatatatccagggatcatggcctttttagctctcccctcagcatttatatgtttggtaggttatttagtaaatctcaatccagaagaggttaggctgtctacataaaacatgtaacattatgtgatgaaattttaaattaagaggatgtggaaaaagggataaaggaaagtaagagttagattggtatacaaagtgcatacttgttctgaggtcttgcacatttcctgcctgtgtgtttgaaatctggttctgagctgtctgacagtcagtgcaataagagattgatgatcatttaaatgaatcacatgaaaatgaacctaatgatcaggaaaagcagacctgctctcctggtgagagggaagtgtctccagtggctatatccagagaaaactttgtgtactttgggcaacagtgactttatccatctagttataaaacacagcatcagctctcatcggggctgtttcatgtatctcccagtttaagacaaggaagtgatgccaaagtgtagttctgcaaaaataattctggaagtggtaagaagaacttaatatactttctgttctctctttttccctcagtcactctctttccttgtttagaagctgcaacactaacaggaaacctttgcgacccagggccttccctattgttattggtggtagctgtcaatctttttgtgattcatcaactgggaattttttttgtaaataaaggaccttgtagttaaatgtgggcaatatgctggattgtaacatttctccaagtctttctgtatttaaagatagaaatggtgtagaattttcagtcttgattcactgtgctaggaaaagggttctgcaaggattaatcatgtagatcttgccttcagagagtcccctgtctaggaagagagaaaaattatataaataaatacctgactaggaccaacctgatttctttcagattccaagtcagaagggccaggacacgtgaaaattccctttttattatagtgttctggacatagaaaagagagtcaattatcttgcctgggccttcagatcgtcatagtgttctttgttttcttcatgaaatttcttgtttaaataggcttgaaaatcatttagctctcagggacctataattcacaccaaaaaatcaccactcttattgctttacttattagtctttcatctgaagaggctgtagattgagtacagagtttgaaattctatgtcattacgcagcaaaccagtccttaagtcagttaggattgaagtgccctggtggagcagtgtgtgaaggcagctgttaagagagccttttgaaagattttgttggtatgactcagctcagggtggaggtgactcaccagaagtggatggacagtgtgctgtctgcccagcttgtgcctaatatctaatggtatcgtcactccctctgtcctgtcattatcactatttaacaaaataggccactgaatgttgaaaatagcaaagaatttatattacttttatttgacaggaccttttgaagctttcggtcttgcagtaactccttggtacaaagctctgattctttggttctgaatgcatctaaggctgtttctctcctttgtaaatatggagaacacttaaaaataacttatatgtccaggcgcggtggctcacacctgtaatcccagcactttgggaggctgaggtgggcggattacttgagatcaggagtttgagaccagcctggccaacatggtaaaacctcgtctctactgaaatacaaaaattagccagatatggtggcacgcacctgcctgtaatcccagctactcaggaggctgaggcaggagaatcacttgaacctaggaggcggaggttgcagtgaaccaagattgcaccactgccttccagcctgggcgacagacatagtgagactccatctctcaaaaaataaataaataaataaataaaacatatatatatattatatatataaatcattttatatatttatatataaatcattttatatatttatatataaatcattttatatatttatatataaatcattttatatatttatatataaaatatttacattttatacatatgtatatacatatacataatttatacatttatttacatttaatattatatataatacatatatcttttatacataaaaatgtatatattcaggtagtatactttttttggtggaaaatttagattcatgtaaggaaagaaaaaaatctcaacctttacaatccagagataagcactagtaccattttagtgtatattcttccaatcttaaaaaaaactctctctacatatatacatattaaatgttttgttaaatatgtttatatatatatttatatatatatggaagacagaggaaataccagtaaaaggaatctctttatacttgctggtaccttacaaacccatgaacatccctctctactcttacccctcccttgaattcttattatttcctttctttcatttgcagttttgccaaatatgtctatatctctaaacagcattgtttaattttgcatatttttgaactctatgtaaatggaatcatttttcctgtaaccttctgcaactttttgtgtttgtgagattcatgcatgtggacaggcatagctgtggtatgtttgttttcactgctatatactattccattagatgactacactaaaattattttaagtagtatcctattggtagactttgggctgtttccatatttctgctattctgagtcatgctgttataaaaaatgttagacatgtcatctggtgcacatgtccaagagttgctttaagacacatgccaaatgtcaaattttatcttcagttttttttcactgcataccaaatttaataaaaccatgctttaaaatttttaccagttgcctcttggatgggtgtaagaagtgtttttactctgcatttccttgattcctaatgaagatgagcatctttccacatgtttattggccttttgtatattttctattctgtgaaatggctgttgatgtgctttatctgtggcttttaaagaacaaaaatgaattcactttgcactaatttttgcaatctatttttaaaaatacatcacagatgtctttccatttactaagtatgcttctacaatataattttgatggcagaataatatttcttgtactacaatttactcattcttctgtgttagagtattatgtcatttcacttttatcagcaatgaggtagagagcatccttgcaaccaaatgtctgtatatgctcatgtgttacaatcttagcatatgcattcctggaagtgggattattcaaagtgtatgaatagttttagatttttgattcacgttgccaagttgctctccaaaaaggttttatcagtttgtatgccaaccaggaatgcatgagggtacctgtatgctggtatgaaaaatcttttcaacactgtttttcatccatattcctgattatttgtgtgacttattgtctgggttttttttttcctttatcttcttaagtgtccatgttagctgtagaagagtatgaggagatgcaagtaaacctggagctggagaaggaccttcgaaagaaagcagagtcatttgcacaagaggtgggtatcttgtaaaaatcttattttttttcttgagacagagtctcgctctgtcaccaggctggagtgcagtggcgcaatctcggctcactgcaacctccgactccctgattcaagcgattctcatgcctcagccccccgagtagctgggattacaggcacacgccaccgtgcccagctaatttttgtatttttattagagatggggtttcaccatgttgaccaggatggtcttgatctccttatctcgtgatctgctcgccttggcctcccaaagtgctcccaaagtgagccaccgtgcccagccgtaaaaaccttttgaatttttgttttgtaagggaccttgcagacgacatatcagacaaattcttgaggttgaataagaacttaccagtttgaattaaggatctgctggtttagggaggcagatatagaatagtatcaagttcattgtcaaaagatctgggctcaaattttggccatgtcagttactagttgtagtagtgtatgacctctgagcaattcttcagcctctcagggcttcacttttaccatctgtaaaatggacaataatacagacctgaccaagtggattttaatggcaaaatttaaaaaaagtgttgtataaactataaaatgctatgtaagggaaaggaattgcatttggagacaacccatgacttgtgatggaaagtccaacttgggtacaagatgcctgtacatttcaaataggcttaaaatctgggatgtatctccatataccatctcagataacagtattatggtatcagtatttctcttcagccattgtgcagtgctgtcattatgccaggaagttcttccactggctgtggaacactgccatgtagtacattcattatctcagcgtttcaccagcctactgatcttcctcttatgttagagatcagctttgaatctcttgttccggcttacctgttgacatgcagtcgttgggtcttccatggccctggggctcatccagggggatgaggagttcaccaatgggctaaactcaaaagctggtctgcaatgagatctccatcctgtgggtgtagtttgaatttgtgtgcatactgtaggttgaaggaagatagctcaggaaatgtaaaacagtcctaggtagaggtatccaaggcatagaaggaagacaaagcatggcattaggggaatgacatttgaaaatccaatgatggttttgtgggggtctttctgtgcttgagcatagctgtgctagcagtgaactctaccgaaggtttaggccaagtagatctgatttgaaatattatgattcgttttatttagagagtttaatgaaaggtgagtaaatatttttctcttattacttggaagaaagaaaaaagaattgaagtgtgtcagagctctctggaaaacgttggagcaatataaataatgcagtgaaataaacagtggagggggaggggaagcagggataatgtgaagatgcctttattgcaaaactggaaaggtcggctgattttgacctgaatagcaggtctcatttcaagacatgttcagttttccatctgttgtttgcacaatgatgttagaatacaaagcagctcaaagaaaaacttgaaggccatgtggtagcagagaagacagatggaagaagcaaggttgcagtaagaagacaaaaatgaatgattgactctgctgttcacctggtcttcagtcttagtggttggtggaaacaataatgctgacatgttaacccagaatgagaaggtagaagtttgaggagagaaagaaagcaagagcaatggtacttacgttattggcagcataaatatttgcagtggcactcaacaattttacaatatctagattcaatctacacaatagtgagaagaaaacttttttttaaaaaatagcaccacgttggaactagtatattttcctttttacaaagtttatgcattctcaggttttcaacaggtaagtactgcacaaagacacataacttagtttaacaacagagtcccattcttttgcattttacttaccacttagggcatgcagcaaacatcttactgtgccagacactgtgctgacattgggaatccagtggtgaagaaagcaaatgtgagccctaccctcttggagcttatagtctagagccttagaaatcaatttttaaggttaatttactttatatttttaattaaaaaggagtatgtgtgccttgcacaaagatacaaatattttctaaatgtataaaataaaaattgaaagttaccccccattcttaactcccgctagttcatttaaaaaacaaaaccaaaaacttaatccccctcaacaagaaaactatcagttgtcttcataactatattaaaattttaaatttcttcaacataattaaattttttgaccaggcatggtggctcacgtctgtaatccaagcactttgggaggccgaggcggggggatcaattgaggccaggagttcaagaccaacctggccaacatagtgaaaccccatctctactaaaaatacacagattagccaggcatggtggcaggcacctgtagtcccagctacttgggaggctgaggcacgagaatcacttgaacctgagaggcagaggttgcagtgagccgagattgtgccactgcactccagcctgggtgccagagcgagactccatctcaaaaaaaaaaaaaaattactgtaatcataatggtcacccaaaacaattcattttaattaaatcactggtctgaagtttaagatactgtgatgaaatattgattactctttcttagaatgctgaagctgcatctcacccttctccagccaagtgtacatgcacatactcttcctcactgcagtctctatacctctcactctcacacaaatggaagaagaatgtgggtttcatgtatatgcaattgtttatttacctgtttgactttgtaatgtgttttaattctgcagaagaaccctgtcgtagttttgtaggcttttcataaatccctaggcaaagaaggaaagcttctgacctttttttccctttcataggaagacatactgggaagaaaatgttagtgttttagtatactgtattcatgacttgactttgatgtggaagtcgatactgatcaagagcttaaggattgtataaatcattaaagctgtggtcttgccacatggaggttgatggaaaatatttttgtcctgagttttatttgctgactttttctgttacatgatgggtgaagttgttgaacaaactaatatgagggctttagcaaatcattttgcagttcagagctttcagttaagttataatgtaaattttaaaatgctgttaaaaatctgaaaaggtgaagctctattataaaattggtaggccagatttcagagtttacaaaaacatttcatacttggaatcactcactggccaaattgggtagagtgttaaggaaaagaaataacaggtaaatagaaatcaatattattttcaatcatgtaaagttgtgaggatttgatgaataacatataaattgcttaatacagtgctcaataaaatatactgtctcccttctcccctttacccttctactgttaactacttttatcactagggagaaactaattagtttaaaacaaaacattagatctagcaaatagtagaggaacttagccagatggttaagagcttgggcatgtaaatcagatatgggtttaagtcctggtcttgtcacttacgtgtgttcttgggaaagttgcttaacttctttgagcctcagttaccttattagtaaaattagatgatagtagtgtctacttgatagtgttgttttaaggattatatgatataatgaatgtaaaatgattcccaccatatctatcacatagtgtttagtaaatgttacctattcatagtagaagcactttaataggattgatgtaaggattaaaataatccatataaaatatttagtggagtacacaaggtaaattcttgagaaatattagctactactattaatattaatgtatcttaaagcaataataaaatattaaaaactgaagagtaagaccagcttattgtataaatatcttgttggggcaggagtaaaggtattaaagattatataaaaggaatgaaatcatagcaatcactacttctaaaacttatagaagtcagaatttgcctttaatgatttaataaaaattccatgtacttttcttttgctgaagttacagttgaggaggtatgtgagattgattgatatatacattcttgtaacaaacttttgcagatgttcattgagcaaaacaagctaaagagacaaagccaccttctgctgcagagctccatccctgatcagcagcttttgaaagctttagac

SEQ ID NO: 9798 - DNA, 270 bp, Homo sapiens
agattgaccaaggttgaaatgaaggaaaaaatgttaagggcggccagagagaaaggttgggttacccacaaagggaagcccagcagactaacggtggatcactctgcagaaaccctacaaaccagaagagagtgggggccaatattcaacattcttaaagacaagaattttcaacctagaatttcatatccagccaaactaagcttcataagcgaaggagaaataaaatcctttacagacagacaaatgccgagagattttgtcaccgcc

SEQ ID NO: 9799 - DNA, 1621 bp, Homo sapiens
gtcacaccgctaaattatgaaagaaataattatcaacactttctaattacctaacaaagtaatttgggattcaccgtggggctggcgggatggggaaccaacatccacttacagccagggtggtgtacgccacaccgcgagggactggctgtattggtagtagtggcgatggggtgggggctcttgtgcacttttttgtacctagcaccccagaagacagaaggagcagcggcagatcttgcctccactagccctgccccctaggcctggtggcgcgcgctttggccactggaggtgaggaagatcctgggtggcaacgagagacgtctacacatagataagggagcctaccacaggcctgggtttgctgcgggtttcggtgtcccccagggactcctaaactctggaagtcgcgctagacctcaggaggccggaaaatgaccacctggcgtcggtggctccagcagatctgagcccctaggccccctgggctccacgctgagccgcgctctcggggcgagtgagcccggggctctccgcgcatggggagtggagaagggagggggaggaggaggaaggctgggagggaaagaggatgtgtgtgttgggggagggggcggtgcagccgcctttcctgggaggagaagcgcgggttcctggctctccacgcgcactgctttaatcagacccgtgcagcctcgagctggagtggccagctgggcctggagcaatgcgagcgggccccagggagcgacagcggcgttggcgcagcggccgagtgagtgagttcgcagggagggcccctaagccccgactccagggatgcggcagagcgtaccggggaggcgcggccggataggcgctgcgctaggcacaaggctcttaggagaacctctgtctgttggccgcctcgggcgcccccagtgcgcgactccgcgctccagaggcagaggtcagtctcctcctgagccgccctagctctgcgccgaactgagtggcagcgacgagaagcggtcccgggtgtccggtgttagggaccgctgaagggtggggacagtggtaggggggcggcggcgcggagccgctggttggttcctggggaggaaagcgcgcgagggaggcgggaggccgatgagccgcgggccgcaggggccccggcgcagacgccgcagcccattgtgcttcctgcccggcgcgctctgttgcagaggagccccggccgggaagtgtggatgcgtctctcccgaggccgggccgcctcgcccgctctagtccagcggagcccgagcgcctcggaccaatccccagtgattatgcaagacagcggaccaatcagctccgccagctcatgaatatttatgaccttcgctgagtcaaagctttgaaccgagtttggggagctcagcagcatcatgcttagacttttcaaagagacaaactccattttcttatgaatggaaagtgaaaacccctgttccgcttaaattgggttccttcctgtcctgagaaacatagagacccccaaaagggaagcagaggagagaaagtcccacacccagaccccgcgagaagagatgaccatgaccaccatgccagaaagtctcaacagccccgtgtcggg

SEQ ID NO: 9800 - DNA, 4937 bp, Homo sapiens
tacacactcacttgttgtctaaaagtggctttgtttgaatgctgtacaaaggtaaatgactcaaacgactgtgttggatagatatgtaccttctctcttcatatatccaaagacagtggttgcaggcaacagcaaaaattaaaattattacagcataatgaaaacacatgaatgttattatctgactctaaatattactgactttttctttttcagagaatattttaaagtgactttgttttatcttagtatgcctgaaaaacttatctaatttaattaaatattttttggtcacttttaaagccacataactcatcagaatggttttcaagtctgtccacattttgtgggacatggaataggatcttactttcatggacatccagaaatttggcatcatggtaagaaagttcatttggaggctgtttcttgatcagagatcaagatgtggcagctttgaccctgaagctcttcctctgactttgaatctgcattatcaaccttgtgtttgtgtgtgtgtttatgtgcagggggcatgggaggggggtctgcttaattttaaccgggacattactgtgttactggattagagcccagctgtttcaatcccaaaataaggtttattttgctctctgtcttctcctgaagggtgcatggctggaaggcacaagggatgtttgtgtagaaaaagttactgaaaacaaaacgccactgcatcagtgtcccagcagcatgcacatatgactgtttctgtttttctttttctacccccttttctagctgctgactgttgtggttaaacttcattacatcctacacagcgttgacagctgatgtatttagcagcatgtactccttcgtgatttctagattatgcccacccttgtcttccttccccagaatctcttgtttttcactgcctgggtgtgcaccctatagtgagaagacaggggtgggcccagaggggtgggaggatttggattgaggtaggaggcagctcagtggagcaccctcaaggcaggtccacacctggacggggatcaaaggaaagttggtcctggggccttgacctgtgcccctatggacttgattggtccatagaaggactactctttcggacccatgccctcgaggatcgctggacacccagcaggtccaaaccctctttggaccaaagagcccccacctaggcagctcaagaggttcaggtgagagtgcagaaacggcttgtcagccttgtgccctacctggtgccaatgtctggagtgaagctatttgaagtcaggcccctgctccccacaacctgcaccaaaggaggcttccctcctttgcatccttccccaggacttctttgagtgaggggtgtgggcaaggcccaggacccagtagtaggctgggagacctagtagcctgggggacagggagagggggcgaggaagcctgacgtgtctgaaacaaccaggctgcccctgccaggccttggaaaactcttctgggggagtcttgacccagagcacagataatgcaaagactcaggcccagtagccccgtgtttaactcctggtcactatccaggactccagaaatctccacccttccttctctaaaagaagagaaataaaacgaccaagttttttaaaggggcctgacccctgtaatctgttttttttttctgtcctccccatttcctattctcaccccccatgttttttgttttgcagcaaacgacagtgatctacccatggaggagggcatggcattcactataggtaaattgagctcctcttccgagtgagtgcgtagctcctggtggaagcttttgccactggcctaggcccggcagtccggtgaaggaccaataaagccaatcagtgtaatgaaataattcggatgcactggaaatctgattaaataatatcctcaagccccatcttcctaaatcagatacttaccgacacatttaggagaaggcagccatccaacctctaattctgttaccagcataatgtggtgttgggttttttgttttgttttgttttttcattaacacccagtaactagacacgattatgtcccttgctccctgtcagcaagtggcatgtgctctctggtggcccgttcctggctgatcctgtgattggtatcaccaccaaattccagtcacctagggccgtaaagacatcctgtttctgactgtgggacttaatggagaagcaattagagtgaaataagaaaattgttatttgctgatgaatgaacatctcgagcatgtttttaaaatttaaatatttttttaaaaattggtatttataagagggactggtgtttgggtggttattatccacggggtcctaattaaagcttgattaaaatgcccttctttctctaaaaaattacgaactaggcaacttcatacattttgaatggctcagtgtttcctcttccaactgtttagtttgtagtatactatgtaagcaacatcaattatcaacccttgcaagatgacaacatgagcctgtgggggaagcacttgaggggagggaggagaaacttctcttttttaataatcagccggaaacaatgtttaacaagaatctgatgaggtcactgcagtaaatatttttcctcttacagagccaatcatcacggagggatcccctgaatttaaagtcctggaggatgcatggactgtggtctccctagacaatcaaaggtgtttgctttctgctctgttgcttttaaattgtatgggaaaggaagattggtccgacggcgcgcttgtggcccggccggagcttgcgtgcgcgttctgacggctgggtgctgtgttacaggtcggcgcagttcgagcacacggttctgatcacgtcgaggggcgcgcagatcctgaccaaactaccccatgaggcctgaggagccgcccgaaggtcgcggtgacctggtgcctttttaaataaattgctgaaatttggctggagaacttttagaagaaacagggaaatgaccggtggtgcggtaacctgcgtggctcctgatagcgtttggaagaacgcgggggagactgaagagcaactgggaactcggatctgaagccctgctggggtcgcgcggctttggaaaaacaaatcctggccctggactcggtttcccagcgcggtcaacgcatctggaggggactggaggaaacccccttgttggaagagattccaagagaagcacggttttctctttcccttgccctgactgttggagtaaaaaacctcttaaatccattgtatcagaggtccttacctctctgacagttacaatgatctttgtatctgaactttgcacgtctgccgaaaaatccgaacctgttgactgggatttttaagaatccgtttctcccttttgtgtattccatattggccggccccaaggatgctcgcagaagccagcccccaaccccagcccttccgtatctttcccctccatcgcggctttgcgatgaaagattagcccgcgaacagaggcattgattacaaacatgtccttggcagtggactctgggcctggccattcttcaggtttctgtcaatccagaaacgcgactttcctggacccctgcggctcttcctcccccgcccacatccagccctccaaggccagtccagaggtgaagtttgaggccctccccccacccaccccacacgcacgcacgcacgctagaccgtttgctgcactaggaattcgagcttgggccccactcgcccaggtgtgaacagtggctgattagtgggcggtctagtctctaaaatgacccctccccagactggcccttctcgcatcgggacccgcgcttgcacgctgcaggagccgcaaacgtcagctgttctggaaaccgagagggtcccagagagaggagatacgggcgcatttgagagcaagggcctacttggccgggactgaagcttgcgagttgagctccagttcggccggcagttccatcccgcttcaggaacaggaatccaagggcccacgctctgtctgccaagggccattcctgcccggagcaccctcctttcccttgcgcttgctctccggtacctgttccgcacctgagctcaagggcagggagaggccgggcctctggcagtccacgaaggaagccgtctgccttcggttatgattttaggaacaagtccaacgagggtgttcaagcagttaatggttgtgctaactcttgtttctactgaagcgggttttgcaaagctgacatcccttaaagataacttgggctttcggaagcggcaaggaaatggcacctgtagttgccaggacaggtggtgtcctcggccaggactaagagccagctcatctttgtaacattcataatacgggaaactgaggaccaggtggctcggaaaagagatgagttccagcttttacctaacacagggttctctcgtcgtcccccaacccctccagctcggcttctttgtgtccagggttgtagatttttggatagaggtgtttctgattctagtgagtctgagaactggaaaagaccaaggaggggttgatgatttacaaggtccatagaaaaactttttgtgtggtcggaagttggccaagcagaggcccacagcctgatgctactgccccccacccccccaaagatctgaattccctaaagatcaagagggttcagctggccttgggagatgtttgctggagaatgacttcagttttctcctaaggcaatcagattgcaaccattagcattgtatcttatctgcaaatcagtttactccgaggttccccaaggatagttttattaggaccacaggactttactaaccactgaggtaacacgctgcttgtgcagcaattattttgaggtggaggtatttatgggacaagtttataattccatttattaaagggactaacctaaa

SEQ ID NO: 9801 - DNA, 4334 bp, Homo sapiens
  SITE (3714): n equals a,t,g, or c
agttctgtcaggccaagcagaaggcagccttgctggagctgctgcatgaactctacaatttcctggccatccaagctggtgagtaagtcacgtaagtcctgagattcctcttgtgagagctatgggcggctgacccggttcatcaggcttagttacactgctgctggccagcgagacactccctggttgtctctcagaaggcatattcagaagccgagtctcaccttctcgcctcctcactcaggcacatcttttataagccttgtgtttgaacaaaacatatttgattcttgctcctctttaagggaggtcctggcatgtgaacaggccttcctgcagctgttcttccttcttggggatgcccactacctaatgctttgggggtctctgttggcatgggaaggggccaagccccaggtgttgtcaggatctgtgtccttcaccctagagggaccctctgaaccaggtggttggctgggcccgggagaggcctcttgcctgtgcaagtagcagatagtctgtgtagtgggccctggtgtcacatctggtcctgatcaccatgtggctgtgggacctcggacaaagtccctgatcctctcagggtcttcatctccctgtctgaccaagggctcttgggtctgtctgttctctacaaatgagagtcaagtgctgtcctctaaaggagggcattctcagcacctctgtgaaatgcccctgaaaatgcatccagaagatgcatcccctactgttttatttggtgaagttattccttgaggccagagataccacctgcattattatgtcctgcccgacgcctggcatccaggaggctctcaaaatcacttgcagttgacataggtgaatatcagcatgtgcgccttgtgttaaatgcgctggacacaagaaccagacagagcagttctatcttaagggatattcaagaggcgcctcttacctgtggggtcagaggacaggtcttaggattgtgaggtcaacccttgtctaaggtttcactgggaaattagggtcgggtggacttctcctgggccctcagtcctcagggtcaatctcatgagcatcagctcttctgcctcctccctcttgaaagtgagagatgagatggtaggggaggcatccatgagcacttggaggagaaacaggtactggggctcctgctcacagcatcataggaattcctctgtacggcccaggtgcttgggatgtcaattctgacctaagagagtgttccaaacctttgtgtctcaaatgtggtccaaggacccatagcatctgcatcacgtgggagctcactagaaattcagaatctcaggtctcatgccaaacccagtgaatcagagtctgtatcttaagatccccaggggatttgagtgcaccctaaagttgagaagcactgctcgaaattgggtcctagtagatatttctcctccatcctaccctccatatgtggtcttgccttatgccctcaagggccctggcacctgttgccctccgacaagcctggggggccgccttgaaggtacatatctcattgagacaggagtgtgcctcacagaggctccctagtagtcctcaaccccttccatgcctctcctgttagggatccgctgtgggctgggcactgtgcaggcccttgcagtgagatgactcagctccaggtcctgcctgcagggcccaaccccggcttggggtctactggaagagacaggccacctacctccctgaccactgggtgatataaaatgtgattagacaagaaccaagaggccagaagttctgggaggcacaatgccttttagctggagcagtcaggagagcgtcacaggaggtagcatctgtgccaggccctgaagcccaggtaagactggttacatgtatgtggggaaggacaaggcaaagcggcaggaaattacatctcgagtgggaagcagcaccttcatggaggaaggggaagatgagagaatgaagtttggaagtgttggttgggccctaccatagatggccttggatgccaggccaccagagcttgatctggcaggcagtgagggccagagaggctttgagcaagggagtatcatgctgagagccaggtgccaggaaggtgaatgcggcagcagcttgagtagcacagttaagcagaatcattttcaagtgttattgacaaaacaactggattgggaaagggagaggaggaaccgaatcgagaggccatctacgtggtccaggcaggcctggcaagggcaggaagagtcctagtgggaaaaggaggatgctagaagccacctgtgtctcaggggacccctggggtcaagatcaactttgaagtaggaggatctggctgtgttaggggaaggcgacaggcttcagttcagtttcaaagttttaaaatatgaccttcagctgctcccttccccagcatgcagaaacacactcactggccacccgaagtcccccaggctgtgctgggtcagggcagtcaggccacgcacacgtgttaaatagtgtatgcgtgcgtggccctgcaccctccctgctctcggggagtcaggcaaaccacagcacaggagcgaggaccaagggctatggcaggtcaccaaatctggggccatttcatcaaacaaaaggcccccaggggctgagggcttcccaggggagatggcccctgggctggaccggggaggttgggcaggactaagtgggaggctgcccagctccattcctatgggagcaggccctccaaagccactcgggggagctgccccttggcgtgctgtgctgaggccccactgcccagcacacagacatcctcttcctcctaggggcccctcaagacaatagacctggcattccaggtcgcctgcctgtgtcatgagtcagaatccccgtggtgcccatggcctccctgcctttcttttttctcaggctgtgtttatttatagtgccattccggtaccttccgaagctatctgtctgattcttttagggatcaattgcaaagagaccttgctattgggcagctttttagtcatttaatgcaaaatgccacactgctttgcaggtcaggttttaatgatctggaatcgatccaagctaagtggcttttgatcttgctgcagagtgaagatgccccacagaagccaggagccgctgggcaacatgctccttattagagctgatggcttgattcttgctgcattttttagtctgtttcagagtgatttttcctttgtgtttgagcatgtgtggttttttttctcctaggtaattttgagtgtggaaatccagagaatctaaaaagcaaatgcattcctgttatggaagcccaagaatatatagccgtaagtaggcttcagtgcttatacattcctgggagggcctggtgctttcctattggtctttcaagccctgttggggtttttgttttttgtttgctttgtggcttttgtactaggctaccttaagtaaaggtttggttaatggctttttgtgctagactaccttcagtaaggcagccatggtagtgactgccccagagccaggccgccatgtgcagtggggcggctcactcctgactgctgcactgtaggtgtgcctgttacctgcttctcccttggttcactttgctcgtcttgccttcggctttcaggagaaacatgctgtcccttctccccccgtatgattaccattcagactgcncaggggccgtctgatttcctgtgtggcctcaggatggtagattatagaactatggagctggtattccaggtcgcctgcctgtccagtaacttaggggtcatctggttccatttgcatttcacagatgaagaaactgaggcctggagagggtcagggacttgcctgaggccagaccacttgcaccggccactgggctcacccacccccagccacaacgctgttattcgctttaccctaagatgagctgccagctctctggcctgatgcttccatcctcgagagaatcatattcttttggccgcctcagacccgcactgttttcctgcttgtgcttccgcatcacctcctctggttatagcctcttccttggctttcatcaacccccgatttccttcctgccactttgctgtgcttttagcagaacagggttttggggctgtggaggacacgggagagggcttccttaatccagcagcagaataatgttccagctgctccgcccagacgccgaactaaccttctcccgcgccctcccacagaatgtgaccagcagctcctccgccaagtttgaagccgcactgacctggatactgagcagtaacaaggacgtgggcatctgg

SEQ ID NO: 9802 - DNA, 499 bp, Homo sapiens
ttttctgcacttcccctcctcgggagctagtttttatttgtagatgaaattattctttctgtatgttggttttacttactatggaaatcgcataaggaaatactggattttattctgaccaggcagtttctgcctcatttttatcactggtgagcactgttagaaaaggtagcaaaccctttcatgaggctgaaaggctgtatctggcggctcagcccagggggaggggcgtgtcagccaacagccaggcagccttgagagacctgtcccctgctggcagagcagcatcacttccccacttcccactctcggtgtttgtgggggtctctgttcaggttatagctcttgatattaaaacgtctctagagttttgttcttttcctctctaatccacccaaattactaattccatcagcactgcatccagcagaagcccctcgggcagctccacctcaagctggataactggatgcatggcacgattaaaatttgttggctt

SEQ ID NO: 9803 - DNA, 977 bp, Homo sapiens
taactttctgtaagacttctcagtgctgttagttttgtcttttaattagaaaaaagttccatggtttctatttcttggtccttcacatctctaaatgaatcagacccacaagtgaatggcacatttgttccctggccttctctgatctggacacactcaggctccacttgagtgagcccagacaggtaccctccaggtcctagctacagatgcgctccgtgggcagacggcattcagcacctgccagcgagggcttcagacgcagatatccctatttgtaaccattcagaccttcatcagagcatcagaaagcaggggctgggccatctcaatgcaggctttgtggagctaagatttcatggggcacccttggcctttctggagggtggacacaggaacaagcaggtggggacgtgtttcttggctttggtgaggctcttgctgaaagtcttattctttgcatggctccaggcttaccgagatcacagacgggcatttgaatttcagattcatgttctttcccttttcggtcgttgaagacggtgacactttgtgtttttctttctgcctttgtgctgctgaaaacgtggggacaggctgggagtgggtgtgttgtcttaatcaggccgtctcgttgtctggtaccgtctgtcctcctgtttcctttaggtggtagcagcctctgctgagtggtttgtgtgagttcgcactgaatcctaccacaatccttactcagatgagggctctgagattccacctaacgggagacgagatggcagctgctgacattctgccctgtctgcaagctctcctagctcttccagctctcccatctctgcaaactccgacagcagttgctcttcctctgaggaagctgagcgactgcatcatcccccgaccacgtcgcctctgctcagccctcttaatggccgtcattccaagggaaaggcaggagccaggagcctctgggatgcagc

SEQ ID NO: 9804 - DNA, 864 bp, Homo sapiens
gaattcattagtttaactggccaatacttgttgagtggcttacaagactatagtagttaaaagcatgagttttgttttatcacttaaatcctggcaaggacttattaaccattcgactctgggcagggttacttaatatctctgcctcacaacattttccgtatctctaaaatggggttgttcaacaagaaatatactcaagtttaacatggcaacaatgttcaccaaaatcactaccagtttcgtctttggtctgtctctggcattgcctatttcaacacgggcatgatcaatgtgcatgatcaatgacaatgtgatagcaagggtctccatcatatcaagacattgttacaatgtcagtaatacaaagcagtttggaatttattgttaataacataatattcacttccaaaaacaggtaagcaatttagatctaatctagggtgaaaaaacctacttatgggctttatacattgaagatgcatcccttagttgaatattatgacagaaaaatgttatcaatgctgacattaaaaactgttattatgtgccaattattaggaaattttaaataatttaacaggataagattaatagttaaaccgaacactaagaaagagagtattagctacttgacgaagaacattgtatattttttgagactatgaatttttataaaatgtcaaataatacaaagcaaaatactactaaaatgagatattataattctcatctttatggaactgcttagttctcatactcataacatatataaaataataattaagaattacagaggccaagcatggtggctcatgcctttaatcccaagcactctgagaggctgaggagggcagattgctc

SEQ ID NO: 9805 - DNA, 864 bp, Homo sapiens; identical to SEQ ID NO: 9804

SEQ ID NO: 9806 - DNA, 864 bp, Homo sapiens; identical to SEQ ID NO: 9804

SEQ ID NO: 9807 - DNA, 630 bp, Homo sapiens
aagttccgggatacatgtgcatgccgtgcaggtttgttacacagggaaatgtgtgcgtggtggattgctgcatccatcaacccatcactgaggtattaagcaccacatgcattagctatttatcctgatgctctccctcctgtggccccgccccccgacaggctccagtgtgtgttgttcccctcccaaaggtatatttttttacctggaaagtaaaaaaggtaatttactttataaactcaaacaacacttatcaaactcttccagaagcatccagttcccttgcaagttgtatttggttctactttttgactacaggttacaaattaaacatcatcattatgaattatataattttatcttatataattattattaataacaactgatgtgccagacactgtttgaagtgctttacgatgttattcaggttctcacaaccaccctgtgaggcatgtcctattatcatctgagatgaggaaactgagaaacagaaagttaaggtacttgtccaagatcacagaggtgtgaagcagagaggccggggcttacagccatgcagtctggctccagagcccacatcagaaacactccttaagcccaaagcctgagtaaagcacgtgaggactt

SEQ ID NO: 9808 - DNA, 630 bp, Homo sapiens
aagttccgggatacatgtgcatgccgtgcaggtttgttacacagggaaatgtgtgcgtggtggattgctgcatccatcaacccatcactgaggtattaagcaccacatgcattagctatttatcctgatgctctccctcctgtggccccgccccccgacaggctccagtgtgtgttgttcccctcccaaaggtatatttttttacctggaaagtaaaaaaggtaatttactttataaactcaaacaacacttatcaaactcttccagaagcatccagttcccttgcaagttgtatttggttctactttttgactacaggttacaaattaaacatcatcattatgaattatataattttatcttatataattattattaataacaactgatgtgccagacactgtttgaagtgctttacgatgttattcaagttctcacaaccaccctgtgaggcatgtcctattatcatctgagatgaggaaactgagaaacagaaagttaaggtacttgtccaagatcacagaggtgtgaagcagagaggccggggcttacagccatgcagtctggctccagagcccacatcagaaacactccttaagcccaaagcctgagtaaagcacgtgaggactt

SEQ ID NO: 9809 - DNA, 1490 bp, Homo sapiens
aaagaatgaactgtttatgaaagaaaccttttgaaagacagaatatttttgcctgtgggccaaagctgaggcaggaaaacaaagggctctttcaaaggcttagaatatgatggaggatggattctgactttccaactacaaaaataatgatgcttttagcatcaatacctgcattactccagggagttgtaaatatactttacagacacaggctgggcctttccaactttttacctcagtgctctttgaactccttaaaggggagtaatgttggccccaatttgcacactgagaaactgaggcagaagaaatctaagcaatttgtcccatgccaccagataacttataagtgaagtcaagaatagaacaaactgaaactgaatgcttccatgacacaggagcatctgccatctggaatagttccttctttttctctagttgatctctttcttttctgcttttatctttcattttctgattcattaactcttagctcttgtcaatgaattgaggccagtgtgagtgttgacatgtccatcagaaagtctgtgttggtccaggtgacaaagaatctacagcttgtatcagccagcctgtgcaggttgttgcagttcctttgaacaatattactagcaaaactcatcttgaaaacaatattctttcatcctaacctattttgtacttccagaaacactactgtaaagtacagatgctccttgacttacaatacagttatatcctgacgaacccatcataagttgaaaatatcctagttagaaatatattttatgaacctaacctattgaacatcataacttagcctcacctaccttgaatgtgctgagaacatctatattagcctataattgagaaaattaactaacacaaaggctattttattatatggtgttgaatatttcatgtaatttattgaatactgtatagaaagtgaaaaacaaaatagttgcatgggtactcaaagtatggttgctactgaatgcgtattgcttttgcatcgtcatgaagttgagaaagtctacgttggaatctacagcttgtgtaaaccagcttgtgcagcttgttgctgttctttgaacaataagatattagcaaaacttatcttgaaaacaagataaaccatcacaaattgggtattgtgtgtataaaattttacatttgtacatttaaaaaatatccggtgtttggctttttaaaaaaataaatggtacctaaatagttcttaatttccccttatgggtagtctcctagctgttaaatgtacatttatttactcattcatttttttatttgacagctatttgttttgaatttacttttggcacagcactgggctttgtaatgaatactgtacaacagatcaaaatcttatagaagattttaataaagattttataaagattttaataaagattaagtctttaagatttaaaaaaattttaatttcttttttttttttttttttttttttt

SEQ ID NO: 9810 - DNA, 402 bp, Homo sapiens
gccaggctggtctcgaactcctgacctcgtgatccacctgcctcggcctcccaaaatgttgggattacaggcgtgagccactgcacccggccaaaatttttaattccttaagagtaaaaaagatttaaatctttaagattttaaacatttttaatttcttaaggttaaaaaagatttaaatctttaagtttaaaaaataaaccctatttaaggaatgggaattagtgtctggttggttgcttttgtccagttgaagaatagccaggcacaggctcatgcctgtaatcccagcactttgggacaccaaggcaggaaaattgcttgagggcaggagtttgagaccggtctggaccacataacaagaccccatctttacaaaaaagtttaaaattatctgggcat

SEQ ID NO: 9811 - DNA, 1429 bp, Homo sapiens
gctgggttccaggttcccagggctggctgtgagctactcaagggcagggctgtatctcgtttcctgctatgcctttgtgcctagcacagtgccaagcacacggcaggtatctgaacagtgtgggaagagaaaaggtggaggggagatggttgggggtagactgtgagagtggaggtggctcaacgctcccacccccaacctcacacacagcacccttagcccaggcactgatcccaggagtctaagaagctgattagaactgcccatggctgcagctaacctcggaactatgccccaccacctgctgtcgtctccctgcccccactcctacttccctctctcctgcctccccaggggtccggggcagcctccccctcccccaccccatggtgagaaatcccaaagactcctgggcctttctctgctgcccggctttcccgcctcccctttttctttctcttccttctgctttgcctcacattcaatctctccctcccccagcctggtgaatccaaactgaaaaaaaaaaaaaaaaaaaaaggcccacacaacagcttcaacagtgaaaaataaccaatttaaggagtaatcgctgctgtaatgattgtctaagccctgagtcactgcagaaaatcggactgaagctctgggactcccaggctccctgagagtgtcatatgggtttttgtttttgtttttttaaatatccaggacctcagtgtctccatctgtaaaatggaaggaatattatcagcccaaaggaactgattgttaatctcctgattttccctggggctgggaatcagaggttaaggtggtccacacagttggcttgggaatcaccacgggacacattcttctaccacaggacccatgggagaaatgtggtgcctggcaggtgctgagagactcacagcttcgagggtctctgggaaaggtttctagagattgtggtgtttaactgagctgggaaggatgaatgggtgaatgagagctatgggaagtgatggagtgatggaaagtcagctctggaagagactagacacctcatcttgccctatgctctcattttacagatgaagaaactgaggcctgaagggcttcaggaactgctcaaagtcattagtggcagagcccaaattagtggcagagcccacattagaaagcaggtgccttgactcctgctccagtgctctttctttctttctttctttttttagacggaatcttgctctgctgcccaggctggagtgcagtggcatgatctcagctcactgcagtctctgcctcctgggttcaagtgattctcctgcctcagcctctcgagtagctgggattacaggtgcccaccaccacacccagctaatttttgtatttttagtagagacggggtttcaccatgttggccaggctggtctcaaactcctga

SEQ ID NO: 9812 - DNA, 14206 bp, Homo sapiens
aaggcgtccatgatgcatttgcaaacctccacccgcacactctctttttggaacatgtccagaaacggcagaaatttttcctataaataaagcaagcactctatatgcaaatgacacaagttattggaaggaaggaatctgtgggtctctttttctgtggagttcaaagaagcagaacagaggttcatctctctgagtcgggtcagatgaggactcctctgaaatcagggagaggacctgactgggcttgtaaaaagctgttactgggccgggcacagtggctcacacctgtaatcccagcactttgggaggctgaggcgggtggatcacttgaggccaggagttcaagaccagcctggccaacatggcgaaaccctgtctctactaaaaatacaaaaataaaccaggcatggtgatgcatgcctgtagtcccagctacttggaaggctgaggcaggagaactgcttgaactcgggaaggcggaagttgcagtgaaccgagatcactccactgcactctagcctgggtgacagagcaagactctatctcaaaaataaacaaacaaacaaaataaaaagctgttactattaaaacaacttatatgcattccagggattggtgctgggaccagttaacattttggtgagccatccaggcaacctttgatgaccacaagcttttctgggcaaggcagacttcagtctttttgtgattatattgatgagcaatggaagaagagtcagagtagagctgttcacagatggcctcgaaattggaccgcctggctctgaatactaacctcggtgactgtgtggctgtaagcaagttactctacctcttcctgcatcagttttctcatctgtaaagtgggaatatggtagttgctcccttatctgcggttttgctttccatagtgtcagttatcctcggttaacggccatccgaaaatattaaatagaaaattctagaaataagcacttcattcattttcatttttatttttattgcattttatttgtttgaaacagagtttcgctctgttgtctaggctcgagtgccctggtgcaatctcggttcactgcaacctcagcctccccagtagctgggactacaggcatgcaccaccacacctggctaattttttgtatttttagtagagacagggttttgccatgttggccaggctggtctggaactcctggtctcaggtgatctgcctgccttggcctctgaaagtgctgggtttacaggtgtgagccactaagcccagccccattcatttgaaattgtgcattgctcagagtagtgtaatgaaatctcacgctatactgttctgtccctcccaggttgtgagtcatccctttgtctagcgtctccacattgtagatgctacctgctcgttagtcacttagcagctgtctttgtcatcagattcactgtcatggtatcacagcatttttgtgttcaaagaacacttattttacttaatgatgctcccaaagtgcaagagtagcaatgctggcatattgttataactgttctattttagctattgttgtcagtctcttactgtgcctaatttatatatgaaactttaccgtaggtatgtatgtataggataaaacatagtatacacagcagtcagttctatctgcggtttcaggcaactcctgggagtcttggaatgtatattcctcctggataagaaggcaatactacagtgataactcctacttccccgtggtggtatgaaactaatgtgaggcaatacatgtaaagtcccagaacagtgcttggagtgtggtatatgtcgaataaatattagctgctatgattaaaataaaaaatcttacaatcttgtgagcacatgtaaatggaacctggaagagggaagtgaagggagagacagagaatgttactatacagggaataacctagattccctacttgcccagggcactgaacaaactcgaacagacatcgcaggatattttaaatttttgagggaatcatggtaaatctcaactgtcagacactgaaacaactactagtcaatgtatttcatagtttcaacattaggctgtgtgattaaaaagcaagtgccctgtgaaaatcactgtggaagagcaaagtaagagaaggctgtccaaagtgttttgaaggtttgagaagttgtgtaatgcccttacttatacatatcccataagtaaggaatgaaacagaaataatatttttctttcagtttttgtgtattattttttcaaatacggcttaatctattaggacataaatacttaagttgatcagacttaactactttataaaaggaactgctgaatatttcttttggcctggggcatcatgaaaacattactgagacaatgagaacctctgagccaggtacaaatttccaaagataattaagaaatcctacttaccactgagaaaagaactgagaagtcatggaagtgggcaataactttcttaattattaactgaagctgtaaaacaaacaaacaaaaatattatttttaaaaacttaatttttaaaaatttctttctggtttacattctctcaggaaaacctaaatttttttttaaaaaggcaatcacctttcataatttgcaattattactacaataaggtaagcctggattgttcaacaaatggtgaactgggcttagggtaggctctgtctcaagctgagtttgcccaatgactctgtacatcctacttcatagtcctggggaagtaactgagtctcagtctcagcttcctcatctgtgaattggagatcaaagcagtaaggactcaatggaatggttcgtggaaggtcctgagtgcagtgcccgcctttagaaagttctccattaatgtcagctattgttattccttgaatagtgggcaaactttttctataaacgtcctacagtccaccacaactactcaacactattgcagtgcaaaagcagccattgccaacattaaatgaatgtgcattaaatgaatttgtgccaataaaactttattcacaaaaacaagtggcaggctacatatagcctatgggctgtagttggccaatccctattctacatcatcgtgtggccctgtgtttcttgattattcactggagaggatttggacagagtgtgctggtagagttaaaggccaaggtattacccaaggatggtggcacagtctgtgaggtctgcctcaaaaatgcccagatactgatggttaccgcccctcactctgcgatgcacagtccagactgaaaggctgacagggccttggtccaggagagccaagaagatgcggtttctaaataaaatagaactctccacctctggttgctatcaagaaaatgtactgacaatttgtttacactaaaaaaactgctgtttcaataatttccaaagaaaatctctcatgttctaaaaacagaacatgaagaacgttatgtgcccatttcataattaggcagcttactaggtcagtcaagcaaaaaactaataaaggacttcaaaacttcatcataaacaatgctccaaggcataccattgtaagacactgcaatgctgtctggttaaaatagtttctgaagcataaagcacctaatccctttagaacaagaaattttttgttaacacttaagcacagctacacataaactgtgattttaaaagacaggatttttttccccttaatatttcattataaaaatgctcaaaaataaagaatattgaaagaattatacaaacacgcatttattcaccacctagattttacaaaagccagcaatttaatacatttactttatcatctcacttatccatccatttaatgatagaatttgtaaacaattctatcattgttttattattatttgttttattattattttttgagacagggtctttctctgttgcacaggctggcatgcagtgtggcatgatctcagctcactgcagccttgacctcctgggctcaagcaatcctcctgccttagcctccagggtagctgggaccacaggtgcacgccaccacacccatctaatttttatatttttttagtagtgacggggttttgccatgttgcccaggctggtcttgaactcctgggctcaagcaatccgcccatcttggcttcccaaagtgatgggattacaagcgtgagccacttcacctggctttaactttttattttgaaataatttcagacttgcagaaaagctgagagaatagtactgagaactcccatatattctttacccaaatccatcaatttttaatattttgccaaatgtgctttgtggttgtctctatgcaaaacatactattttttccctgaactatatgagagtagattgcatgaatcatgcccttaccccttaacacttcattttttatttcctaagaataatcatattctctgacatttccacttgctgtcatcaaattgggaaagttaacactgatataatgaaatctaaactaatttgatctcatctatcacccatttccaagctgttgattgtctcaattagtcttttctgacattattttttccatcttctgtgcaggatccagtctgagattgcgcactgcattccattttcacgtctctttagtctgtgttagttcacaagttcttccgtctgtctttgtcatttagggcaatgatatatgtggggtttttgggttttatttcattttatttattttatttttagtttagttcaattagagacaggatctcactctgtcactgaggttggagtgcagtggtgctatcatagctcactgcagcctctaactcctgggctcaaacaatccttccagctctgcctcctgaatagctggaactacaggcatgcaccaccacacctggctaatttctttctttttttaattttttgcagagatagggtcttgctatgttgcccacactggactcgaactcctggcctcaaataatcctcctgcctcagcctcccaaagtctggaattataggtgtgagccatggagcctggccatggtgatatttctgaagaattataaaatgcttctcaatctgcgcatgtgtgacattcccttgtgcattctcaactgaaatgctatacaggtgatgctgtgtctttcttagggtactacatctgcaggcacatgatggccttttgctcctcattggtgagatgaactctcattaactggactgtccactgtctctgctgtatagtcactattttcctcattgcaattgatacctgctcagtaggaagacctcttgagatatgcaaatatcctgctcctcatcaaactctcaaaatctctctcctcctcaatgcatgcaaaactcttcttcccagggttagcatacactgataattcttacctaaaggaagacaattcttgtctttactgggatggctacaaaatggtgatttttccaattctaccatttctttcacatttctcaatccgctcatctatttatctattcagcataaggatggactcttggattcctattttactcaatgggctataatctgttactgttctaattccatttgatcctcaaattgggagcaagtgagagccccttcaaaagctgctcttatacccttttcacatgggtatttcacattagtgggttttttttttttttttttgagaccgtgtctctctctcacccgggctggagggctcactgcaacttcagcctccaagggtaaggtgattctcctactatagcatcccaggtagctgggactatagtgcatgcaccaccacgcatggctaatttttatattttttgtagagatgtgcccagactggtcttgaactcctggactcaagtgatctgccctccttggcctcccaaagtgctgggattacaggcatgagccaccacaccttgcctcactgaactctttagaagcacaatgtgacctaatgtattcaacttatcatcaaataattcagagaaaaaaatgtacacacatacatgtatatatgtgtggaatgcgtgaatgataaagcatatgtagtaaaatgttaacagttggccgggtgcagtggctcatgcctgtaatcccagcactttgggaggctgaggcgggtggatcacgaagtcaggacatcgagaccaccctggctaacgcggtgaaaccccaactctactaaaaattcaaaaaattagccaggcgtggtggcacgcccctgtagtcccagctactcggaaggctgagacagaagaattgaaggtggaggttgcaatgagccaagatcgcaccactgcactccagcctgggcaacagagcaagactccgtctcaaaacaaaacaaaaacaaaaacaaaaaaaaacaaatgttaacagctagtaaatctggttaaagaataataggaattctttgagctttcttttaactttccaataagcttaaatttatttccacataaaaaaattatgcttaagcccaggaagtcgaggctgtgccaagcggtgatcgcaccactgcactccagcctccgtgactgagcgagaccctgtttcaaaaaaaaaggaaaaaacaaagttgatttaactaaaaatactcgcagtttacttactggtgacaacaatgaagacaacgcttattgagcatttaccacgtgccaggccactgtgtgagggcttcacttcatcctcacagtaactctcaggtagcactattactatctccatttcacaggtgagaaaactggggcacaacaaggttaagtaactgatcaaagggcacatggctaggatatggcagagctatgattcaaacacaggattatgtgcctttatagcctgacccatacaacacgcctatttaattcaacagaacaaaattcctaacaatgttgaaatgagaaatgcaaatctgttacctgggggtaggaatcttcaaatgcacgatctggagtcatgtgcttgatgacatctgccaaaacggtattcacctctcgtttctaagcaggaaaaaggaaccaaacctgaattagacactgtatggcaactgctgaccatgttcctgggggaaaggactaacgtattcagaatatatcacacaccttccaggaaatcaatttcagtattctgctgaaaataacggaagggaggaaatctcactcatatcacccggtctagtaccacagccccacacctagtcaggactaaacgctcttctcaaaagttctggggctttacattgtctctgctttcccagagtgatggttgaatcggccgtgcctctctccacctgcctgtcccaggccctccctcaggtgcctgcagagagaacagtgaagcactgcggaagactgcaggctcacccttacaagctgtctgacctaactgctcactgttcacttttgtcacctatagcaggagtcagccaactgcagcccaatccagcccagggcctgtttttataaggcccacaagctaagaatggcttttaagtctctataattaactgctgatttatagaaaatacaaaaggcagaagagcacgccagacaccatcacaaggatgcaatgggaaaaatccagtctttgcaactctatagagcaaaagacccaatttcttcaacaaataaattacagggaaagaaaggggaaggagagaaggagacagtttgagagagaacttatacatcaaaagtatcctaaaatgtctattgcaatggagaagccttattttcaaccagatttcaacaaataaacttaaaaaaaatgagacaattggggaaatcagaatattgactggtactgatgatattaaataattagtaactcggctgggtgcagtggctcatgcctgtaatcccagcacttcgggaggctgaggcaggtggattgcttgaggtcaggagttcgagaccagcctggccaacatggtgaaaccccgtctctactaaaaatacataaaattagcggggtgtggtcacacacacctgtagtcctagttacttaggaggctgaggcaggagaatcacttgaacccaggaggcggaggttgcagtgagctgagatcatgccactgcactccagcctgggtgacggagtgagactccatctcaaaaacagaagaaaaaaaaaattagtaacttttttccttagaataatgtatttagatttggtttaaggaagtgaaccctgcaacctgggcaacatggcaagaccccatctctacatctccacatgtgcctgtggtcccagccactcgggaggctgaggcaggagcattgcctgagctcaggaggtcatggctggagtgagtgacgattgcaccactggactccagtctgggcaacagagtgagatcctgtctgtcaatcaatcaatcaatggaatctttatatttttacaggtgtgctgaaatactgacagatgaaacgatacaatgtctgagatatgcttcaaaatattccaggggtcaggggacatggtaatgatataaatcaaacaagatctgtcataaattgataattcctgattgatgggtacaagggagtgcatatgttttacatttccataataaaatgtaaaataaaaataggaccaaaaaaaaccacaaaaatcaatggaccaacatttacctaatgctcaaaacgaggcaacatcaattttggtgttagaggccaggatggtgtctaccttcacctcctcaaaggctgttgtgacagggagaggcagttctgggggttctgcggggtcacttatttcctatttcttactctggatggtgattatatggtcataccttgtgaaaattcattgagcagcaaacttatgatacgtgcacttttttgcatgtgtgcttggcttagtctgtttgggcttctctaccaaaataccataaaccaggaagcttgtaaacaacaaaaatgtaattctcacagttctggaggctgggaagtccaagatcaaggcagatttggtgtctggtgaggacccattcctcacaaacggcatcttctccccaagtcctcatgggatggaaggggacagtgagcaactcaggacttattttattattatttttgttttgagacagagtctcactctgtcgctctggctggagtgtaggagtgcaatcttggctcactgcagcttctgcctcccacattgaagcgattctcctccctcaacctcctgggtagctaggactacaggcaggtgtcaccatacccacctaatttttttttttatttttagtagagacggggttttaccacgttggccaggctggtgggcttcttttattataagggcattaatctccttcataaggactctgcctgccatgacctaggctccacctcctaataccatcatcctgggggctaggatttcaacatatgaattttgggagggcacagacattcagaccatagcaatgccacacttaaatttttagggcttggccaggtgcggtggctcacgcctgtaatcccagcactttgggaggcagaggcgggctgattgcgagctcaggagatcgagaccatcctggctaacatggtgaaaccctgtctctactaaaaacacaaaaaaattagccaggcgtggtggcaggcgcctgtagtcccagctactcgggaggatgaggcaggagaatggcgtgaacccgggaggcggagcttgcagtgagccgagaccacgccaccacactccagcctgggcgacagagcgagactccatctcaaaaaaaaaaaaaaaaaaaaaaaaacttttaggacttgattaaaataaacaaattactctggcaagggttttgaacccacttctatcttcttctaaagtctctgctctttgagaagcccagtattcccctaactgtggttctagtctgtgcctagggaaagaaatatttgcttaggaaaaaaattacatgccagtcaaattgtttgggaaatgctgcttactagactctgatgtacagtcgcaatgcactttagcatgtaagcatctaaggtatcctatggtaaaaaaaaaatggtttaactttgtgtaatgctgcattttccaaacttaaatgtaaacatggaacagttattttttgttatagtacacatattaatgctccatcacgctttattatgaagaatgcaatttttataaattacaagagcaagtaccgttgtcaaatgcctcaatacctaaactaggctaattcactattataaacatgaaaaaatctaattctttcaaaaacaataccacagtcacacataccgtgaaatgcttgcaggtgtattccacccacacttcggcacaattaatgtagtcctacaaagagaaaggaaaacatcttaacattaagtacaacatagtatgcattacagcaaacaggaggcttcagctggctctgttcaatggttggaaacgggaatttccttttgctaattactggcttaaaggctgatcttttatttaggaatatcctactaacgatattttcaagcctaaatcttacgaactgttatattttggatgcccactataaagttaactgatttttcataaagtttcaaatatctgtaatgttatgcattttttttaagttgtattttttatggcagttctgaacgcatgatcatgtaattttatacttttagcacatcttaaggctgtgagaattgaatttttaaaaaatcaaagaaattacatctttaaagctatccattctccattacaggtaaacaaataatacaattataataaatagatttctttagggaaaaatgtataactaatgaaaagataatttttattttttagttcaaatagagacaggggtcttgctatgttgtccaggctggtctgaaactcccagcctcaagtgatcctcctgcctcagcctcccaaagtgctgagattataggtgtgagctaccatgttcagcttggaagggtaattttttaaaagagcagatgccaaaacttggacaaaaagtggttgatttaaagtttaaatggcaggccgggcaaagtggctcacgcctgtaatcccagcattttgagaggccaagatgggtagatatttgagacagcctgaccaacatggtgaaaacctgtctctactaaaaatacaaaaattagctgggtgtggtggcacacacctgtaatcccagctactcgggaggctgaggcagaagaatcgcttgaacccaggaggcagaggttgcagtgagccgagatggcgccattgcactctagcctgggcgacagagcaagacttcatctcaaaataaataaataaataaataaataaataaaaataaaaataaaatggccactcacctgtgggttcttcagcttagtgatgactttccaagcttcgttgagaatctgaagtcggtcactctcaggaggatcagccaaggccaagtttaatcccagtgatcgaaaaagaagatgctaagaaacatgtcaaaccatcatgttatggaaattttaaatcaaattaacttgaagctcaaagaaaagaaaagagaaaaggttgtaatgtttaatccttcttggggctaatcttccaacaacctccttctaaagttctatcacacatatctgccccagctacactgagaggctcacacagagttagctccatctgttggtctaatgtggggccataatattctactggacaaagtttttcataaataatgaatgaagatatatccttttgtttgttttgagacagggtctcactctgtcaccaggcttcatgacataatcatggctcactgcagccttgacctcctgggctccaagcaattctcccaccttagcctcccaagtagctgggactacaggaatgcaccaccacacccagctaagttttgattttttgtagagatggggtcttgctgtgttgcccaggctggtctcgaactcctggcctcaagtgatcctcctgccctggcctcccaagtgataggattataaacatgagccaccgtgcccagcctgatatattcttaaatatgttagaccaaagtctttcttaaatccttcatagtgagccaatctgatagatttagggctcatgggggcctgaagcatagcaatcacacagtgtctgacaatcccaacctctaactcatcttccattgcgttcctcagaaacagagccttcgcctgtgttcctgctggcccatgctgttcccaaaaccggactgtctctcaagagctatcagatacacaccgcttatttgtgtcctactgagcatgaagtcaagagcctaccttggggaaaccagattcatcacactctttaatcatgccaatgaaatccatagaccttgtggcgatgaactcagcccggaaggcagacatcacagaattcaacagcaaggcactgcaagacacagatccccaagtcagcctggcttctcctcaatcaaagttgctttaatttttgaatatatattgccaggaaggaagactaacagctctttagcggtagggttggggaaaaacaaaaaatcagagtaaaaaggtaaactggagagactaacacagtgtcctgtacatatctgcaactcaataaatgttgaattaactggatgtttagatggatggatggctagatggcagggtggatagacagatcagcaagtgatccagttcatttaaggagaagaagagcgagcattcaataagctggtgcactaatgagacagaacattaagtaacgatattgatccatgttgtaaatatatatccacatcgtttatgcaagagttttggtttttttgtttttttttttttgagatggagtctcactttgttgcccaggctggagtagtgtcacgatcttggctcactgcaacctccacctcccgggttcaagtgattctcctgcctcagcctcccaagtaactgagattacaggcatgcgccaccatgctcggctaattttatgtatttttagtagagacagggtttcaccatgttggccaggctggtctcaaactcctgacctcaggtgatccacccgtctcagcctcccaaagtgctgggattataggcatgcaccactgtgtctggccagtttatgcaagagatttcttagtaaagagatcttatgttataggcaccaggcacaggggacacagtggtaaacaaagcccatgcaaggctgtttccatgtatctaccactaaaaggaaagcagagagacaacctcatattcgtgagagtcagggagatcaatttcatcctagcccaaccacctaccacagccccatggggaaataactattattattactttttttcttttgttttttgagacagcgtctcactctgtcgccaagctagagtacagtgtcatgatctcggctcactgaaacctctgcctcccgggttcaagcaattctcctgccccagtctcctgagtagctgcgactacaggcatacaccaccaagcccggctagttattgtatttttagtagagatggggttttgccacgttggccaggctggtctcgaactcctgacctcaggtgatccacacgcctcagcctcccaaaatgctgggattacaggcatcagccaccacgcccagttgaaagaactattattactcccgttttacagatgaagagacagaggcacagagaggtcaagcaagcggcccaaggtcacagggctaagacagaacagagccaaggtctgaggccaggcaaccggactccagcattctaaacctccatgcagtcctgcctctctctcttcagctcatacccaggtaagcaggccaagctcaaaaatagcagccaacgccattttcaaactcatgctttatgaatcttaaaatacttacttgtttcctagtttcttacacctttccatcatctcggtcagcagagcctattatgttaaaaataataataattaaaaaatcaggttggaggagctaaagtaacatttctaagagatttccaaagtcgaactctaaaatgaatgtagccacatgtccattaagataattctcagtgtctggtagggatggggaggcttggggagaaaaaaattcactttcatggcatttagtgtaataaatagaaggagggggccgggtacagtggctcgcacctataattctagcattttggtagaccgaggcaggtggatcacttgaggtcaagagctcgag

SEQ ID NO: 9813 - DNA, 147 bp, Homo sapiens; identical to SEQ ID NO: 9754

SEQ ID NO: 9814 - DNA, 610 bp, Homo sapiens; identical to SEQ ID NO: 9756

SEQ ID NO: 9815 - DNA, 610 bp, Homo sapiens; identical to SEQ ID NO: 9757

SEQ ID NO: 9816 - DNA, 612 bp, Homo sapiens; identical to SEQ ID NO: 9758

SEQ ID NO: 9817 - DNA, 375 bp, Homo sapiens; identical to SEQ ID NO: 9759

SEQ ID NO: 9818 - DNA, 873 bp, Homo sapiens; identical to SEQ ID NO: 9760

SEQ ID NO: 9819 - DNA, 375 bp, Homo sapiens; identical to SEQ ID NO: 9761

SEQ ID NO: 9820 - DNA, 641 bp, Homo sapiens
cccacctcagcctcccgagtagttgggattacaggtgctcaccaccacactcatctaatttttgtatttttagttggccatgttggccaggcttctcttgaactcctgaccctcaaatgttctgcccaccttggcctctcaaagtgctgggattacaggtgtgagccaccgcaccaggcctaaaattaaatggattccggttgcaggtctttggctcaggctgttttccctgatgtttctgcaggtcagttacttatggactgatgtttctgcaggtcaattacttatgtggttgtgcagatggccaaccacagtggccggttacttttctcagggcacctgccttctagaaatgtatcctctctcctctcccttttcctctttctgtcagagaatagcaggggttgtggaggaaagctgaattctaaattagtcatttcgataattaataaggctagctagaggtttgatgagaaaaaaattgctgcttttttttgtaagtgtaatgtggttagatataaagtatccaaaatttagacagatctcaaaatccaaaattttatttttccctcaaagccatgcttaagtttactcagaataaccacagcatttttctgaggctctgcaaataccttctcgag

SEQ ID NO: 9821 - DNA, 641 bp, Homo sapiens
cccacctcagcctccctagtagttgggattacaggtgctcaccaccacactcatctaatttttgtatttttagttggccatgttggccaggcttctcttgaactcctgaccctcaaatgttctgcccaccttggcctctcaaagtgctgggattacaggtgtgagccaccgcaccaggcctaaaattaaatggattccggttgcaggtctttggctcaggctgttttccctgatgtttctgcaggtcagttacttatggactgatgtttctgcaggtcagttacttatgtggttgtgcagatggccaaccacagtggccggttacttttctcagggcacctgccttctagaaatgtatcctctctcctctcccttttcctctttctgtcagagaatagcaggggttgtggaggaaagctgaattctaaattagtcatttcgataattaataaggctagctagaggtttgatgagaaaaaaattgctgcttttttttgtaagtgtaatgtggttagatataaagtatccaaaatttagacagatctcaaaatccaaaattttatttttccctcaaagccatgcttaagtttactcagaataaccacagcatttttctgaggctctgcaaataccttctcgag

SEQ ID NO: 9822 - DNA, 967 bp, Homo sapiens
cacatagtgattttctcctgtgctttgtctccagggacattggctgctgtcttctgacccaccctgtgtggctttggcgtctcctgtgacctcccagtatgggtcttggcctcatcctgcctctttgtctttctggcccaccacccacagcttgaatctcaggctccaacagttgcctgacccccagattctgatgacagcctacctacttgttcttcaggccctcaccagactcactgcccagacacaccacacaggagaacatgaaagggtgaatgaatctttcatcatttgatgaccaagttggcattcttttacattccagccaccagaggaaggtgtattttaacacaattgccctcacatcctccttaacaggatttacataagtttattaacacatatgtttctacaaaatcaagttttgagaaccatttttatacactgatctgggacattttggggatatgaaattaactttagcacacacagcaagaagaaaaccgaacaacaaattctacaaacaccaaatttgctgtgaaatttacatttcagaatctctcaagaaatagtgcccagcagcaattcttactgttttcactttttcccccgtcttcacatttttatgtttgacagtgccaacatattttctcaacatttattctgaaaggaatgtactttgtgaattccttaaatgcaggatgattctgattttattggcctaatagctcctccttatgcgtgggttagtataacagaatgcatttgagacctgctatactattttaaattaagacatttcatgtagcacatagtattttaaaatgaagaacattgtcttggaaagcacacaggctaactgctattttcttgatgcaagaaatatttaaattctctgtgcttcagtctatacaatcagttttccagggatgctgtgtatataaaacgagggagtgtattaagagta

SEQ ID NO: 9823 - DNA, 88 bp, Homo sapiens
ttatttttttttctgagacagagtctcactctgtcgcccaggctggagtgcagtggcgtgatcttggctcactgcaacctctgcctcc

SEQ ID NO: 9824 - DNA, 52616 bp, Homo sapiens
gcggcgcgggcgggagggcgaagagcagcggccgcctgaggggagcccgcgcctccgccgcctgagaggaggtcgagctgccgccggggcgatgctggaggagctggagtgcggggcgcccggcgccaggggagccgccacaggtcggttcgggcccgcgccgaggggaagggggggcgcggcgcgcggcctggacgggccgaggcggcgatgggaggcggacgggcctccgggcgccaagcctggtcctgcgggccgggcgttcacaccctggggccttctcatccccagcgagggcctggcgtccccaagggcacccttgttgacgttattgttgtagccgcgaccgtattgtttgtttccggcgcttttgcgtcagttcgtccctccaggactctctggggcggtgggtcggaggggccgagaggggaaactgaggcccagggaagcgaaagggcttgccctgcaggttactggatgcgtttgtgtcccttgaccatgttggaccttgcagcgggtggggaaactgaggcccaaggtcgcacgggctcggggaccagttaccgatgccgctgagggtcggggtaagcccgagtaagaagaggcccagatggtagagatggccaggagggtgggactcccgagttcttgctccttcctgatatgcaccgtgacttcctcctccgtgtgccttggaatggggtctttggagcccaccacaggcctcctgaaacgtgggagggtgaaccaaggaagaccagactgtccctctcccttgctggactctgcattacataacgctttggcagcacttggcattacgctttggcacatagtaggtgctcagtaaataacgtgaacgaatgaagggctagaatggacgccagtccagtttctcagcctcagcagtgttgatatttgttgccgtcctgggcacggcactgcagggtgttaagcatcatccctggcctccgccttttgcaggccagtagcagcccctctcaccatgccttagtaacagccagaaataccattgccctgtgtcccctatggggcagattccgccttggctgaaaatcatggctgtagttccttctagcctgtgggatttcccggagacataaaattaatacaaagttggtactgtcgtggagctgtgatgttttaagtcaggatgtttaactttatttatttatttattttgagactgagtcttgctctgttgcccaacctctgcctctctggttcaagcgattcttctgcctcagcctcccaagtagctgggattacaggcctgcaccaccatgcctggctaatttttgtattttttagtagagacggggtttcaccatgttgggcaggctggtctcgaacttctgacctcaggtaatccacctgcattggcctcccaaaatgctgggattacaggcatgagccaccatgcctggccaggatatttaactttaaaaaaaaaaatcgctactcgctaggaccatgctatcatgaaaggaaagtatattttagtgccaaataaaattagaaaggatgtaatcgcagaataaagagcagttagtaactttatacacacatatgtgttaatcgtgtgtatctttggatctctggattgggagtgtcccgttttatatacaagattttttaatgagggtgggtcctgtttttaatgaggttgtttctgttccacttgcaccaaagctagtgactcaaagccacacaaatagatttttgtgattgtctcgaaaataaagttaagtgactaaaaatcatatccttcagttagggggtagaaatccatggcttttggtaagtggacacttgagaatgatactgtctttatttctttgaagtggctagaaaggaaacatgaattttctcagtaccttttcttattcactaagcttggggcggtgggtgaggggtggtttcatgtatggacgatggagttttttaggaagccccagtctgcttttaaaaagtactcacttttatgtaatgcttacaaaacatacgtagattaaccaaaataactaaactaggttttgccaagccagatctcctggtaagtgtgagcttcctaaacttactctgtttaaggtatttatctaaagactcgcttctatttatgatcacaaagcatctgctttgatattattagatggtttcttgagattttttttgcaggaaaatattttgtcttatcttctcttgacagcacttcagctcctgcctggcaagctcaaagtgctttaaattgtggtaccttcatgaattctctttaaaaagaaaaggatcccttttctgattttacagatttggtggtggtatgggggcttgggttggaggaagatgtttggggatcatgggaatgaaataggtaatctgatgttttctctcctccctacttttactcattccacttccatttcatgaaacagttccggttactctcttagttggctttctgatttattccagaccctaaccaggtaccataggtgcagcatggaacaagtctttctgctgtcatagagttggcattttgtttccagagagacgtaataaacacgaaagtttcagattaaatgccacaaagaaaataaaacaagacatgacagtgtctagggtaggatttctcaacctattaacattttgaggccaagcgccgtggccagcactttgggaggctgaggcgggtggatcacgaggtcaggagttcgagaccattctggctaacatggtgaaaccccgtctctgctaaaaatacaaaaattagccgagagtggtggcatgcgcctgtagtcccagctacttgagagagtgaggcaggagaatcgcttgaacccaggaggcggaggttgcagtgagctgagactgtgccattgcactccagcctgggcgacagagtgagactctgtctccaaaaaaaaaaaaaaaattttttttttttggcccatataattcttcattgtggtgtgctgtgcattgcattgtgggacatttagcagaatccctggcctctacccactggatgtgaatagcatccctttgagccctccctgcatcatgacaaccaaaaacatctctagactgtgtcaaatggcccccgaggacagaggggtcagaattgcctccaccttgtacataattggctctacatatgtatttgctaacttgattatttgcagaatttaacagtttaccctttgacacttttatttgcagccatggattgcaaagatagaccagcttttccagttaagaagttaatacaaggtaattatttggaaatgggttaaagagttgttcgtagtttatagtcttccttgtctcttgttggagacctcagtggaagcctggagctagaggggagagaaacagtccttcttcagaccaggaagctgggaaaatgcttttcacacagtaatgtctcgtggggttcccacaagtaaaccccgaggcctccacttatgcacaattggtgttttgtaacttgcagctgggagctctcctgtatgttgtagggagcgtagcagcatccctggcctcttcccaccggatgccagtaagtgcatcctccaagtcgtaacaaccaaaaatatctctatacgtggctgatgtcccctgggaggtagaactgccccctcagagaaccactgttgtcctggaagataaatgctcccaaatccttctgcataaaacggggagtgtgttcacccttgggccagatgagcggttggattgtaattttttttttttttttttttgagacggagtctcattctgttgcccaggctggagtgcagtggtgcgatctctgctcactgcaacctccgcctcctgggttcaagcaattctcctccttcagcctcccaagtagctgggattacaggcgcgtgccaccacacccagctaatttttctatttttagtagagatggggttttaccatgttggccgggatggtctcgatctcctgaccttgtgatccccctgcctcagcctttcaaagtgctgggattacaggtgtgagccaccgcacccggcccagattgtatttttagaaactacagttttgggtttttcaaacttgggctgggtgcagtgttgcatacctgtaaaaccagctatttgagaggctggggtgggaggagtgcttgagtccaggagttcaaggctgcggtgaattataatgacaccactgctcttcagcctggatgacagaggaagactctgtctcttgaaaaaaagggggacgccagatgctaggctcacacctgtaatcctagcactttgggaagctaaggtgggcggattgtctgagctcaggagtttgaaaccagcctggccaacatggtgaaaccccgtctctactaaaatacaaaatagctgggcatggtagggggcacctgtagtcccagctactcaggaggccgaggcaagagaattgtttgaacccagaaggaagaggttgcagtgagccaagggtgcgccactgcactccagcctggtgacagagcaagactctgtctcaaaacaaacaactccccccacaccccccccaaaaaaaacaggtttttatttggtctattacatgatgaaatagttaataaaagatgcaatggcattgaagtaagtgaacataggttctttgggaaattcactctccaaagtgtttctgtgttcctcctaaccagcccgaagcctggcagactctgggagaacagtttgattgatgagaaaagcctaacagagcctagggtgctgaggccaggaggaaaaaaaaaaaaccctgtccacaaatgtgtctatattttctacttgagaaccagatgcagttattatcaaatgagattttcacccattaaaaataaatttggaatatgaactgcatctgaaataaacaaatgtctcttgaaattctggcgatggctctgctaaaaggcttgtcaggattttgttttttaagttaggatgttgaagcggggcatggtgactcacatctgtagtcccagcaccttgggaggtggaggcgggcagatcacctgaggtcaggagtttgagaccagcctggccaacatggcgaaaccctgtctctactaaaaatacaaaaattagctgggtgtagtagtgcatgcctgtaatcccagctacttgagaagctgaggcaggagaatagcttgaacccaggaggtggaggttgcagtgagctgaggtggcgccattgcactccaacatgggtgacgagcaagactgtctccaaaagaaaaaaaaataagtaaaattaggatgttagaaaaggatagaatgaaaagatagcaccccccaccccctctttttttttgagacgaggtcccttttgcccaggctgcggggtagttgcaccaccacagctcactgcagcctctacctcctgggctcaagcgatcctcctgcctcagcctcccgaagtgctgggattatagatgtaagtcagtgtacctggcttcagatagcccctgccccgtcttttttttttttttttcttttgagagtttcgctcaggtcgcccaggctggagtgcagtggcgtgatctcagctcactgcaggctccgccccccgggttcacaccattctcctgcctcagtctcccgagtagctgggaatgcaggcgcccgccacctcacccggctaattttttgtacttttagtagagacggtgtttcaccgtgttagccaggatggtctcgatctcctgaccttgtgatccgcctgccttggcctcccgcacccggcctttttttttttttttttttttttttgagagggagtctgtctctgtcgcccaggctacagtgcagtgttgggatctcagctcacttcaacctctgcctcccaggttcaagcgattctcctacctcagcctcctcagtaactggtattacaggcgtgtgccaccatgacctggctaatttttgtagttttagaaaagacggggtttcaccattttggtctggctggtctcaaactcctgaccttgtgatctgcttgcctcggcctccccaaagtgctgggattacaggcgtgagccaccacacccggcccagatagtccctttttaaactttaaaattatctcccacccccatgtcccaacaaatcagtaattttcaagctcatgagtggttgtaactttaaacgttcactagagatggctttctgtctttgtttcagcccgtctgccgtttaagcgcctgaatcttgtcccaaaggggaaagccgatgacatgtcagacgatcagggtacttctgtgcaaagtaaaagccccgatttagaggcctctttggacaccttggaaaacaactgtcatgtgggttctgacatagactttagaccgaaacttgtcaacgggaagggtcccttagataactttttaagaaatagaatcgaaaccagtattggccagagcacagtcatcattgatttgacagaggactcgaatgagcagccagacagtcttgtggaccacaataaactaaattctgaagcctctccctccagggaggcaataaatggccagcgagaagacactggggatcagcaggggttgttgaaggccattcagaacgacaagttggcatttcctggagagaccctttcagacattccttgcaaaacagaggaggagggtgttggctgtggaggtgcagggaggagaggcgactcccaggaatgttcgccacggagctgcccggagctgacgagtggcccgagaatgtgccccagaaaggagcaggacagttggagtgaagctgggggcatcctgttcaaagggaaggtgcctatggtggtcttgcaggacatcttggctgtgagaccaccgcaaatcaagtcccttccagccacaccccaaggcaagaacatgacccctgagagtgaggtgctggaatctttccccgaagaagactctgtactcagccattcgtccctgagctctccctcttccaccagctcgcccgaggggccgcctgctcccccaaagcagcacagcagtaccagtcccttccccacctccacgcccctccgcagagtgagtatctcccatggagtccctgcacatcagtgctcacggatctcagagcgctgtcagtctccactgggtcacccaggtgttttgtggcagagtgagcggggccacgggctgggtcctgggactcgacgtggagttcttcctggtatcaaaactcacagtgttcagttctgcattcgttgtgatgcccctgggacttaattcatcaacagtgtacctggtgtactgtgtgaataacaccctgctgttttgccttcgttgttcacatctaatcagtgatagcttagccgttttagggaattaggatctgagctggtgctgtaacccctcacttcagattcgaggtccagctttctctgtgcccttcctgtctaagcatagaaatgtagggacggggctgcaaagacactgagcactgaagtggcagtgagacggcaggaagcatgacttggggaattctgtagggtcagcacagccagccatcttaaaaaccttacctggggccaggcacagtggctcatgcctgtcatcccagcactttgagaggccgaggtgggaggatcgcttgaagatcacttcaaaaccaacctgggcaacatagacaccatctctatgaaaaaaaattacttttttttttttttttttgacagagtcactctatcacccaggctggagttcagtggcgtgatctcggctcactgcaacctccacctcccaggttcaagcgattctcctgcctcagcatccctgatagctgggattacaggtgcgcaccaccacacttggctaatttttatatttttagtagagacagggtttcactatcttggccaggctggtcttgaatttctgacctcaagtaatctgcccgtcttggcctcccaaagtgctggaattataggcatgagccactgcacccagccctgcaaaaaaatttttaaaagttatccaggcatggtggcacatgcctgtagtcccagccacctgggaaactgaggcaggaggatcacttgagctgaggagttggaggccgcggcgagctatgatcacactgccgcgctccagcctgggtgacagagcgagaccccatctggaaccatttttaaggaccccataagggggacttttgcatggtctgtctctgttattgattttttattagcacaatggtgtccttaaggtcttagggaccaaactgataaaatcagtcacgagtcccacggtgtttagtggtgtcttttgattttataattttttactttttatcttaagtatgtagaaccagaagagacagtgcctttttatgtttttggttttgtagcacttttgtttgttcatgttgggtctttatatgagagtagtagatcctgagatgggtcatttaatctgtacctgtaagcaggtacagtagaccacctggaccataaaccaccaaccttgttcgctttcgggattttgagctctaaggaaccatttatttatttatttttgagacagagtcttgctctgtcacccaggctggagtacaatggcgccatctcagctcactgcaacctccgcctcctgggttcaagcaattctcctgcctcaccctctcaagtagctgggattagaggcacccgccaccatgcccagctaatttttgtatttttagtagagacggggttttgccatgatggccagactggtttcaaactcctgacctcaggtaatccacccgccttggcctcccaagtttctgggattataggcgtgagccactgtgcttggccaagagcatttatttttctgaatgacttcatttcttgtctttcacctgagaagatgaaaaaggaaaaaatggcttcctctttaggtttatgaaatgttgtaaaaatggtgcaaatctttttttttttttttttttgagacatggtctcaccctgtcgcccaggctggagggcagtggcatggtctcagcctactgcagcctccaccttctaggttcaagcgattttcctgcgtcagcctcttgagtagctgggattacaggtgcccaccaccacgcctggctaatttttgtatcttttcagtagagacgggtttcaccatgttggccaggctggcctcaaacttctgacctcaggtgatccgcttgcctcggcctcccaaagtgctgggattacaggcatgagccaccgccccagtcttctactttgttttatatgtgctggtttgttatataggtaaactcttgtcgtgggggtttgttgtacagattattttatcactcaggtactaagcctagtaccctcttctaagttactaaatgtgccagactggcatgtacacatttcagcttctacctaagccaccactcaatctcccaaaatcagagttgaagtctctccccattgggcatcctgtagtgtacattcgatcacttgaatttcttccaggctgctgccgctttgcaaaatttcgtcctgtgatgtgagccatttagcaagaacgggacacatggctgggcgcggtggctcacacctgcaatcccagcactttgggacgccgaggcgggtggatcacctaaggtcgagagttcaagaccaggctgaccattatggagaaaccccgtctctactaaaaatacagaaaattagctgggtatggtgacgcttgcctgtaatcccagctacgccggaggctgaggcgggagaaccgcttgaacccaggaggcagaggttgcggtggcctgagatcatgccattgcactccagcctgggtaacaagaacaaaactccgtctcaagaaaaaaaaaaaggacaggacacaagcacatgtttccattaagtttgtttccatgtccacagcttagtctgcaaactgggaagtcccctcgttgggcatcatggtggcacaatcctgcccgctttctaaaacaactgagcacatgaacccagtgtgcaacatttaggaagccctgcatttaggacgctagatcttgttctgaacacagactcgaggttttgggatgcacttgaaggcaatattatcccaacttttcagataatttacaagtggtaaaggcttcaggctggcccagagcctatggcagaaagcggccacaaccacccgcagagggcctgtcagtcaccgaagctatgagggaagcgattatcgggaggcctcctcatgccctgatggcagggatccctgagatcccagctgagagagactccatccccaacccctactttatctccgaacctttaaggagtcctgcatttctggtttggttggtttgcttgcttcatagttggtacctaactcttttttattttttattttttttgaggcggaatctcactcttttgcccaggttggagtgcaatggcgtgatcttggctcctgcaaccgctgcctcctgggttcaagcaattctcctgtctcaacctcccaagtagctgggattacaggcacgcgccaccaggcccagctaatttttgtatttttagtggagatggggtttcaccgtgttggacaggctggtctcgaactcctgacctcgtgatccgcccgcctcggcctcccaaagtgctgggattacaggtgtgagccaccgcgcctggccagttggtacctaactcttaacacctttccttgccgtgacgtccaagccacccccttcccacaacccctgttcctctggggaatacactgtttttgcactttacctccctaccagcagctctttccagattgcaggggcgagctggtgggaagcttgcagattgtttcgcactgccgtgtaatctgtgtgcttgtcactggggtctgttcttccttgagttggtacagtgaaatatgcattgagagtcccagggcagtcattgccactgtactttgtgggctggcttgccttctttattatttcttctttaaaataaaagaaaatgggagtttgttccgatacaggtcctgctgtccctttgcagggagcttcatggcgtgtttttgtttgttttggtttttgttgttgttttagtactgcaggatctggagaatctcactttggagaaacaatgatttaaaaagatccccctttagatactcccagggtcctttgaatagctgaagtgttcctttttagtattagagttttctaccatgtgggaaagaaccatttctgaagtttgcaatcagacttgtgatttagcctcttctgttagtgatcgagatgattatttgacaaatgatcatgttggtgcagttgtgttactggaatctttggcttgcttctgtgcccagattgctggaacttctttccatatacttgaaattacatttgtaataaattctccatgtttaaaagaaatactggtctaggtgcagtggctcaagcctgtaaccccagcactttgggaagccgaggtgggaggattgcttgagcttaggagttcgaaaccagcttgaccaacatggtgaaactccgtctgtacaaaaaatacaaaaaatagcggggcatgggggtgcacacctgtagtcccagctccttgggaggctgaggtggaaggatcacttgagccaaggaggcagaggttgcggtgagtcatgattgcaccactgtgctccagcctgggcaacagccagaccgtctcaaaaaaaaaaaaaaaacaaaaaggaaaaagaatggaaaccttgaagccctctgttctcccaggaggttgccattattatcatcatcatcaccttgtgtttttctgtgtcctgtatatccagagagatctctaggaaacacccagtatcattttgtttccttgtgtatgacatatactgtaaatatctgtctttgttactcaggggtgtcttagatgttttttatattgggatggaaagatggagctctttttaacagctgcgtgatatcccatggtgtggacatgctgtaggttacagagctgttttctcagttctgttgtttctgtgcttggctttcacaaaatgattgttcccttgagcttccttctacaagtggccttgggctgttaaggagaatgaggtcttggtagctcaaggcaatgcgtgcgttcttattttcccagcttgcactctctcatgcttgggccaattggaggttttctcttttcccccctgcctccgctcccctgctgtcaggttttagcggcttatctggtctgggcttagaaattagataccctttagtataaaatcagagtccataggctctgagaggattatctgagaaagggtgcaggaattttcatgcccacacatagtgagctctgtcgcgactccttgggattgtcggtttttgtgttttggcttccttctgggatcctggatcacgtttttggcagttgagggtgctgtctgaccgggctccagctgggtagaatgtgggagtgttgcatagaattttgagagtgagatctataaacacttgggtcaaatttcaagaagataaagttctgtcagacttcaaggtccatctgagggtttggcaaagcaaaaaagataccagttttaaattaagcagtaattgctctgttttggttgttggatattactgagcgggctcttgccagtcacatcaagtctgttatctctggactcacagcagagggggggcattgtaagaggcaggagattctgcagctgagcttcaggcatgggcaagactaaggaactgaattccctgccaccccaagaccacattccgtattataatctctgaacacaaagggcagccctggagagctgcggctcccatattctgcagttaaatccctcagcgtgggggagaggcacacagccttggcaggcagagtagatgctggagagacagatgctttttctgcagcatttggtgaggctgcctcgggctggcatttctgttgccacattctcagcaaagactgaacaccctggcctgatctcggtggtgaaagagctcctgccaacacgggcagccttctcacaacggctcggcctttccctaaagaaaggtttagtccagaaaggactcagtgggacccaggtggaaaggctgtcttgagctcattcatctgaagcttttattctgtgagaggtcctagtcaggggttcagctttcccagataaagaaatcactgttggccgggcgcggtggctcacgcctttaatcccagcactttaggaggccgaggcgggcggatcacgaggtcaggagatcgagaccatcctggctaacatggtgaaaccccatctctactaaaaatacaaaaaaattacccaggcatggtggtgggcacctatagtcccagctactgggcagactgaggcaggagaatcgcttgaacccgggaggcggagcttgcagtgatccgagatggcgccactgcactccagcctgggcgacagagcgagactccgtctcaaaaaaaaaaagaaatcacttacataattttgttgacccctcagaccattgccaggaaaatgggcctttggtttttcagtcaacttcagtcttacactgcaagtctgcaatgaacccggagaactatttcttcccactcttaagcgtctcttcccattgctcttcacttctactagtttggttttcaggattccctgccccggtgggagatagcttaggccaaagtccagactccctgtttgtcttccttcctgggaccatttaggtggatggtgagtcacaccatggatcctattggtaattcctagtagctcatgctcagtttgaaggtaggtgatagaaaatattgtgccctagaaggtagaagtcctagaaaaccccagcaagtttcccttttgtcttaagctttcactccacattctaaaaagcagagttggctgggcgcggtggctcacgcctgaattcctagcactttgggaggccgaggcgggtggatcacctgaggtcaggagttcgagaccagcctggccaacatgatgaaacccctatctctactaaaaatacaaaaattagccaggtgtggtggcacacgcctataatcccagctactcaagaagctgaggcaggagaatcgcttgaacttgggaggtagaggttgcagtgagccgagatcgtggcactcgctgcactccagcctctgtgacaggagtaagactccatctcaaaaataacattaaaataaaaagcagagttgagctagacagaatgtaaattagtggtgcacaggaaaccagcctggagacatgttttatttgattaatttagtatctttttattttttttttagacagtctcactctgtcacccaggttggacagctcagtgcagcctcaacctcccgggctcctcccaccccagactcctgggtagctaggactacagatgtgcaccacaacacccgactaactaaaagctttttttagagacagggtcttgctttattgcccaggctggtcttgaactcctgggctcaagtgatcctcccgccttgacctcccaaagtgctgggattacaggcatgagccactgtgcccgtctgtgtccatttttaaacacctaaaaaaattcatatgaaattcctaatatcagcttctcttggagaaattggaaggaccagcaaatagggatctatattcctgtaagaactccatctcctttggacaggcaggtcctctctcctttgctacaaatccatcctctccctgtcgcccaggccagctgtcgcttttttttttttttttttttaagacagagtctcaccctgttgcccaggcaggagtatggtggcgcaatctcggctcactgcaacctccttctcctgggttcaagcgattcttctgcctcagcctcctgagtaggtgggattacaggcacctgccaccacgctcggctaatttttgtatttttagtagagatggggttttgccacgttggccaggctggtctcgaactcctgacctcaggtgatctgtctgcctcggcctcccaaagtgctggaattacaggcgttagccaccgcgcccagccttgtctgttgcctttatttctgagcttgccttgtttttcttgtgcttggtgtccttcactcatttctttatctgcctccgtagtctctcttgttatctaatcccagatacacacatgtatgcacacttactggagtttgtgaccctattatgacattttggttctgttggtggaaaaactgatcacctggaaaggtttctctttttctcgaagcaattgaaataacccgtgtttaaagataaacgtcttctgttttcagataactaagaaattcgtcaaaggctctacagagaagaacaagctcagactgcaaagagtaagacattttccctgaaatagaaaattaacctgctgtgctttttgcattaaatagtaagcaaagccctttgaagttcctttggtctagtttttacattttccccagccttctctgaccatcattttgattcctgcttcattttaagtacttggacttcatggtttgtggattgtgtcattttttggcttgctgagtgagtcctaaggttttgtgtgtggccttttctaagcttttatcaatagtgctaccactgtcttaatggttcagtatcccattgtagcttcaaattaccttccaaaaacccagtccatttccttgtagtcctgtctctttttttttttttttttttttttgagacagagtctcgctctgccacccaggctggggtgcagtggtgcgatctcggctcactgcaagctccacctcccaggttcacgccattctcctggctcagcctccccagtagttgggactacaggcatccaccaccacgcctggctaattttttgtatttttagtagagacggggtttcaccatgttagccaggatggtctcgatctcctgacctcgtgatccgcccgcctcggcctcccagagtgctgggattacaggtgtgagccgccgcgcctggccagtcctgtgtctttcacttattgctaagtgctataacatctgaatagcctctacactcgatgggtggttatcctttagtgactctctgcttagtctcctattctgtggggggcatcaccacgttttccacacagcaatgcagggggcttttgttttgttttgtctttgagacggagtcttgctctgtcaccagactggagtgcagtggcacgatctcggctcactgcaacctctgcctcccgggttcaagcggttcttctgcctcagcctcccgagtagctgggactacaggcacttgctgccatagccagctaattttttttttttttttttttttttgtattttagtagagatggggttcaccatgttgcccaggctggtctcaaactcctgagctcaggcaatcctcccgtctcagcctcccaaagtgctaggattacaggcctgagccactacacctggccgcaggggactttttacttattgcttaaaggttagagaaattgaacatcatgtcataccgaaacaaaccaaaactccagggaaggcctctgggctttgcctatgcagtgccagctcacaggaggggcctggtgaccatgggctctgcgtttactgagtgtttcctgagctccctgatgttcactgggcgtttcctgagcttcctgatggccacactgagtttttgtgtttcagatttggggttgatttttattttattacttttttttttattgagacacagtctctgttgcccaggctggagtgtagtggtgcaatctcggctcactgcagcctctacctcccgggttcaagcgattctcctgcctcagcctctcgagtagctgggattataggcacgagccaccacgcctggataattttttgtatttttagtagagacagggtttcgctatgtttgtcaggctggtctcaaactcctgacttcaggtgatccacccaccttggcttcccaaagtgctgggactacaggtgtgagccaccacgcccagcctgatttttatttttacagtttatctcattctttggaacaagagcactttttaagctcattggaacctccgagtcccgcacaccgggttggggagcggagaaagtatccaacggcggctgaagaaatctgattcacctgcagtttctagaagccttctatttcctgcttagcaacagggtgggagactcttcacccagttatgtttatagtctccttgttcagtccagacggtcaccttcctcgtgtgtctcgtatatcagatgcagtcacacagcacactggcaggaaatgcacatcagacatcttccaggctgtgtctctgtggcttttgttaaagctaccagagatgtattggaacacatttagaatttttccttagagacaagggcagatatcctaacccaaactgaaagctgagctgtcaggctccagacgtgtgggaagcccatattggatgagaggtggtcctcatgcagtgttaggagcgggcacctgtggagctgggcaggtgagcgtttttttttttattttgagacagtctcgctctgttgcccatgctggagtgcagcggcgtgatctcggctccctgcaacctccacctcccaggttcgagcgattctcctgcctcggtctcccaagaagctgggattacaggcacgtgcctccatgcccagctaatttttgtatttttagtagagacggggtttcaccatgttggccaggctggtctcgaactcctgacctcaagtaatccgcctgcctcggcttcccaaagtgctgggattacaggtgggagcctgcgcctggctgagcatgtttaacattgaacttcagattacgtaatgactgagtgtcccaggccactgccaagtctttggaatgaggaacgtagtgatgaagtgttacttccttaaagaatttgaaacaaggctgggcgtagtggctcgcccccataatcccacactttgggaggccaaagtgggaggatttcttgagcccaggagtttgagacaagcctgggcaacgtagtgtctctactaaaaagaaaaagaattcctgggctggttgcaatgggtcatgcctgtaatcctagcactttgggaggctgaggtggacagattgcttgagcgcaggagttaaagatcagtctgggcaacatagtgagactccatctctacaaaaattagccaggtgtggtgacgggtgcctgtggtcccagctactcgggaggctgaggcaggaggactgatttgagcccaggacggaggttgcagtgagccaagatagcattgctgcactccctccagcctgggcactagaatgagactctatctccaaataaataaataatgtttttttgttttgtttttcagacagagtcttgctctgtcacccaggctgcagtgccgtggcgtgatcttgaactgccttgtgggtttaagcgatccttgtgcctcagactcctgagtagctgggactataggtgtgcgccaccacattcagctaatttttttgtatttttggtagacttggggtttcaccttcttggccaggctggtctcaaacttctggcctcaagcaatttgtctgcctcagcctcccaaagtgctgggattataggtgtgagccccctcagcccagcaggattgtgttttaaatgaatcttatattgaatttcccacaagtaccaggacacagggctaattcttaacatttttctcatgatggaaggaagcataatggattatgaaaatcacttctgtggctgggtgctggggctcacgcctataattccaacactttgggaggctaaggcagaaggattgtttgaggccacgtgttcaagaccagcctgggcaacacagcaaaaccccatctctaggaaaattacaaaaatagctgggtatagtggtgtgtgcttatagcccctgctactcaggagcctgaggtgggaggatcacttgagcctgggaggtcgaggctgcagccagctatgactgcaccactgcactccaccatgggcaacagagtagactttgtctcaagaaaaataaaatcacttctgtgtaaagttgttgactggaggctcctcctggagctggtctctgaattcttatttattcatttatttttttaactgagtctcacttagttgcccaggctggagtgcagtggtgtgacctcagctcactgcaccctacgtctcctggttcaagtgattctcctgccccagcctcctgagtagctgggactacgggtaccctccaccacgcctggctaatttttttttttttttttattaaatggagtctcactctgtcactgatgctggagtgcagtggcaccgtgttggctcactgcaacctccgtctcctggtttcaagcaattcttctgcctcagcctccccagtagctgggattacaggcgcccaccatgcctggctagttttttttaaaaatatttttagtagagatggggtttcaccatcttggccaggctggtctcgaactcctgacctcaggtgatccacttgcctcggcctcccaaagtgctgggattacaggcgtgaaccaccgcgcgcagccaatttttgtatttttagtagagacagggtttcaccctgttgaccaggctggtctcaaactcctgacctcaggtgatctacccacctcagcctcccaaagtgctggaattacaggcgtgagccaccatgcctagccttggtccctcaattctgttcatcccgtccaggccgtgctgtcctccatgctgtgaaccgagcttcctcctgggagttggagggagggccacctgtcacttgccacactgtcttgtaggatcaggagcgtctgggcaagcagctcaagttacgtgcagaaagggaagaaaaggagaagctgaaagaggaggccaagcgggccaaggaggaggccaagaagaagaaggaggaagagaaggagcttaaggaaaaggagaggcgggagaagcgggagaaggatgagaaggagaaggcggagaagcagcggctcaaggaggagcggcgcaaggagagacaggaagccctggagtgagtgtccttggaggccatgctgggcccgccaccctgctgctggattccgctcctggccactctgatggggcctttccacttcacaggcagatggcggctcccttcagttccttcccatttctccttcgtgaggtgcccgtggggccctgacgtgggagcggtggaaagcagctccctgctctttagtgctcccccacgtccaactcaccctggaccccttgtctctgctgtgaccatccttccagttcccaaccaacttaggcatttgcattgcaggattgtgggttttgtctgtgctaattgtgctctgactggctaaagttttttatatatattctagtcacaggaagaattttattgactgttttccatttttattgtgaagacctatgtaaaagccttatactagacatgaaaataacttatattcatttaatgtaaaatgaaatacttgccatatactaacagttgagtgctgcggtcccttccagagccaaagcaaagagtcggctgaaatgtcatttgctgtctcacagggctaaacttgaggaaaaaaggaaaaaggaagaagagaaacggttaagagaagaagagaaggtagagtgtttcccacagagcttccccgtcccagcccgttggagaagcagatgcccaaagtggaattcttgccacagccgtcacctaatattctcttggtttggggaaaccaaatggcgcccgcagggagggcgagtctgtctagatgcgttcttgttgcttcttcccagtgctggctgtcacatgcctactggccctgcaatcctggcacttctacccacaagggcaacttggacattttgagattggctggctcagttgcgggtccgtgggttttgagagctgaaaatcacagtagtgccttcaagctaaaatgcttgacgttcggttctgggggcctttgcatgttttgcaacacatactgttcctcttcctctcctctttctcatcaccatctcttaacatcacagcgcattaaagcagagaaggccgaaatcacgaggttcttccagaaaccaaagactccacaggcccccaaggtgagcagccggctgcctttgcttttgggtttcagctctgctagacttttcctttctgaaagtgaaagggtctctccccagccagcttctctcattaggagggagggagcctccagtgacctagggcacttccatttctggttaagtcttgaggctcaatattttgtccttcgctttgtcccaaagaggtaaaaagtggcatgtctgattaaacagtgctgttttcagaggttacttcatgaataattttgtgttaggcgtaagagaaattcaccatgtttttacccttgggaaacttaggcttaaggagggagcacgtttagctgtaaaacaacagtacaattcacaaaggtttactttccctgcctggcgtcggtcacctggcatctcagaccttctgagccaccatctgtgcatggaaaccgcagccctccttcccctttacccagagggagcccatctccaatgttaggggtccttcagtgcctttccctgctccactcactgtatttatacacatgtgtacttagctatctcagatttgtgccatgttgccacatttagatgtatttcattctttttaatgtatctggcctttatttattttttgaggcagggtctcactgtcacccaggctgtagtgcagttgcacaatcaaagctcaccacagccttgacctctcagggtctggtgatcctgtcacctcagccttcccgagtagctgggactacaggcatgtgccaccatgcctggctaattttttatttttattttttttgagatggagtctcactctgtcacccaggctgcagtacagtggtgcgatctcagctcactgcaacgtccacctcccgggttccagtgattcttctgtgtcagcctcccaggtagctgggattacaggcacatgctaccacacctggctaatttttgtatttttagtatagacggggttttaccatgttggctaggctggtcttgaactcctgacctcaggtgatccgcccgcctcagcctcccgaagtgccgggattataggcgtgagccaccgtgcccggcctaattttttaatttttttttgtagagactgggttttgctatgttgcccaggctggtctcgacgacctggcttcaaatgatcctccaaacctcggcctctcaaagcacttggattacaggtgtgagtccctgcacctggcctgtccttttatttgtatgttgagacatttgatggcaattgtgtatcctgaaggtgcacaatgtgacattgttgtacctacacatcatattgtgacagccagagatccacatcatgtattttcactgccgcataatacttcataatgcaatgatatggtttctctctttttttacaaaaattatttatttatttagagacggagtattgctctgtcacccatgctggagagcagtggcgctatctctcggctcactctaacctttgtctcccgggttcaagcaattcttctacctcagcctcccgagtagctgggattacaggtgcctgccaccactcccagctaattttttgtgtttttagtagagacggggtttcaccatattggccaggctggtcttgaactcctgacctcagatgatctgcccatctcagcctccctaattttatttttagtagagactgggtctcactgtgttgccagggctggtctcgacctcctggtctcaagcatttctctcgctttggccacccaccgtgctaggatcacaggcatgagccacagagcctgccactatctcaacctctttgcccctcagtggtgtagggggggtccctgcacatgcttctctgcacacatgcattcctctgggacagccaagtaagcatgagttcacctctaggacaaaatagcatattgctgaagcatcatgagccatggccagagtgcgtgccagatgggaaactcagatgtacattcccggcgatgtgtggaaatttcctccccattctctgctatcactgcaatttttatgggattaattttcttttaactttgccagtctgatggatttttaaaaattgacattgttttactttccatttttacttgactcttggtgcagttgagcatctttttctgttcgtttgccattttagttcttctatgacttgccaattcctatttttttacctatttttctacaggattttctttttttttctttgcctgatctgtaagttttttttaacatagtctagtatttcattctccgtgatatttcgtctcagcctgttacctctttgtttacagtctttttttttttttttttgagacacagtttcactctgttgctgaggctggagtgcagtggtgccatctcggctcactgcaagctccacctcctgggttcacaccattctcctgcctcagcctcccgagtagctgggactacaagcgcccgccaccatgccccgctaattttttgtatttttagtagagacggggtttgcaccgtgttggccaggatggtctcgatctcctgaccttgtgatccgcccgcctcggcctcccaaagggctgggattacaggtgtgagccaccgtgcccggcctttgttgttttttgtttgtttgttttgagacaaagtttcgctcattgcccaggctggagtgcagtggcatgatctcagctcaccacaacctctgcctcctgcgttcaaatgattctcttgcctcagcctcccgagtagctgagattacaggcatgtgctgccacgcccagctaattttgtatttttagtagagacggggtttttccatgttggtcaggcttgtcttgaactactgacctcaggtgatccgcctacctcggcctcccaaagtgctgggattacaggtgtgagccaccacgcccagctacagtgtctttcatcatactgaaatttctccttttggccaggtgcggtggcttacgcctgtaatctcagcatttggggaggccaaggcgggtgaatcatctgaggtcaggagcttgagaccagcctggccaacaaggtgtctctactaaaaatactaaaaatacaaaaattagccgggcgtggtggtaggcgtctgtaatcccagctgctcatgaggctgaggcaggagaatcgcccaacccaggaggcagaggttgcagtgagccgagattgcaccactgtactccaggctgcgcaatgaagcgagactccatctcagaaaaaaaaaagaggagttgtgatctttcaaaaaaagaccctgtcttttttttttttttttttttttttttttttttttttttttgagaaggagtcttgctctgttgcccaggctagagtacagtggcgtgatctgggctcactgcaacctctgcctcccagatccaaacgattctcctgcctcagcctcctgagtagctgggactacaggtgcccaccaccatgccaagctaatttttgttttgttttgttttgttttgtttttgagatggagtcttgctctatcccccaggttggagtggtgcagtggcacgatctcggctcactgcaacctctgcctcccaggttcaagcaattctcctgcctcaggcccaggctagagtacagtggcgtgatctgggctcactgcaacctctgcctcccagatccaaacgattctcccacctcagcctcctgagtagctgggactacaggtgcccaccaccatgccaagctaatttttgttttgttttgttttgtttttgagatggagtcttgctctatcccccaggctggagtgcagtggcacgatctcagctcactgcaacctctgcctcccaggttcaagcaattctcctgcctcaggctcccaagtagctgggactacaggtgcatgccaccatgcccggctaattttttgtattttagtagagaccgggtttcactgtgttgcccaggctggtctcgaactcctgagctcagacaatccacccgcctcggcctcccaaagcgctacaattacaggcgtgagccaccgcgcctggcctaatttttgtatttttagtagagacggggtttcaccatcttggccaggctggtctcgaactcctgacctcaggtgatccgccctcctcagcctcccaaagtggtgggattacaggcatgagccactgcccctggcctaatttttgtttttagtagagatggggtttcaccatgttgggcaggctggtctcgaactcctgacctcaggtgatccgccttcctccgcctcccaaaatggtgggattacaggcatgagccactgcccctggcctaatttttgtttttagtagagatggggtttcaccatgttgggcaggctggtctcgaactcctgacctcaggtgatccgccctcctcagcctcccaaagtggtgggattacaggcatgagccactgcccccggcctttttttttttttttttaagtgaggtttgttgagatataatttacatccaataaaataaactcttttcaggacatttgtgttgacaaatgacagggccagctaaccataatgaagataaaccctatttccatcactcaaaacagctcccttgtagtctgtccccccaccgccggcccttgagactgccaatctgccctctgccctgtagctctggaaactcggctctgtggacccacacagtgcctgggcttttgagtctgtgccttggccttagcctggatgaatcccaccagcaccctgctgtgtgcgtccatggtgcctcctttctcccattgctcgaagaccccatcgggtctcttcttgatttcagaccctggccggctcctgtgggaagtttgccccctttgaaattaaagagcacatggtcctggcccctcggcgtcggaccgctttccatccagacctctgcagtcagctggaccagctcctccagcagcagagcggcgagttctccttcttgaaagacctcaaaggccggcagcccctgaggtccggacccacgcacgtttccacccggaatgcagatatttttaacaggtcagagcctgaggaggtcggccttcacccactagtgatgctggaggccagcatcctgaaccctggggtccccggggtgggagctctgggtccttctgttgcttgcttcctagtgccctcgggccctgggcttcggtgctggctcaggcctctctccacctggccttcctgtaagctcctgaagtcttcctctccctgtcttcccagctcctcgtggaggaatcttatttccctgctggtctccagtgaaggataccccccaacaccccgctcttgcaaatctcattccacagaacctcccttgctaaaaatgctctggggctgcacctgggcagctgtcctccctctcaccctgcaggctgcaccctcctccatctgtcccttcagtccatgttcctgacctttctttggggacaggcagtgctgctttttaacaaatgcccatctttctagaattgttaggccagcttcacagggaggttcctgggaggtttgtgagcaggtctgtaaggcagcgtgatcctgagcctggggttttccttctcagtgatgtcgtcatcgtggagcgtgggaagggcgacggtgttcccgagaggaggaagtttggcaggatgaagctcctgcagttctgtgagaaccaccggcctgcctactggggtacctggaataagaagacggcactcatccgcgcgcgagacccctgggcccaggacacggtgagctagccccagagtgcctccgtccccgtacctcctcactgtgcccctttcctccagccccaaagacagttgtgagtcccatgtgtttcttttctcagaagctcctggactatgaggtggacagtgatgaggagtgggaagaagaggagcctggggagtccctgtcccacagtgagggggtaaggatgtgccccagctgtcttcactcacagacggcttgtgtttgagtctctgtcccacagtgaggggctaaggatgcagcccagctgtgttcactcactgacagctggtgtttgacctgctgtgtggtctgaaacctgaacgcacctcaacatccagacttccagcttctctcgaaaaatctcatctggtgacactcgcccacgtggctgctggggatgggatcccgtccgcatctgcaccgtggccccacagccccctcttgcctcctgcgggcctgctgcacaccatttcctcctgactgcccagctgctgtgacctagtgggctttctgccgatgctcaccgtgtctgtcgggaggccatgcaaagcagatgttcacagctttacatttttttgtttctttaagatggagtctcactctatcactcaggctggagtgcagtggcgcgatttcggctcactgcaacctctgcctcccaggctcaagtgatagtcctgccccagcctccctagtagctgggattataggtgcgtgccaccatgcccagccaagatttgtatttttagtagagacagagttttaccatgttggccaggctggtctcaaactcctgacttcagatgatccgcccacctcagcctcccaaagtgctgggattagaggtgtgagccactgcgcctggcctactttgtttttaataaggcacacactctgcttttctatctgatgaactcttttttttttctccttttgaggatgatgatgacgacatgggagaggatgaagatgaggacgatggtttctttgtgccccatgggtacctgtctgaggacgaaggtgtgacagaggtgagggagtgaagggggaggtcaccggctcagcaaaagttcatttctggactggtgctcagtggcctgacctgggagggtgacgggggtcccagcccaaccatacgagatttggactgcattccaagcacgcaagctcactcgtgggaacagctgggcctgaacttggtattacctgggagggtggcagacgtaggaggagcttgcaagcgaggggagccataggagcagacaccctggtgagggagcgtggccatggtctgtgggttagaaggctggaaaccacccgagctgacatacagtcagcatgcagcaagacatgtgcattgtaagtgttgagtttgatgacgtaacaatcaagtgaatgtgggcaaccaccgcccgaaataaaacagaacttccctatctctccagaagattgcccacgtctctgcaggcgaacctgcctgccacccctttccagattccataaggttgtggaactgtctttttttttttttttcttgagacggattctcattctgttacccaggctggagtgcaatggcccggtgttggctcactgcaacctctgcctcccgggttcaagcaattctcctgcctcggcctcccaagtagctgggactacaggcgtgtgccaccacacctggctaatttttgtatttttagtagagacgggagttcattatgttggccaggctggtcttgaactcctgacctccagtgatccacccgcctcggcctcccagagtgctgggattacaggcatgagccaccgagcccggcaggaacttgctttcaagcaagttgtttttggtcctgttttgttttgaaggcctgtcgtttgggaagtggggatttggtgggactgtctcatggttggactggaggcctaggcattccttgtgcatatctgaccaccgaggcctgaactgtcagtcagagagtggtctcaggccctgcatgtgtctgccagatgcctgggccatgtgggtagacacccaaccctgttaaacggctccacgatcacacattcaccagaaaattcagaggggtgttaaaagaggcctcatgggtgagttcagaaatatctgtgacgctcccaaaggagaccaggtgtgaattattccatctggaagaggggcagccagcgcatggtgtgctctgccctggccctgacactgtgggaagttttgtgcccctgtcctttcctcttgctccccagctggctggggactggttcctcaaaagagtgcctgggcataggggagcaagaaccccaaataaacttctgctttctaaaccacaaggagtgtgccgaccctgagaaccataaggtccgccagaaactgaaggccaaggagtgggacgagttcctggctaaggggaagcgctttcgcgtcctgcaacctgtgaagatcggctgcgtgtgggcggctgacagagactgcgcaggcgatgacctgaaggtactgcagcagttcgcagcctgcttcctggagaccctgccggcccaggaggagcagacgcccaaggcctccaagcgggagaggagagacgagcagagtgagtgtgggcggggccaggccacccacctgttcctgggcccagctaattccagggctgagggcaagagtcacaggctagtgggtccgtgatgcaaatgttctttccacaaataacagaggccagcccttttcctgtacatgtccgtacgttcaatgatgtccctagcagcaggacgaggcaggtcccttaattggcttgttttatcaaccaggacacaggcacagagagtgctggagtgggggctgtgctttctcaaaagccagggaggggccgggcacagtgcctcatgcctgtgatgccagcactttgggaggccaaggtgggaggatcgcttgagcctagtgcttcgacaccagcctgggcaacatggcaaaaccccatctctgcagaaaatgcaaaattacctgggtgtggtatcacgcacctgtgatcccagctactcaagaggctgaggtgggaggattgcttgagcctaggagtttcagaccacagtgagccatgatcctgccactgcactccagcctgggtgacagagcaagaccctgtctaaaaaaaaaaaaaaaaactcaaaaaactggggagggaccatggcacacaaggagagcagggcagtcatttgggtaggaacagcaggcatttgaagtcagccctggcaacacacgtgcccggccaaggctcacttctgggcaggtgcgtaggtgctaccctgtcttacacccgccctcatgaggccacctatccccgaagctggccatgccccaagcctcagtggcaatgagcttgtgtatgtgttttgttttttggcctgtggtgatgggtggctccccaagcctcatgcccacccatgttccctcctgccagtcctggcccagctgctgccgctcctgcacggcaatgtgaacgggagcaaggtcatcatccgggagttccaggagcactgccgccggggactgctcagcaaccacaccggcagcccgcggagcccctccaccacctacctgcacacccccacccccagcgaggatgccgccatcccctctaagtcccggctcaagcggctcatttccgagaactcagtgtatgagaagcggcctgacttcaggatgtgctggtacgtgcacccgcaggtgctacagagcttccagcaggagcacctgcccgtgccgtgccagtggagctatgtgacatcggtgccctcggcccccaaagaggacagtggcagcgtcccctccacggggcccagccagggcactcccatctcgctgaagaggaagtcagcgggcagcatgtgcatcacccaattcatgaagaagcgcaggcacgacggccaggtgaggtggggtgggcaggtgggggcctctgcagggcttttctttttttgtttgttttttgttgttttgtttttttttcgagatggagtcctgctctgtcacccaggctggagtgcagtggcgcaatctcagctcactgcaacctcctccctcctgggttcaagtgattctcctgccttagcctcctgagtagctgggattacaggtgtacgccaccatgcctggctaatttttgtatttttagtagagacggggtttcaccatgttggtcaggctggtctcgaactcctgacctcatgatccgtctgccttgtcctcccaaagtgctgggattacaggcgtgagccacctcgcctggtgtttttgtgttttttaaataaccttactcttagagcagttttagggtcacagcaaaatcgattggaaggtacagaaagttcccatacacctccttccccaaagccaagccaagccacccaacatcacctcccagaatggtgcattggttacaatcagtgcacctcaggccaggcactgtggctcacgcctgtagtctcagcactttgggaggctgaggcgggaggatcacttgagcccgggagttggagaccagcctgggcaacatggcaaaaccccatctctaagaaaaaatttttagattagccaagcggtggcatgcacctgtagtctcagctactcaggaggctaaggcgggaggattactggagcctaggagattgaggctgcagtgagctatgatcatgccactgcactgcaacctgggcgacagagcaagaccctgtctctaaaaataaatacataaaacgcaccttcgttgatttatcaccaccactagggtttgttgctggtgttgagggttctgtgatttgaatgaatgttggatgctgtgcgtctacctttattgttttaaacaaagaggcttctccccactgaaaggcccctgtgctctgcccgtccaatcccttggaaatcaccaacctctctatctccgtggatcagccttttccagattgccctgtagctggaatcgcatcgtgtgtggctcctttgacttggcagtatgcgttgacagttcctccgtgtctgtttgtggcttgatagctcttttttttttcacactgaataatattccatgtggtagcatttttatttttgttcaacggttcttgaattttgcattcaagcacagttattaagcacttactgtgctccaggcactctgatcggtctctcagacacaggtatatgcagaacaccgcccggtgtaaggcacagacaggagcctgtaaggggaatgaatggctgtgtgattccagccttatgggtgcctcggaggcacaagcgcatggagccctggggtgtgtgatgggggcactgtctggtcttaagaaactctcatgcccagagagccactggcccctggcacccacccctggccatagatcggctttgttaacgttcattgcatactttttgtccttaccacacagtgttcggaagtgagtttctcttttttcttttttttccttttttttttttttttttttgagacagtctcgcgctgttgcccgggctggagtgcagtggtgtgatctgggctcactgcaagctccgcctcccgggttcacaccattcttctggctcagcctcccgagtagctgggactacaggtgcccgccaccacgcccggctaattttttgtatttttagtagagacggggttttaccgtggtctcaatctcctgacctcgtgatccgcccgccttagccttccaaagtgctgtgattacaggcatgagccaccacgcctgtcctggcctttttttgagtcaggggtcttactctgttgcctagtctgtagtgcagtggcgtgatcaccactcactgcagccttgacctccccaggctcaggcgatcctcccaccttagcctcctcagtagctgagagggactacaggtgcatgccaccacacccagctaattttctgtagaaacagggtttcaccatgttgcccaggctggtccccaactcctgggcttaagcaatccccctgcctttgcctcccaaagtactgggattataggtatgagccaccgtgcctggctccctgagtttgatttctaatatctacacttaacgcagacctatctgtccctgtgaaccttgggctttccttcaaggccacgatctgatggagttacaggttttcagagacttgggacaaggagcaagacagtggataacccccggccccagcttgcatcctcttctctgatgttaaaggtggtcgttggctgggcacagtggctcacgcctataatcccatcactttgggaggccaaggcgggcagatcacctgaagtcaggagttcgagaccatcctggccaacatggtgaaaccctgtctctactaaaaatacaaaaattagctgggcatggtggcaggtgcctgtaatctcagctactcgggaggttgaggcaggagaatcgcttgaacccaggaggtggaggttgcagtgagccgagaccacaccattgtactcgagcctgggcaacacagcaagattctagtccccccaaaaaaaaagaaaagaaaaggtggtcgttaggggcagggaggcgagagaaatggctcctgagatgatgctcagccatctccctgctgccagcacacagccatgggccttaatatgctgtgaatctccctcagctgtcacagcaggaggggccatcataacatcccaaagggtccagggctacgactgaaactgttcctggcactccctagagcctctgtccctgtacagtgtgtcatgtgcatagttcccctggctctgtggaggcggcttggcgccgtgggaagctcagtgcattggagctggggccacaggaggcccccacacagagctttgctggatgcattctttgttcaagccctgtgtgagcagtgcctttccctggtcacctgagcagccttagagggaaccggagctccccagcctgaaaatgatcggggcgggaaggtactatctggttgtgtcactatgcaagcagttttccagggcctttgcttatcagccctcccctgggaacccctgtgtccctcagatgttcctttggggtctcctcatgctccacacagtagtccaggccctggacggcctccttccccacccctctccactgatttgatgcagcagctgcctctcccagctggggtgcagtgccccgcccctggtcctcccaaacactgctcttgctccctgtcaacatgtggaacccatgtttccccacccggaaaatagcgccctgagccccatgtgcccagcaccacatcagagttactgtgcttcgggggcagtgagtgcctgtttatcatccctaaccacaaggaaagaagggtgcacccagtttaactagagtgggtcagagaggttgggtgggccttggagttagcaaaacacagcatctcacctgctaatggatggcagtggtggccacatgcgcgtgattggtggcctctgctgtgtggcacaggtgagggcctcctggggctcagcagtgcagcggacgcacgaaggtcacacgtgaaggaatggagacccaggcccagcttgatgcttaacccccacccctgaacctcctgcagtttgggacataaacgtccctggggagcagggtctggtcctgtgttttttttcagagcttgtgtggggaggggcacacaggtgggacccaaaggtggggctgtggaagcacatgagcccggatgggacatgtgccctggcatcctctgtttttttttgacagggtctcactctgttacctaggccggagtgcaatggtgcagtcacagctcaccgcagcctccactcctgggcgcaagtgatcctcctgcctcagcttcctaaggagctgggagtatagaggcacgtgccaccatgcccaactaattttcaaatattctgtagagacagggtctatgttgcccaggctggtctccaactcctgagctctagcgatcctctctccagcctcctggcatttaataaagctgctgactgatgcttctgcacccaaggggagggataagccattcatctgcaagtggtgtacatccatattttttactcggttacactttttttcccaatttgaaagttttcatcttttttattttattttattttattttattttgacagagtctcgctctgtcgcccaggctggagtgcagtggtgcgatctcagctcactgcaagctccacctcctgggttcacgccattctcctgcctcagcctcccaagtaggtgggactacaggcgcccaccaccacgcccagctaattttttgtatttttttagtagagacggggtttcactgtgttagccaggatggtcccgatctcctgacctcgtgatctgcccgccttggcctcccaaagtgctaggattacaggcgtgagacaccacgcccggcatcttttcttgttgttaaattagaaacagggtcttgccctgttgccctttattattttaggttcaggggtacatgtgcaggttggcaaactcatgtcacgggggtttggtgtatagatgatttattgggtactaaggtattttttctgaatttctccctcccaccgtcacataggctccagtgtctgttgttcccctctttgtgtccacatgttcttataagtgagagcatgtgatatttggttttctgtgcctgcgttagtttgctgaggataatggttcccagcttcatccatgttcatgcaagaagaggtttttttgttttgttttgttttgttttgtagatattgggtcctgctgtgttgcccaggctggtctttgaacttgtgggctcaagcaatccacctgcctcggcctcccaaagtactgggattacagacctgagccagggagtctttaaatctttttacttagagctcaaaagagatattcttaaggcattctgacctagtggggtgaagtgccatgtatctgtgaagccctaggacacctcaactcttcgggcctccgttttatttaaaaattttaaaatacaaggaaggatgtgtttgcccttgccaacaaaacattatgtgatcaaaataaaactaaagaagcatagatggccgggtgtggtggctcatgcctgtaatcccagcactttgggaggccgaggtgggtggctcacaaggtcaggagattgagaccatcctggctaacatggtgaaacccgtctctactaaaaatacaaaaaattagccaggcgtggtggcggctgcctgtagtcccagctactcgggaggctgaggcaggagaatggcatgaacctgggaggcggagcttgcggtgagccgagatcgcgccactgcactccagcctgggcaacagagcgggattctgtctcaaaaaaaaagcatagatggctgggtgcagtggctcacgcttgtaatcacaaaactttaggagaccgaggcaggcggatcacttgagaggccaggagttcaagaccagcctggccgacatggtgaaaccccatctctaaaaatgcaaaaattagctgagcatggtggtgcacgcctgtaatcccagctactcaggaagccgaggcaggagaatcacttgaactcaggaggtggaggttgcagttgagccgagattgtgccactgcactccagcctgggcaacagagcaagtctgcgtctcagaaaaaaaaaaaaaagacaaaaaggcacaaatgttagtgacaccatcttcatcccatgtagtcgttaaacgttttcctgactcctgttttccgtagtctgcgctcctccgtgtctgtgtttagcacttgcagtgctgctggcgagatgacagctgtccccgtgaagcaagctgccggcagctcagcacagtgggactcggtgttatgtgttaaatcctgtcttcagcctagagggtgaagagtggtgattgctctgaaaaattttggatccaagaaaagcctaatgtgtcaacgcgtctcctgtgtggagggagggcccagtgacttgaggtggctctgaagaaattggcatgttcttttgtttaacgtccccagacacctccagatcagaatgtccctcctcagcagcgtctacaggggactcttagactcttctttgcttaactattctttcaaaaaggtagttgaaaatggccgtaggccaggctcagtggctcatgcctgtaatcccagcactttgggaggctgaggcaggaggatcacttgagaccaggagttgaagggtgcagttacctgtgattgcaccactgcaccacagcctgggtgacagagcaagatgtttctcctgtgtcctcacagggtcaacccatgctgcctggggagagggacagcctgggctcccagccactgaagagaggatccaggaggggagcccctacccaggaattgatgaggctacggtaggaacccagtctgcctggccaggcactgtgctcttacatgacagcccatgaaaccagtctatggcctgaccgttgtgttgctgtgcggtcacttttctaggtttttgtagaggaagaattcctggaattttttgaggactatcctccctactgaaataagtgtggctgtctgtcctgggatgggcttgtgttcatgcacagagagggtaagcactgacgtggaggctcatggtggcctctacgcatcctgtctttctcctttggtgaaagcaaatggaaacagctcaggaatcttactagggtcaggtgcggtggctcacaccttgtcatcccagcactttaggaggccgaggtggaaggatggcttgagcccaggttgagaccagcctgggcaacatagtgacacccccttgtctctacttaaaaaaaaaaaaattagctgggcgtgatggcgggtgcctgtagtcccatcttctcaggaggctgaggcaggagaatggtgtgaacccaggaagtggaatttgcagtgagtcgaggtctaaaaaaataataataataattcacaagtcacagtcatcacttcacatcagggacgtgttctgagaggtgtcctcaggcaatttcatggttgggtggggctaggttgctcttacacatcctagatggacagcctgccacacgcctgggccgtgtggtacatagcccagggctcctgagctgtggacctgtgcagcaggtgactgactgctccatcctgcaggcacttgtaacccagtggtatatgtgtctttaacatagaaaaggcacagcagaggccaggtgcggtggctcatgcctgtaatcccagcactttgggaggctgacgtgggcgaatcctgaggtcaggagttcgagaccagcctggccaacatggcgaaacccccgtctgtactaaaaatacaaaagattagctgggcgtagtggcgggcacctgttaaaaaaaaaaaaaaggcacagcaaaaatatcgttgcggctggggcagtggctcacgcctgtaatcccagcactttgggaggccaaggcaggcggatcacttcaggtcaagagttcgagaccagcctggcaacatggtgaaaccccatctctactaaaaatacaaaaattagccgggtgtggtggcaggtggctgtaatcccagctactcaggaggccgaggcaggagaatcacttgaacctgggagtcagaagttgcagtgagccaagatcgcaccactgcactccagcctggatatatggcaagactctgtctcaaaatttatatatattaaataaaaatacagttgtctgtaatcccaggactttgggaggctgaggtgggtagatcataaggtcaggagtttgagaccagcttgaccaacatggtgaaaccccgtctctactaaaaatacaaaaattagctgggcgtgatggcatacacctgtaatcccagctactcaggaggctgaagaacgagaatcgcttgaacccgggtggcggaggttgcagtgagctgagattgtgccactgcactccagcctcagtgacagagtgaaactcccgtctcaaaaataaaaaataaaggccaggcatggtggctcacacctgtaatcccagcactttgggaggctgaagcgggcggatcacgaggtcaggagatcaagaccatccggataacacgatgaaaccccgtctctactaaaaatacaaactgggcgtggtgtcaggcgcctgtagtcccagctactcaggaggctgaggcaggagaatggcgtgaatccgggaggcggagcttgcagtgagtcgagatcgcgccactgcactccagcctgggcaacagagcgagactccgtctcaaaaaaaaataaaaataaataaatacagttgtaatctgatggggccactatcaggtatgcggcctgtcactgactggaaattattctgcagttggcaatgatggctgtttttggagatctgaatccagttcatttgagggaacccccaaggttctctggttgtggcctcttgaataaacctctcacatttggacagtttgttaccaaattgggttctggatgttggtttccttccgtgttgggggtgggaggaaggtgtcacacctgtggagttccccccgctaccgcactggcaccagggtggctgctgcctgcagtgctgatggccgtgtaccctgtctgtccagattggtgctgaagacatggacggcttccaggcagacacggaggaggaggaagaggaggagggcgactgtatgatcgtggatgtcccggatgctgtgggtgagaagggctgtagatagcagaacgcactggtgaggtgggcgctggaggtaaacctcaacagagaagggatggggctgcctaagactagctccactgtgagcagccaggagggcttgcagctggaagtggctcctgccctgccacatcctcgggcgggctgggccgtgggtgctgaccatgccaggcaccgttctggccgcagagccacaagggcctatgctgggagtctcaggtggttgtgacgttagatgggggtcagggaaggctgcactgaggcagcaagggagggccaggtggatttctggagcactcgccaaagaggaagtacagaggccctgcagcaggctgcgtgggaggagtgtgcccgggtggtggggggcaggcagggtcaacctgagagcaggtgagcaggtcacctctagaagaggcacaacgccccagcctctgcctgtccccactgtcaggtggagggtcccgccctggggttgttgcaggccccatgaggcagcagggtggggtcttcccccagggagcccagagggcccagccagctcaagaccctccctctcttgccctgcagaggtccaagccccgtgtggagccgcttccggagctgggggtggtgtgggggtggacaccggcaaggccaccctgaccgcgagcccactgggtgcatcctgagagcaggggtgacgtatgtagaacgcttagggtgtcctccccacagagcagatacttgaaccgactcaattcctgtgtaaagagcactttgtcctgcttcacggacctccccaaagtgtgcagagttctatataggatgctggattagttcctttgatatttgtaaaaattcccccaagagccgcatatgaatctgccctttaataaagcattattgagattgctggcctattggggaagcctgcgggcacaggagcaggcgtggaatccaatacttgtaaatgaattgaagcgtcaggaccacccgcctggccacgtgcgcgggcccctggacctaacgaggcagtgtataaacttattctctagccctgagctgctctgtctgtcttttccgaaaacattgtgtttctctgagagtgcaccttgcccatggcccggccccatgtggtgcctggtgtctggggccagccttgtgccctgcaacagcaccgtcccatctgtttgtcactaagtcaccctcataccaggctgacctgggtcaaggtgcgggtttttccgcacgtgcttctgtccggcgatccctcctgccctgggttggggggttaggagagggtgttcccagagacctgctagggtcacctccctgaacccggagctgctgggagccgagtttggcttcgagtctgaggctttgtgagagcccaccccaggtcaggtgcatcttttgcgagtgctggagctagaaggtgacctcctccccgccccaggttgagtgggctttatccacactgtccgagggaggacaggcgacagccgctgtggtactgagcagctcagagcacacgcagccacggggagggtcacgctcgccagtcctgctcttcccagccacaccccacctgaagtcctaagcttcccttcagggaaccctatgtgggaaaagtgtcagctacctccatccacccagtcagggacggcagggcgcccgggccaggccttcctgctgggaagcaggattcagctgtgcctgaagcagaggctgcccctgtgccacacctttgatgagctttacaggggctcccgacaacccggaatcaggtcctggggcctgcaggacgcaggactggagtgacagcctccattctcaacaggccgggtgcccacaccagctggggcagtgccgggggcgagggagggaccaatgcaaggtcaggggcacgagcataggccccgggcacctcccccaggtgcagacctgcatccccaagtcagcagtggggccggggcacacatgccttccacactgcagggcagagtccctgtgtctcctggggctgctgtaccacaaacctggtggcttaaagcaagtcaccatctcacagcttgggggtcagagtgcacacatgccccgccaggctaacatcaagctgtgggcaggaccaggccctcctggagagtttcccagtgctcataggcgctgcatccctcagctcggggtcccttcctccaccttcacagccatgcgcagcctcttccagtctctctctgattcaccctcctgccacctcttgtgaggacactgggtcccggaccacccaggatcatctcccagctcaagacctttcatcatacccaagcccctcttgccaggtgaagttgcgcatctgcaggttccaggaataggatgtggccgtctcaggacaccctgtccctctggccacagggaagccaggcctgtgacagcactcgcctcccctgcagggactgggcctttgtgggcacagcacagcctcccctagcgcacgggacttcctccccaggtgggtggctcatcgggcacttgtggccaggtgctggcctgagaacaggtatccacatggtcccaccttgacagggagccacacccagcccccaagccatccgctctgcagcaggtgggcctgccctgtgtcccacggtttcaacggagaaccaagaaactatattcaaacaacctgtttatttgggcttatgatttactaactgcaggtctatgtgcaggaaggccagcgtcccctcctgccgttgtcacccacatccacagagcagccctagtgccaggtgcagccactgccacccacggcacacgggaacgggacccatgctgcaggcctgctctcctgcccagggagatgccacgtgtgtctgtccggcagcttcatgacacagttaccaagcagctagggagggcttagatttgttggtgtccccaggcctctccctcgggggcttgggcgcatccccacagcccccaagggatgggggctctgccacggggcccaattccacagctccacggctggcgcccctcccgtgcccatggggcagagccaagtatttccagaggtggcttggaggccctggggtggcggggagaggaacagggagagcatgagacagacccacagggctgaggccaaccctgcttttatttcacaagagcttctcgatggctgacaggagctcgggtttcaggatggagtccggctcggcccccgcggccttgatgtcctccagcacagccatgtcccacgagaaggtcaggagggcagagggcacctgcggtaggggtaggccgtcactctgagaccgagagtcggcccttgccgcggcagggaactcagcgggcaacctgggcgcggggatgccccggcctggaagccatctcagctggtggaggctgtggctcgcacccaggcctcctgccctctccctccgggactccaggacctaagcctaaacctactgcactagctaacgcacgtcaccgctcccatttgatggggaaactgaggcgtggagtagttatgaacttgctcgaggccctgctgccagtaagtgggaaagcaggattcaaacccagggacctgcccaggccccctgctctgagaacaaggaggctccctcctgggggtgtctgtgccggtcccaggagaacctgcagaggcatcgggtcagcggtgctcctgcgggccgacactcaccagcccgcactcgttcaaggccaggttctcgtcctcggacagcttctgccctcccgaggccagcagctcaaaaggcagccagtcgctctgcagggcctcccggacgaacccgtacaccgcccccagccgctcccgagcgtagaaagtgcctggggagtgggggagtcagagcgggtggggcccagggccccctaccaacccgagccgccctccacgggcatcgttggtgcccaccctgcaggaggcagccatcggggaggcgcacgcgcagcagcgtgtagttgtacttgcgcagcccccgctgctcctccttctcccgcatggccttggtccgcagcacgctcagccgctccaccgcctcggacctgcacacgcgggccaggtcatgagggctggccggggttcttccaccccgccccgccccactctgctccgcggacgtcaggcccacctgagcctctgctcccgcttgatctcctctgctgtgaggttgaagaagtccccaggcagttcgaactgcgaggccaggggcgagggctggaagacgcggcgctgcctgtccagcttggcgcgcacgggctccgcagccagcagctgttccttgtgcctctccaggctctggggctgggccaaggtggtctcgctcagcacgtagaactcctcggggtcctctacagcgtggcaggacatgggtgtcactgtgcaatggagagacccccaagccgggccctcctgccccgaggcccctcgtccccattccctactcagccaggccctgtccacttaccctgatcctgggcgggaagcaacaccttctggaacccaatggcctcaaaaaactcgtgggtcccttccaggcagttaatgcgctcctgggggtggagatgggcgtcactgggggcccctggcttcctccatggcctggccacaccccacccagtccaggggctcggctctcgctattgggagcagctgtcgacccctggatggggcccagccctgggggtgcctcagtgctggatgcaaacctgcttttctacggtgggggctgtggagtctccaacagctctgcacagaggaaagagtcacaaccaggcacgaagagtgaggctgaggagccagacactgctggggcctgatgcgaggctaacaccgcccaggaccccagtccctgccctttcccccagaagaaccagacatctggtttgcatgagaaacctccccagagtcgacatgttcccaaacaagcccagctgaagaggaggaaaaggatgcaggtgaggagaggcagaatttgttgatttggggtgaccggtgcataaaagtcttgctctccatcttgtcctgctaccttctactggccgaacccttcactgcttgtggctcaactctcgctagctcctccagggagcccaccgcctggtgtgggccaccaccggctcctgcaggccagctgcccccacccccagcctgggccccgggggccagaaggcacgcccacctgaaacaccttgttctgcagcttgatcttccggtacttctcctcctcggggtgcaggtggatgttgtccaggtacctggggtaggtggagaaggtgagtggggcacagcccaggctgcccacccggcccctctgtgcctcctgctccaggtaacagcagctcagccacacttggcctctagtcagagggaagaagcggcccagtgacgcgagggcagcagaccatctccgggtggaaggcacacctcggacaccccatggagcccacccctggtgccagcaggagccccacggaacccctcaccgtcccaccagccctggaagggcacaattaaccacagcggtggggaagccacagtgccggaagagtggagagccagagctgaagggccgcagtgccagcagggggctcctgcggggtgctccctcggcgttggcgggcagcgtggacctccaggcctgcccccgatcctgagacccggggagtggggtgggaccctgcctcctccacatgttccccaaggaagccagggtgggaaacccctgattccttcaacaccttcattttgcacacgggtaaactgaggcccaaggaggcccagccctttgcctgaggcctctgggtggagctgcctcactctcggcctatgctccttcccaacccacctcagcaggtaatgagggggccagagggggtgacagccccagtgggaggggtgctgggatgagctggaggggccaggcagggcaaaggggccacacgctcacttggcaatggtgtccacacccagcttcacccggtcctggtctttgttgaacgtgtagatcttcatgatggaggcggccactgggtcggtggagaagtgctgggaggagggaagcagggaaagccactcactgagagcccgggccgcacggccctccgctgcccaggtaacaggggcaggaaaaggaaggcagaacagcggcttggagcggccccagctgtgcgctcatcacagaaaggaaaagagagaccctccaagaccgcagccctgcccacgccccagggcagaggcgacgcagccaagacccagcagaactcaagtctccccttccgccttctcaaggctagatccatgggacttggaagccagtgtgacgcgacagaactgtgcctcacactctggctttagaactcgacctcagtgctgagatccatcaaggccaccgccacttacagaacctcccgccaccatggacgccccatccctcctgctctcgcagccccatgatggacgttctggaaccactcccgggcctcatgtttacaaagagaccgagaggcccatcgtccagggtcacagggatggcaggtggcagagaggacacaaatgagtctgcaaccctcaatgtctgaaactcaatagctggaagacggatacccccagcccctgcccctccccgaggtcccacctatccacctatgttaccgggggaggggagaagtcatagctggaactctgggggtttcccagaaccagccctgctgactgcgaacagcgtcccagcatggagaggctgagaacagtacgtaccctaagacctggaaaagattggggcacaaatccacgctcggcacagccatcacacacggccacacccagagagccacccatggcctgggaagcagggctgccacccgcacctccctgggctgcccagatgagggcgggtgaacagaagggcagcccagggccatgtgtcaggattcgggccacctgcccaggcagcccagagctccacccaccaccccccaccctcaactgcacagcagggtccctcagcagccccctgcgtcacacggaccaatgacctacacactgagccggggctcatgccaactgaaaattgggacccggcccagtctgccggtttagttgctgagatgatgtggggagcgggacagagcacgtggatgcagagaggcagagctgccagatgggcatgtccccaagacaacagcttccttgggatcagagcgcccgggacagcacaccagccaagggaagcgtgtcagctccaaaagcgggcctcgggcgttttgggcgactggctgccaggcttaggtcaggagctgggtacatgcacagacaagggacgaaggaacagcagccaggaaggggtccaaatccatacaggaatgtactttgtgagaaaggtgggatttcacagctgtaagcaaaagacaggtgctctcgacaggtggggctgagaagaaaactgagccaagatctaaaaaaaaaattacatcagctccatcccaccatgttacataataacatgctccagctggatcaaagcttcaaccatggaaacaagcaagcagtcaaggagaagccagaagaaaagctctggaggccgggcacggtggctcatgcctggaatcccagcactttgggaggccgaggcggtcggatcacgagattaggagagcgagaccatcccggccaacatggtgaaacctcatctctaaaatacaaaagttagcccgggtgtggtggcgtgcacctgtagtcccagctacttgggaggctgaggcaggtgaattgcttgaacccgggaagcagaggttgcagtgagctgagattgcgccactgcactccagcctggtgacagcaagactctgtctcaaaaaaaaaaaaaaaaaaagcactggagaggccacaaaagaattctctcagcatggaaatggggaaggcatttctaagaatgaccccaaacccaaaagccatgaactaaaactgacacatttaattatacagagatcaaaaaatcctacacagcaaagtgaccataagcagagccaacatagaagcaactagagggaaacatgtgcaactcatatcataggcaaaagcctaaattgcctaatatgtaaagagtgctgccgggcacggtggctcccgcctgtaatcccagcactttgggaggccgaggcgggcggatcacgaggtcaggagatcgagaccatcctggctaacatggtgaaaccccgtctctactaaaaatacaaagaatcagctgggcgtggtggcggttcgcctgtggtcccagctactcgggaggctgaggcaggagaatggtgtgaacctcgtaggcggagcttgcagtgagcagagatggcgccactgcactccagcctgggcgacagagtgagactctgtctcaaaaaaaaaaaaaaaaaaaaaaaaaaagagtgcctacaaatcactaataaaaagacaaactatctactaaataatgtagaaaggacgcattctcatatgaaacatggccaatccaaaataaggaaagtgcaaattaactctatcctgagatgttattttcacctaccaacaggcgtaaagatcaaagtttggtgatttacagtatggtgagaggatggggacacgggtgcttttgcacacactgctggagtgggtgtgagtctggagagtctatggaactattactattttgttttgttttgtttttaagatgaagtttcgctcttgtcacccagtgtccacgctggagctcaatggcgtgatctgggctcactgcaacctccacctcccaggttcaagcgattctcctgcctcagtctcctgagtagctgggattacaggcgcctgtcaccacgcctggctaatttttgtatatttagtagatagggggtttcactatgttgaccaggctggtcttggaacttctgacctcaggtgatccacctgcctcagcctcccaaagcactggaattacaggcaagagccaccgcgcccagccacttactattttctgagaaagggtctcacttgtcacccaggctggtgtgcagtggcatgattacagctcactgcagcctctacctcccaggctgaagcaatcctcccacctcagccttctgagtagcagggactgcaggtgcacgccaccatgcccagctatttttttttgtttttggcagagacagggttttgccatgttgccctggctaaagccgaagtttctgagaacctattgatggtgttaagtgaggacttgctgtattggaaaaaaatgctgtggacgtttttattttttgagatggagttttgctcttgttgcccaggttggagtgcaatggcgctatctcggctcaccacaacctctgcctcctggattcaagcaattctcttgcctcagcctcccgagtagctgggattacaggcatgtgccaccatgcctggctaattttgtaggaagttctttctgtattgaagcaaataatacttaaccttttatgaaaaacaaccaggccacgcgtggtggctcacgtctgtaatcctagcactttgggaggctgaggcgggttgatcacttgaggcaaaagttcgagaccagcctggccaacatggtgaaaccccatctctactaaaaatacaaaaattagccaggcatggtggcaggtgcctgtaatcccagctacttgagaggctgaggcacgagaatcgtttgaatccaggaggcggaggttgtagtgagccgagaatgcgccactgcactccagcctgggtgtcagagtgagactccatctcaaaaaaaaaaaaaaagacacctagttgggagagaggagatacagatgcatacacaatggtgtgcctggatttggggtatcagaggaggggcttcactactagcagtggcctctggggactctgggagggatctgtaccacctgggcttccgatggagggtggctcaggcacaggaagctacaggttggggcaggagcacacagggtgccactcaccaagagaatggcctccttgatgcaggcgtcccgctggtccttcctcagggtggccccagtgagcggacaggtgaagtacacgccaggcacagccaggtgggcagagccttcctctctgggctcagatacctggggcagtgaaagcgtccaagtctggaccgtggacagaggccaccccgaccctcgccgagcaccacagtcctgagtgtggcccgtagaaccagacatctccagcccccatgctgtcccttccacctggtggccgtgggagacaccctggccaagtgaccggatccccgagtcttttccctggtatgtcaaatgtccctgtggggcctgctcagaactaaacgaggtaaggaacggaaagtacggagcagcttctgacacgcaggaaacacccagcagatggcagctgggttcctgctggtcctgtccccaagctgttgaggaaggagctctgtgtgggtgtctgcgggcacagtgcgctggacaaggcatgacttctgggcctccatttctaggccatctctaaggtccctgcgtgctaaaattcactgaatcctcgagggtcaagctgcttagaactcctttcagcggagctctgaaggcccacctcctagaggaaggcctccctgattccacccgtctccacagagcctcttgacctccaaggcaggcaggactgggcagtgctaggggacaggctctgaaaccacagactggctctggtcctgcctttgctggtcctggggtgtaggagagaggacagctggtttcacctctctcaaccccggttctctttttgaatagtggaaactgtaactgcatctgcccttaaggggttaaggggagggagcgatgggcttgtgtacctgaggcccacttctccaggcctgagccggcatcctcagctgccgagccccgaaggtcccagacaacaccgtgttccaccacaacctgcctccaccttgcaaggcaaggttttccaacagcccttgagccccaagggcagaggccacatctcccccgtgacacagtcaagctgtccccaccccttggcatgggacagtgccaccagtggctgttcttaccacgttggtccctggggcctcggggctcccgctgacggtggcttcggcttgaagttcctttctcactggaaggcagcccaagaaagagaggcagagacgggatagtgagcacgccgctgtcctggcccaagccccctcattcccggggtgggcctgggggccacgcacaccgccccagcctgcttctgctggaggtcaggctggaggtcccctgcaggacttgctgtgcagccacccctcagcctgagcaagcaccccactgcctgggcagcccgtttctgctccaagtctctgctcccaccccctccccaggaagctgcccttcccccagcacctgcccttgatgagccgctcccaagggtgaccctcacacccccacggttgctcatgtgacttctgcatccagggccgagaacctcaaacagccccaacctgggcccgaggagggccatatctcaccctggtttcggatggtgtcctgcgatgtggggccccaggcccgggactgcttctgctccagccgggctagggcggcagcggctgccatctgtgcctcattggtgggtccctggcggggcggcctgggggctggctggttgggcttctctttgtgggccttttccctgggaacagaccgagggagagtgagtgtatcctcccgaggtggccggcaaagctgacgtgcagtcacacagaggagcttctgcccctccccagcaccatcagccagacgtgtccctgcctatgtgggccaggacacctggttcccaggggccacctgcagccaccagatggttctactgcaggcggaagagcccctggaggaaggagatgctggttccactcagctctgcaccatcgggcaagtcctgcccccactggccctcagcgtcctcatctgtaaaatggggtgacagcacccctcctgaggtgaaggcaccttgacatcctcagtgctttttttctttttgagacagggtcttgctctctcaccaaggctggagtatagtggcacgatcatggcttactgcaatcctgagctcccaggctcaaggaatcctcccgcctcagcctcccaagtcgctgggacttagaggcaagcatcatcatgcctggctaatttttctatcgagacagggtctcgctatgtagctcaggctggtctcgaacttttgcctcaaatgatcctcccaccgtggcctcccaaactgctgggattataggcatgagccacagcacccagcccgcatcctcaggaattgaggagactcaaggggtgtcacatcctccctccctccctgccataagactctccaccctcaggtcacagcttcgtttgctgagcacctactgtgtgccgggaccctgctgggagctggtcggctcgcttggtttactcctcctaacaagctgccagggaggcctcaccatcccattcctaaacccaagagggacaggaagtccgggcgatgtgccccatgccacgccaccctcgtggcgggaccctggggagagcggacagcagaaccagcctcgccctggccactccatgccaggcctagggctgtgcaagtacgaagagctcatggactcgtggctccaccctgttgagccctacaccaaggagagttccgtaacccacgtggcacagtgacctggcagagaagcctcgcagagaagccctttctcccaacctgctcggacgcgtctgtctcacccgtctcctctcaggcccctcccatgaacttacgggctgtgtcaatttctgtgccgtaggtctattaaaaccttctgggaggccaggctctcagttcaagcccta

SEQ ID NO: 9825 - DNA, 12210 bp, Homo sapiens
ggagaaccaagaaactatattcaaacaacctgtttatttgggcttatgatttactaactgcaggtctatgtgcaggaaggccagcatcccctcctgccgttgtcacccacatccacagagcagccctagtgccaggtgcagccactgccacccacggcacacgggaacaggacccatgctgcaggcctgctctcctgcccagggagatgccacgtgtgtctgtccggcagcttcatgacacagttaccaagcagctagggagggcttagatttgttggtgtccccaggcctctccctcgggggcttgggcgcatccccacagcccccaagggatgggggctctgccacggggcccaattccacagctccacggctggcgcccctcccgtgcccatggggcagagccaagtatttccagaggtggcttggaggccctggggtggcggggagaggaacagggagagcatgagacagacccacagggctgaggccaaccctgcttttatttcacaagagcttctcgatggctgacaggagctcgggtttcaggatggagtccggctcggcccccgcggccttgatgtcctccagcacagccatgtcccacgagaaggtcaggagggcagagggcacctgcggtaggggtaggccgtcactctgagaccgagagtcggcccttgccgcggcagggaactcagcgggcaacctgggcgcggggatgccccggcctggaagccatctcagctggtggaggctgtggctcgcacccaggcctcctgccctctccctccgggactccaggacctaagcctaaacctactgcactagctaacgcacgtcaccgctcccatttgatggggaaactgaggcgtggagtagttatgaacttgctcgaggccctgctgccagtaagtgggaaagcaggattcaaacccagggacctgcccaggccccctgctctgagaacaaggaggctccctcctgggggtgtctgtgccggtcccaggagaacctgcagaggcatcgggtcagcggtgctcctgcgggccgacactcaccagcccgcactcgttcaaggccaggttctcgtcctcggacagcttctgccctcccgaggccagcagctcaaaaggcagccagtcgctctgcagggcctcccggacgaacccgtacaccgcccccagccgctcccgagcgtagaaagtgcctggggagtgggggagtcagagcgggtggggcccagggccccctaccaacccgagccgccctccacgggcatcgttggtgcccaccctgcaggaggcagccatcggggaggcgcacgcgcagcagcgtgtagttgtacttgcgcagcccccgctgctcctccttctcccgcatggccttggtccgcagcacgctcagccgctccaccgcctcggacctgcacacgcgggccaggtcacgagggctggccggggttcttccaccccgccccgccccactctgctccgcggacgtcaggcccacctgagcctctgctcccgcttgatctcctctgctgtgaggttgaagaagtccccaggcagttcgaactgcgaggccaggggcgagggctggaagacgcggcgctgcctgtccagcttggcgcgcacgggctccgcagccagcagctgttccttgtgcctctccaggctctggggctgggccaaggtggtctcgctcagcacgtagaactcctcggggtcctctacagcgtggcaggacatgggtgtcactgtgcaatggagagacccccaagccgggccctcctgccccgaggcccctcgtccccattccctactcagccaggccctgtccacttaccctgatcctgggcgggaagcaacaccttctggaacccaatggcctcaaaaaactcgtgggtcccttccaggcagttaatgcgctcctgggggtggagatgggcgtcactgggggcccctggcttcctccatggcctggccacaccccacccagtccaggggcccggctctcgctattgggagcagctgtcgacccctggatggggcccagccctgggggtgcctcagtgctggatgcaaacctgcttttctacggtgggggctgtggagtctccaacagctctgcacagaggaaagagtcacaaccaggcacgaagagtgaggctgaggagccagacactgctggggcctgatgcgaggctaacaccgcccaggaccccagtccctgccctttcccccagaagaaccagacatctggtttgcatgagaaacctccccagagtcgacatgttcccaaacaagcccagctgaagaggaggaaaaggatgcaggtgaggagaggcagaatttgttgatttggggtgaccggtgcataaaagtcttgctctccatcttgtcctgctaccttctactggccgaacccttcactgcttgtggctcaactctcgctagctcctccagggagcccaccgcctggtgtgggccaccaccggctcctgcaggccagctgcccccacccccagcctgggccccgggggccagaaggcacgcccacctgaaacaccttgttctgcagcttgatcttccggtacttctcctcctcggggtgcaggtggatgttgtccaggtacctggggtaggtggagaaggtgagtggggcacagcccaggctgcccacccggcccctctgtgcctcctgctccaggtaacagcagctcagccacacttggcctctagtcagagggaagaagcggcccagtgacgcgagggcagcagaccatctccgggtggaaggcacacctcggacaccccatggagcccacccctggtgccagcaggagccccacggaacccctcaccgtcccaccagccctggaagggcacaattaaccacagcggtggggaagccacagtgccggaagagtggagagccagagctgaagggccgcagtgccagcagggggctcctgcggggtgctccctcggcgttggcgggcagcgtggacctccaggcctgcccccgatcctgagacccggggagtggggtgggaccctgcctcctccacatgttccccaaggaagccagggtgggaaacccctgattccttcaacaccttcattttgcacacgggtaaactgaggcccaaggaggcccagccctttgcctgaggcctctgggtggagctgcctcactctcggcctatgctccttcccaacccacctcagcaggtaatgagggggccagagggggtgacagccccagtgggaggggtgctgggatgagctggaggggccaggcagggcaaaggggccacacgctcacttggcaatggtgtccacacccagcttcacccggtcctggtctttgttgaacgtgtagatcttcatgatggaggcggccactgggtcggtggagaagtgctgggaggagggaagcagggaaagccactcactgagagcccgggccgcacggccctccgctgcccaggtaacaggggcaggaaaaggaaggcagaacagcggcttggagcggccccagctgtgcgctcatcacagaaaggaaaagagagaccctccaagaccgcagccctgcccacgccccagggcagaggcgacgcagccaagacccagcagaactcaagtctccccttccgccttctcaaggctagatccatgggacttggaagccagtgtgacgcgacagaactgtgcctcacactctggctttagaactcgacctcagtgctgagatccatcaaggccaccgccacttacagaacctcccgccaccatggacgccccatccctcctgctctcgcagccccatgatggacgttctggaaccactcccgggcctcatgtttacaaagagaccgagaggcccatcgtccagggtcacagggatggcaggtggcagagaggacacaaatgagtctgcaaccctcaatgtctgaaactcaatagctggaagacggatacccccagcccctgcccctccccgaggtcccacctatccacctatgttaccgggggaggggagaagtcatagctggaactctgggggtttcccagaaccagccctgctgactgcgaacagcgtcccagcatggagaggctgagaacagtacgtaccctaagacctggaaaagattggggcacaaatccacgctcggcacagccatcacacacggccacacccagagagccacccatggcctgggaagcagggctgccacccgcacctccctgggctgcccagacgagggcgggtgaacagaagggcagcccagggccatgtgtcaggattcgggccacctgcccaggcagcccagagctccacccaccaccccccaccctcaactgcacagcagggtccctcagcagccccctgcgtcacacggaccaatgacctacacactgagccggggctcatgccaactgaaaattgggacccggcccagtctgccggtttagttgctgagatgatgtggggagcgggacagagcacgtggatgcagagaggcagagctgccagatgggcatgtccccaagacaacagcttccttgggatcagagcgcccgggacagcacaccagccaagggaagcgtgtcagctccaaaagcgggcctcgggcgttttgggcgactggctgccaggcttaggtcaggagctgggtacatgcacagacaagggacgaaggaacagcagccaggaaggggtccaaatccatacaggaatgtactttgtgagaaaggtgggatttcacagctgtaagcaaaagacaggtgctctcgacaggtggggctgagaagaaagctgagccaagatctaaaaaaaaaattacatcagctccatcccaccatgttacataataacatgctccagctggatcaaagcttcaaccatggaaacaagcaagcagtcaaggagaagccagaagaaaagctctggaggccgggcacggtggctcatgcctggaatcccagcactttgggaggccgaggcggtcggatcacgagattaggagagcgagaccatcccggccaacatggtgaaacctcatctctaaaatacaaaagttagcccgggtgtggtggcgtgcacctgtagtcccagctacttgggaggctgaggcaggtgaattgcttgaacccgggaagcagaggttgcagtgagctgagattgcaccactgcactccagcctggtgacagcaagactctgtctcaaaaaaaaaaaaaaaaaaagcactggagaggccacaaaagaattctctcagcatggaaatggggaaggcatttctaagaatgaccccaaacccaaaagccatgaactaaaactgacacatttaattatacagagatcaaaaaatcctacacagcaaagtgaccataagcagagccaacatagaagcaactagagggaaacatgtgcaactcatatcataggcaaaagcctaaattgcctaatatgtaaagagtgctgccgggcacggtggctcccgcctgtaatcccagcactttgggaggccgaggcgggcggatcacgaggtcaggagatcgagaccatcctggctaacatggtgaaaccccgtctctactaaaaatacaaagaatcagctgggcgtggtggcggttcgcctgtggtcccagctactcgggaggctgaggcaggagaatggtgtgaacctcgtaggcggagcttgcagtgagcagagatggcgccactgcactccagcctgggcgacagagcgagactctgtctcaaaaaaaaaaaaaaaaaaaaaaaaaaaagagtgcctacaaatcactaataaaaagacaaactatctactaaataatgtagaaaggacgcattctcatatgaaacatggccaatccaaaataaggaaagtgcaaattaactctatcctgagatgttattttcacctaccaacaggcgtaaagatcaaagtttggtgatttacagtatggtgagaggatggggacacgggtgcttttgcacacactgctggagtgggtgtgagtctggagagtctatggaactattactattttgttttgttttgtttttaagatgaagtttcgctcttgtcacccagtgtccacgctggagctcaatggcgtgatctgggctcactgcaacctccacctcccaggttcaagcgattctcctgcctcagtctcctgagtagctgggattacaggcgcctgtcaccacgcctggctaatttttgtatatttagtagatagggggtttcactatgttgaccaggctggtcttggaacttctgacctcaggtgatccacctgcctcagcctcccaaagcactggaattacaggcaagagccaccgcgcccagccacttactattttctgagaaagggtctcacttgtcacccaggctggtgtgcagtggcatgattacagctcactgcagcctctacctcccaggctgaagcaatcctcccacctcagccttctgagtagcagggactgcaggtgcacgccaccatgcccagctatttttttttgtttttggcagagacagggttttgccatgttgcccaggctaaagccgaagtttctgagaacctattgatggtgttaagtgaggacttgctgtattggaaaaaaatgctgtggacgtttttattttttgagatggagttttgctcttgttgcccaggttggagtgcaatggcgctatctcggctcaccacaacctctgcctcctggattcaagcaattctcttgcctcagcctcccgagtagctgggattacaggcatgtgccaccatgcctggctaattttgtaggaagttctttctgtattgaagcaaataatacttaaccttttatgaaaaacaaccaggccacgcgtggtggctcacgtctgtaatcctagcactttgggaggctgaggcgggttgatcacttgaggcaaaagttcgagaccagcctggccaacatggtgaaaccccatctctactaaaaatacaaaaattagccaggcatggtggcaggtgcctgtaatcccagctacttgagaggctgaggcacgagaatcgtttgaatccaggaggcggaggttgtagtgagccgagaatgcgccactgcactccagcctgggtgtcagagtgagactccatctcaaaaaaaaaaaaaaagacacctagttgggagagaggagatacagatgcatacacaatggtgtgcctggatttggggtatcagaggaggggcttcactactagcagtggcctctggggactctgggagggatctgtaccacctgggcttccgatggagggtggctcaggcacaggaagctacaggttggggcaggagcacacagggtgccactcaccaagagaatggcctccttgatgcaggcgtcccgctggtccttcctcagggtggccccagtgagcggacaggtgaagtacacgccaggcacagccaggtgggcagagccttcctctctgggctcagatacctggggcggtgaaagcgtccaagtctggaccgtggacagaggccaccccgaccctcgccgagcaccacagtcctgagtgtggcccgtagaaccagacatctccagcccccatgctgtcccttccacctggtggccgtgggagacaccctggccaagtgaccggatccccgagtcttttccctggtatgtcaaatgtccctgtggggcctgctcagaactaaacgaggtaaggaacggaaagtacggagcagcttctgacacgcaggaaacacccagcagatggcagctgggttcctgctggtcctgtccccaagctgttgaggaaggagctctgtgtgggtgtctgcgggcacagtgcgctggacaaggcatgacttctgggcctccatttctaggccatctctaaggtccctgcgtgctaaaattcactgaatcctcgagggtcaagctgcttagaactcctttcagcggagctctgaaggcccacctcctagaggaaggcctccctgattccacccgtctccacagagcctcttgacctccaaggcaggcaggactgggcagtgctaggggacaggctctgaaaccacagactggctctggtcctgcctttgctggtcctggggtgtaggagagaggacagctggtttcacctctctcaaccccggttctctttttgaatagtggaaactgtaactgcatctgcccttaaggggttaaggggagggagcgatgggctcgtgtacctgaggcccacttctccaggcctgagccggcatcctcagctgccgagccccgaaggtcccagacaacaccgtgttccaccacaacctgtgtccaccttgcaaggcaaggttttccaacagcccttgagccccaagggcagaggccacatctcccccgtgacacagtcaagctgtccccaccccttggcatgggacagtgccaccagtggctgttcttaccacgttggtccctggggcctcggggctcccgctgacggtggcttcggcttgaagttcctttctcactggaaggcagcccaagaaagagaggcagagacgggatagtgagcacgccgctgtcctggcccaagccccctcattcccggggtgggcctgggggccacgcacaccgccccagcctgcttctgctggaggtcaggctggaggtcccctgcaggacttgctgtgcagccacccctcagcctgagcaagcaccccactgcctgggcagcccgtttctgctccaagtctctgctcccaccccctccccaggaagctgcccttcccccagcacctgcccttgatgagccgctcccaagggtgaccctcacacccccacggttgctcatgtgacttctgcatccagggccaggcaccagggccgagaacctcaaacagccccaacctgggcccgaggagggccatatctcaccctggtttcggatggtgtcctgcgatgtggggccccaggcccgggactgcttctgctccagccgggctagggcggcagcggctgccatctgtgcctcattggtgggtccctggcggggcggcctgggggctggctggttgggcttctctttgtgggccttttccctgggaacagaccgagggagagtgagtgtatcctcccgaggtggccggcaaagctgacgtgcagtcacacagaggagcttctgcccctccccagcaccatcagccagacgtgtccctgcctatgtgggccaggacacctggttcccaggggccacctgcagccaccagatggttctactgcaggcggaagagcccctggaggaaggagatgctggttccactcagctctgcaccatcgggcaagtcctgcccccactggccctcagcgtcctcatctgtaaaatggggtgacagcacccctcctgaggtgaaggcaccttgacatcctcagtgctttttttctttttgagacagggtcttgctctctcaccaaggctggagtatagtggcacgatcatggcttactgcaatcctgagctcccaggctcaaggaatcctcccgcctcagcctcccaagtcgctgggacttagaggcaagcatcatcatgcctggctaatttttctatcgagacagggtctcgctatgtagctcaggctggtctcgaacttttgcctcaaatgatcctcccaccgtggcctcccaaactgctgggattataggcatgagccacagcacccagcccgcatcctcaggaattgaggagactcaaggggtgtcacatcctccctccctccctgccataagactctccaccctcaggtcacagcttcgtttgctgagcacctactgtgtgccaggaccctgctgggagctggtcggctcgcttggtttactcctcctaacaagctgccagggaggcctcaccatcccattcctaaacccaagagggacaggaagtccgggcgatgtgccccatgccacgccaccctcgtggcgggaccctggggagagcggacagcagaaccagcctcgccctggccactccatgccaggcctagggctgtgcaagtacgaagagctcatggactcgtggctccaccctgttgagccctacaccaaggagagttccgtaacccacgtggcacagtgacctggcagagaagcctcgcagagaagccctttctcccaacctgctcggacgcgtctgtctcacccgtctcctctcaggcccctcccatgaacttacgggctgtgtcaatttctgtgccgtaggtctattaaaaccttctgggaggccaggctctcagttcaagccctatactcctctggctctgcttacatacccgggcagccctccctcctcgtcccacccctgcctatctagtcctcccacagctgagcatcttgggtggaagaggagatgactcatgaagacccaccccggcctcatccgatatctgggtctttccaacaaaatgccatttcccagggcacctcaccccaaccagccatggaccctgcccccctgggcagccacagggacccttctggaacctcagccagggagcgtcagcatcactccactgcacaacgccctcccactgcaaaatcctaaagcttcccttggccagagagcccttcccagcctggcccactgccctcccgtggcctgtctcccctgggctccccgcagttcttcccacaccccagctgctccccactgcaggcccctgcactgtctgcaccttctgcccagaatgttctccgggggagtgggaggaggatgggggtctggaaagggctagagctgccgcagggagagaaggaggggcagatttccccacagctgagtctcactgtgtcctgggagaggccttcccaaaccacctgacggcccctgctcaccctccttggaggccctgggcactcatccaagcactcatcgcctgagcgctcatccaaggtctgttggtttatttgtccatcggctccctctagaaggtgagccctgggacagcagaggccttctcctgtccaccactgcagcctaaaacaggacttggtgcccacccaccccacacaccctggatatgcagtctcgctccacaagggacctccgcaccgcttcctttcccaaccttcccctccaaccttcccctctccgcccaggctctgggctgatccagccatcaccccgataccctgcatccttcctatcatgcccagtcccagtggccccagcaccccccacccactattggttgaatcaatgaagggctcccccgatttgcccccttctctccctgacccctctccctccctcactcagcctttgctctcctgctctcccccaggaaccctgacgtcctcactatgcccctacctccatcaccaccccactgccccgtgattcctgacccccacttcctgccacctccctgcctctcccagcccccactccctcacaatcccttccactattgcttacagacccgtgtcctggctgcctggctgacttcctcagtccctctccatcagtccccaccaccctctggccagccagctccctgcagcggccccagctctccagtttcccttttctcaacccaacagccctcagccttgcaccttccctagctccacttcttccccggccctcccagctggctcagccctgctcaggcccttctctccaagtcctccctagacaatccggaagcctgcccggcatctatctcctttcccctcctctcccacttccataatccacttggcacagtgacgtggcagagaagcctcgcagagaagctctttctcccagcctgctaagacgcgtctgtctcacccgtcttctcctctcaggcccctcccgggtaagagtccatctgtcagaatccctcacctccactctcctcacacaccttcctcagcccctccctctcaattcgccaggacatcccaggtcactgacgacgctgcccaccccggcctccctggccttccagactctttctagtctcccatcagcctcccacgtgctccagataccaaatccagaacccctcttcccatggatacctcaaaacaactcttcaccaccccaccccacagctgtgcgtcctcctccaagctcagctcccatccatggtcacctagattgccccaaatcatcccggcctcttcggccagccgggtccccagacagagctctccctcaccacccggc

SEQ ID NO: 9826 - DNA, 135 bp, Homo sapiens
tttattttttgagacggagtcttgctttgtctcccaggctggagtgcagtggcgtgatctcggctcactgcaacctccgcctcccgggttcaagcgattctcctgcctcagcctcccaagtagctgagattacag

SEQ ID NO: 9827 - DNA, 286 bp, Homo sapiens
tcctctggctctgcttacatacccgggcagccctccctcctcgtcccacccctgcctatctagtcctcccacagctgagcatcttgggtggaagaggagatgactcatgaagacccaccccggcctcatccgatatctgggtctttccaacaaaatgccatttcccagggcacctcaccccaaccagccatggaccctgcccccctgggcagccacagggacccttctggaacctcagccagggagcgtcagcatcactccactgcacaacgccctcccactgcaa

SEQ ID NO: 9828 - DNA, 1159 bp, Homo sapiens
ccagattggtgctgaagacatggacggcttccaggcagacacggaggaggaggaagaggaggagggcgactgtatgatcgtggatgtcccggatgctgcgggtgagaagggctgtagatagcagaacgcactggtgaggtgggcgctggaggtaaacctcaacagagaagggatggggctgcctaagactagctccactgtgagcagccaggagggcttgcagctggaagtggctcctgccctgccacatcctcgggcgggctgggccgtgggtgctgaccatgccaggcatcgttctggccgcagagccacaagggcctatgctgggagtctcaggtggttgtgacgttagatgggggtcagggaaggctgcactgaggcagcaagggagggccaggtggatttctggagcactcgccaaagaggaagtacagaggccctgcagcaggctgcgtgggaggagtgtgcccgggtggtggggggcaggcagggtcaacctgagagcaggtgagcaggtcacctctagaagaggcacaacgccccagcctctgcctgtccccactgtcaggtggagggtcccgccctggggttgttgcaggccccatgaggcagcagggtggggtcttcccccagggagcccagagggcccagccagctcaagaccctccctctcttgccctgcagaggtccaagccccgtgtggagccgcttccggagctgggggtggtgtgggggtggacaccggcaaggccaccctgacctcgagcccactgggtgcatcctgagagcaggggtgacgtatgtagaatgcttagggtgtcctccccacagagcagatacttgaaccgactcaattcctgtgtaaagagcactttgtcctgcttcacggacctccccaaagtgtgcagagttctatataggatgctggattagttcctttgatatttgtaaaaattcccccaagagccgcatatgaatctgccctttaataaagcattattgagattgctggcctattggggaagcctgcgggcacaggagcaggcgtggaatccaatacttgtaaatgaattgaagcgtcaggaccacccgcctggccacgtgcgcgggcccctggacctaacgaggcagtgtataaacttattctctagccctgagc

SEQ ID NO: 9829 - DNA, 894 bp, Homo sapiens
ttgccctttagacttcctggcctgatggactgttccaagatgcagtcattctcctatggtctttctggagatgtcttctctagactgagcagccaatgtgttgctatgaagctctggctagctgggtaatgcacttccttgtatttgctcttcctcgttccttgtctcatgtctccttttccctgggattctaccctacactgaagtaatagcacacaaatttttgtctcaagttctgttgtctagggaagccaggctaagacatggttcaatgggtgtccttagaaagcagacctccaaaagagaactttgggtctccaccgatggtggcaaactgggtggcccggattcctggcatgcagtgatagtacaattgccaatatgttatgtggtataggcagaaggcaaggtattggcatatcaagtggctgtgtacttgatcagtacagagggaacgataatcataaggattgtgttacatggtggctgcctttgatggctttggaagatttgcaaaaaggcataacagactcaggaaagctaattgcccacttaaaatatgctgtgaaagtcagagggcctctatggtagccttccaaatcctcttatctactgcagctgcagggcaaatgatggaggaagaaaatcatgttcagggtttcatggtatagggttgcaaacctacaaaggagaaaaaattcacagccttaaaatgtctcctgtgtcaatgtgaaggctttgatagggaaagagtaggaacctgaaacctgcaaggtggacatttgagtggacaaatctaataatcttgaatgtccaaatttccctgcctctctggagattatgcagtctcctcagtaggagactatgcagttatatcactcgatgtactataag

SEQ ID NO: 9830 - DNA, 756 bp, Homo sapiens
gtcctaaggtgagaaggagggccactagcataaaaacaacttgaacagaacttccttcacaagccaataaattctaataacaaaaggcaaaggaaaaagttccctatagaagctaaggattttccaaagcctaatgctcattttttatatccttctttgtatggtcaaaggttgattcttcctttaccagacacaaaaaagggcttaattaaaaatttgaaatcaaattttagagatataaactataaataaatacatttgcctttcaaatttttagaacattatcctagttaattcaaatttttttatttgagatgaaaggcgatttaagctaattttcattggatcatttattattattattattttgcagtgtattagttaactactgttatataacaaattaccccaaaacttaatggctcacagcatcaaaaatatattagctcatagtttttgtgggttaggaatctgggtgctgtatgtctagtgctcagggtccttcacaagattgccatcaagttgtcgactggggatgtagtcatctgaaggctcacgtgagtgagtatcaaattccaagctcactcactttgttcaagtttttgacatctgctggctggagaccacttgtttgccttgtgggcctctccacagagtagtttacaacatggcaacagcctctctagttagtatgagcaagccccagaagcacatttgccatattctaattattagatacaaatcaataggctcgag

SEQ ID NO: 9831 - DNA, 756 bp, Homo sapiens
gtcctaaggtgagaaggagggccactagcataaaaacaacttgaacagaacttccttcacaagccaataaattctaataacaaaaggcaaaggaaaaagttccctatagaagctaaggattttccaaagcctaatgctcattttttatatccttctttgtatggtcaaaggttgattcttcctttaccagacacaaaaaagggcttaattaaaaatttgaaatcaaattttagagatataaactataaataaatacatttgcctttcaaatttttagaacattatcctagttaattcaaatttttttatttgagatgaaaggcgatttaagctaattttcattggatcatttattattattattattttgcagtgtattagttaactactgttatataacaaattaccccaaaacttaatggctcacagcatcaaaaatatattagctcatagtttttgtgggttaggaatctgggtgctgtatgtctagtgctcagggtccttcacaagattgccatcaagttgtcgactggggatgtagtcatctgaaggctcacgtgagtgagtatcaaattccaagctcactcactttgttcaagtttttgacatctgctggctggagaccacttgtttgccttgtgggcctctccacagagtagtttacaacatggcaacagcctctctagttagtatgagcaagccccagaagcatatttgccatattctaattattagatacaaatcaataggctcgag

SEQ ID NO: 9832 - DNA, 1605 bp, Homo sapiens
gcaaccttgcagagtcagaatcctgatcagcagttttgaccagcacatcaagagtggctttacctcccaggcattgatccagcattagtcaagctacaagacactgatgtagaaaaccataatgtcagtttactaatgtagaataagaaataaaatctcagaagacctgagctctcctgtcagcatgacttgcacttgtacttttcctttttgtagagaagctaaattataatcagaaagttgttttggtgagcttggaatcagaaaataggagtttaagtcatctgttcaacatgcagctttcctcagctgtgatagctttttcctgctgtccagtcttcatgtggagcctggtcaatagcaccagaattctaagtctgctggccaaggtgctgcctcctgcagagagagaaagcccatcaaagttgacttcagtgactcccccttcactcacccctcatcttccacggccaaccaactccctttttgattgacacatcatttctttacatacattaatgccttccatattaccacagagagtttgttagactggaaatcattttatttctttgatctacttcatctttctctgcattgagcctttgcgtactaatttatagctattttctcacaggatagtctatttccattatatctatattttctagtggtcctttgcgtttgcctcttttccagactgtatagggcatggtgccaggcacagtttatttgttttattctatatgctgatagtatcatcttttccatctttagatgttttatctcattcagagtgagaggggcacttggtcagtcctttttgcatctcaatagttgatcctcttttgattaaaaaatatttaatttctaataatgtgtgttagagtgaaaataacaggaattattaggcccagtcaagactaacagttcttgactcatagttccaaatcacagttccaagatttccttaacctttctgatcctcacttccctcccaaaaaagtaagaatggctataattacctacctcatggaaattataaggcttcagcaagattaaatgtactcatttatttaacatgcatagtaagaactataaatgttaatttattcttacttacattaggatactgacttatgaaacagagattaaacacattctgcaaaaggactggtattgacaggctttgattctaatagctcaaaagataggccatggcttgctagagaaaatgaaaggatactcaaggctcattagattaaaaggctgctaatgttctctaagctgtaagtagatttttgcccacatttatgaaggttgatttctaatcagattagaaatggcataggctggtggcgtcatctcagagctgccacagcattctcaggagactcagccatatcatgttgggttgctctaagaacacacagagacctttatgctttttcacaaaagcatactctttccctggagtgtgtaactctatgtgttgacctttagtgggataagttcttacaatggagctattctgggtacaaaacatcactactctgtgagatttaggaagataacactgtttgctgattttacaagcccactcga

SEQ ID NO: 9833 - DNA, 933 bp, Homo sapiens
gtaccacagtgatgcagcaaggccaggtacccgagaggtatccccaggccccaactccctacaccgcacacacacaaagctctccccatcttggtctaagagggactaagccttcctcctacgaggactctccctgccttcagaacggtggctcctccagtgaggaaaaagagagaagcagaaggaactgcaaagtggacccttggatgctgctatccaaaatcagagccaaaattaagagactcttaacccccgcaaaattatccaggttaaaaacatacgtgagcttcagaaagggtgaacatagccatggctgagaatcgttgtggattatcatgataggaaattgacatgcttatgggtgttctgtcctttggggttgatgtcagggagccaagtggttgcactatttctgctgtgtgtccgaatttctaaagtaatatccgtgtattgtttggagagcggacttttttgctttactcctacttttacagaaaagaattttgtttctcaagcaacaaaacatttggtctctggtgtcaaagaggactttattatattagaattataaagctttagttaggaataagtgttggacattattaaatcaagttactgcaggctgggcatggtggctcacgcctgtaatcccagccctttgggaggccaagactagtagtctccaattccattccatcacttgaggccatgagttcaagaccagtctggccattgtggtgaaactccgtctctactaaagacataaaaattagcatggtggcctgcacctataatcccagctactccggaggctgaggcaggagaatcacttgaatccaggaggcagaggctgcaatgagccaagatcctgccactgcactctagcctaggcgacagccgcagacttggtctccaaaaaaaaaaaaaaaaaaa

SEQ ID NO: 9834 - DNA, 172 bp, Homo sapiens
tttttacagttgtgtagtattctatggcgcacatgtaccaccttttctttatgcagtccaccactgatggacacctgtgttaattctctgactttgctattgtgaatagtgctgcaataaacatatgagtgcagagctttttttttttttttttttttttgatagaatgatt

SEQ ID NO: 9835 - DNA, 1858 bp, Homo sapiens
taaatactgaaatgtcaaagtgaaatctcctaactacatctcactatagccacagatttccaacattacttcatttttgttatactttggatgactttttacccagactcctttgtcccattttttaaaaggacagacacggtacattgagcttaattttaatgttctctctaaaatgctaataattatggctcaattattacagtggttttcttgttggagttttctccctttagctgctctaaattgtgagtggtatagagtcacagagcttacttgattattcacccagtccactgctgatgctacgtgtttcttcaggacctgtcctttagaatacttcccagaggcaagcacatggttgcctatattaaagccacctgtatatcacttgctaagtcctctttgtcaacacttgccctcattgtgactacagaatcactttttctagtttttaaaattgttatcgtaagactgtgcttggaaatattcccagggattagtatgatgattttgttggggtgtttggagatacatttgccaatgctgtacatgtaaaatttccatgacaacttataaaataaatactttgatctctttatcagccatcaatgttaacatataaaatcagctgaattaaagttaagactatgtaaacagatgactagaacctcttcttaagtaaaaatatgtgtggttcccttaattacttgtcattggaaatttgtaattcctttcaattttctgaacatatgcacaattttactattctaaaaaaataactattcataactactcacttattttctcctttcacgcacttctaatttttggaagaagtgatgggcatttgttccctataactcttgccatctatatccacctggatccgtagcaatttgggtcttatctgaactactacgatgaactgcactcaaaattacatttgatgtgatacacacagtaactcaattctttctttgctttcatcttttgcaatcatctacctccctatgcagtctggacaaatactgtcaaattcctaacagcatcatcattagcactgttgaaatccttccatcatttagtagatgctaagcctgtgttgtccttcattgccctgagatgctatgcagtttatctgcttgcacacttcagatgcaaaacatagatgggaaaagtaaggaagcatactgatttgcattcctacatatttgtatgctttactgtttctcctgatgcttctgcttccaattgccatcttcaccttcgtcatctctagcttcctactttactctcctcagtcactgttcattcttagcctctgatttctatcacttcttttgctgtccaatttgtgcttcctctatttctttcctcaaatacctctccagcatcattatgtcacaaaattatttgccctgagaatctcttgctcttcccctgctttgtgctgcagggagactgattcttatctcactgtgtcagctgcattccagccagagtccacctatgagtggctctggtaagagattggaaggccgaagattctggtagttttcttgtcagtggctgtctcttctcctacctactgctcctacaagaaaggcctgcaaaggtttacactcctgctatgtgacatctgagcttctggtaaatctcattctccccttgtccctctgtctgggagtggaatgtttcctgacatcgctagtctgtgtgtggcttcactgttgatttgactgctttcacttttctgtcatcagtataaccaaaaccctgcagaaaactgcctctgttgtaaatacttaaggtggtttttgttcctggttggatcctaaagaacacaaaatcattc

SEQ ID NO: 9836 - DNA, 1101 bp, Homo sapiens
gcagcagagagagcctgggttggagccatgaggctgcccctgcgtcagctctgcctccttggaagcttctgtgtctcgggttcttcatacgcccagtggcagggatggaccaggcaccccttgcaatccttctggacaaatgtgccactgtcctatgaaaataaaaggacaccactcaagctccaggaggcagaaccttaactcaaatctgagccaataaacaatgtcactctagcaccaaagtctatttcaaaatgcaaactatttgaaatatcttatttttggtaaatgctttattttggaaatgggtttttgttgttgtttccctgaagagagttcagatcagcaaagcaagtagctttggagaagacacctttagacgaggactcctgtgaatcagcaggacagcgtagcaggacattaggtgagccacagggtggagcaggatgggagggcagaggcttctgcttcagaattgaagccgaaggcaagtaatgctgtgggtgttactggagacaaaaggaaccaaacaagaaaaatctggagaggcaaatgttgatgtcttaatagatttgggaggtcacactctttaaaaatgggtcccaaagcaaagctctcaaaacttcattaaaagaaaagtcttacatttgacaagtgacctggacagaggagctaccaggacattggcccccttgctgtgcacctgcactgtgcatcacagctcacgtcgtgtttgttacactttgtcacctcacattttattataaaggtcattcccgtgttaaaaagagagcgcggtatgacagcgcctagtgaattgtagtgtctttagggaggaacaaaaatggacataaatgaatacaaagaaaagattacctgaaactgggagcaaatcaaagtaaaaatgtagggatagggtgttgctttcttttaaaaagataatgctgtcaggattaaagtgagaagaatttaattttcatttcagcctgaacactagttttactttcagaaaggttcttggtgccaagctgtgacacttttgcctttgtgggtatacacacttggtacccttgcttagcactgtggaagaggaagtctctc

SEQ ID NO: 9837 - DNA, 1101 bp, Homo sapiens; identical to SEQ ID NO: 9836

SEQ ID NO: 9838 - DNA, 143 bp, Homo sapiens
ttttttttttttttttttttttttgagacagagtcttgctctattgcccaggctggagtgcagtggcgtgatcttggctcactgcagcctccacttcccaggttcaagcaattgtcctgcctcagcctcccaagtagctggga

SEQ ID NO: 9839 - DNA, 143 bp, Homo sapiens; identical to SEQ ID NO: 9838

SEQ ID NO: 9840 - DNA, 1067 bp, Homo sapiens
ctttgaccggacagacagatacttagatagctggcaaaacattatttctaggtatgtttgtgaatatttttccagaaaagtttaatatttaaatcagtaaactcagtagacaaaacctaccctggacaacgcgagtgagcctcgtccaatcccttgaggccccagaagaataaaaaaagaggaagggtgcatttactctctcttcagttggaacatctatgctctcctgcctcagacattggacatggaatctcctggttctcaggcctttggcctccatggttacaccagcaccccacctggttcgcaggccatcagtctcagactaaattacagcactgggtttcctatttctccactgcagacggcatgccttggggatttgggcttctataattatatgagccagttcccataaacaatcacttctcatatatctatatatacctattggttctgtttttctgaagaccctaatacagccccatagcactatatttttattttttctaaaacatttaaacagcctatttttttagagtcatttatgtaggtatccaattctctcatgaacgcctcaaggccagaaattcaatccattttatttttgccattgccgcagaggaggcacactgtagctagtcaataagtggttgtggaaggaattgagactgatagatctataaacccactttctgtggtacatgcagtctatattcaatattccgtgcagcttactccacaagtgagaggagggtctaagcttttgagcatagggatggttttagaaaataattacatttaaaaagcaaaatggagacctgttgagaataaataaagtcttgtttcttatagttgtgaatcttttatatcaagacttcacctgaaaaactgctagattgtgcttcaaagcactgtaagttctagccctgggtctataatgttatctaagatatttatcatcattgagttctctggactcaatgttcttatccgaaaattgaaggagttagatataatcatttttaaaatgttttccaaaccaacatcctaaagtctactctcga

SEQ ID NO: 9841 - DNA, 9298 bp, Homo sapiens
attttcatttatttattattaatttttttaagagacaaggtctcactctgttgcccaggctcgagtatagtgatgcgatcatggctcactgcagccccaacctccagggctcaagtgatcctcctgcctcagcctcctaagtaagtaggtacgactacaggcatataccatcatgcttgggtaatttttttgttttgttttttgtagagatgggatctcactatgttgcccaggaggtctcaaactcctggcctcaagcaattctcccaccttggcctctcaaagggctgggattataggtatgagccaccttacctagcctgaataattttttcaaagaatagaatttataagtaaggctgggaattatatggaaaaactcccacgtttttatctgatgccacaaggagtcagagaaacagctgctaatgtgtgctcacaggtctcctgaagttgcaggagtatcagcctcccagcaacactttgagattcaaaccttagttttaagtgagagattggaaagctcctggaagtgtcttattgagagagggaaggaaacacttaacttggtcaatgcttgaagacacaaggcttgactcttgtctctactgtttgattctaaaagaagccactcctctcagcaccccctctgacaaaggcagtgcagccattgggtcctgtctaaagtgaacctcagggagggtgagatgtgattactgttaggatgttcaaaggcagctctggagagtcttggagggctccacttaaaactggatggggcacaccgatactaggaaataactctgagtcccagcctgtctgagagatcatctatgtaaccaatgggcgagtggcaagctgactcctgtggcctctgcacccccatccttggcagacatccctcattggttgtgaccctctgtcctctgccccactggatccactgcagtgaggggcagagccaggctagaaccaagcctcttccttgcccatctggagctctgcctgctgtctcttcgtctcccagcaggctctctgcactagcatctgagcatctatcaaatgctcacttgctgtcatgtgcaggctctgcccttgaccgcagtgtaatttcccctggtctacagatcacatgggaacttgcagagcgggtgcacgtagggtggggactggggtgtctattcctccttcattattcagcagatcattagttcagtcacttgtccggatgtctaatatccagtcacacccacaagaaatacgcaaacatctgctcacaccccgatatagaccatcaagaatacacatatggctggtgccttaactgagtcatcttttttccattccattcatgaaagcaacataagaaagccaagagtgaaaggggtaaaagatcacagtataaaggtcttcggtgtgtccttcaaagatttacacaacattgtcctaaagggaagtcacagcagcttagctgtttctcacagatcagagaggatggtggggcagccaggagtcatcagtaaacccaggtgagcagtgcaggactgaatgtcgctgtccacttgcaggtgggagtccatgtggagggtgctccttcttgtttctcattgggacggtgactgtgtatagtggaaagcacagagccaatgagggacaggatggctgtggtggagggaaaacagtgcagggctgctctgtctctctgtcctgtcccgttaggactggtgggccaccacaggtttctgtaaagtacaaacacacatgcacatataagcacacacatacacaggcatgtaacacagacacacatgggcatgcacatacaaatacacaggtgtgtacatggatgtgcacatctgtagacacaaatttagattacacgtttgtgcacacatgcatgtgaggcaagagaatagggtctggaggcagggaacctaaggccaattcgtgctgacttcctagaactgaatcaaaatgaaaaccccacctctccatgcctgaggaacaaaaggttcagcagctactccctttgctataccccctttccactgcatctcagatgaaaatggaaagtacctcggattggtcccctcccgcaaccaaccagactggtcatcggccaagtcttcatgtgtaactttgtaacttcccttcagcctctgattggttgcctcctgcgactgatcacattggttggggccactccttcatctgcatagagtataaccaagtaaccaatgggaaaactctggagggcacttaaactccagaaaatgctgtaaccaggctcctgagccactggctctagcctgctcccactctgtggagtgcactttcttttcaataaatctgcgctttcgttgtggtaacacacacacttgggtgtgtatgcaggtacatacacatgggtgtgcacaaacacacaggcatgcacacagtacacacacacacaggggtgaacgcagccacacacatacacacatggacaagttagtgaaaccctgggtttgctttcttcacaatattaggtgaactctcttggggttttttacttaacctctctctgcctctgttttctcagctacaaatttgggttagtgacacaggtcctcctccaatggggtgtgtggacagcagatatttgaaaatttaaagctctaaaacacaagatattattctaatttcaaagtatttagattttcaagccctcgttggcaaagattttactttactttttgctttgattctcaggtctgaatctttgttttgtttatctccattttctttgctctgaagacttaattttaatacataaatctgacgggtcactgaactttaaaaactcctcagagaatgagagaaaactttaccgcgaaggtgtggctggccattcctttcctcgcgttggggtttctctgtgtcagcgagcctcggtacactgatttccgatcaaaagaatcatcatctttacctttggggaaaacaggaagagggatggtgctttatcaatcacatacttagcccaaacaagtgccttggcctcctcagaaatttaaaaggtagaaaaaaatggacatatccccttttaagaagcttccacatcacatattttttaaaaagtatttacatttcagctgtcatgcaaatcaacagttttgccaacttctttctcctttgctctggcactggcattaacattcttcctcactgtggccctggaaatcctcacactaatgaagcagcagaaaggcccatcacactgcactggtgtgtggtcttcgcatttccttgactttcttttcttttttgttctttcttttttttttttttgagacaaagtcttgctctgtcacccaggctggagtgctgtggcgcaatcttggcttaactgcaacctctgcctcgggttcaagtgattcttctgcctcagcctcccaagtagctgggactacaggttcacaccaccatgcctggctaatttttgtattttttagtagagatggggtttcaccatgttggccaggctggtctcgaactcctgacttcaagtgatccgcccgccttggcctcctgaaatgctggaattataggtgtgagccaccatgcctggcttccttgcctttcctttgtgagacacggcaacagcccaaggggtctcagatgctgaccctcagcagagggcacctcctggggccatggctgtgtagctgggggcatctggcctcacatcctagttgagtgttggtgtccaggtggctggtgcaggcacccgcccttcttcacttttgcatgtcttctgtggcctgcctgactggagccagttgtcagggctcctgagagctgactgtgggcacctcttcctgaccccacgctcggtgacatcagctgggagcttgcgatcagccagggtgggagcatttacgccacagaacctggcacatgctacaggccaggactttgtccttttccttttctgggagttggctcagcagcgtgctcctgttgtgctgttcccctctctgcagggtcatgtggcctggcctgccggccctccgtccccgctccaggactaacctctgtggagggaatcacctaactcgagggatcacgactcctgagcagtgaagtcgcatgaggccccacagaccccgggattggaggcccaaggacctgccagtgtgcggggctggcctctgcagacagtgaaaagctcccgtggccacgcttggcagatgctggtgaggatggcggggagaaatgtgaagggtcaggcctcagctttgcctttcagaccccaaaattcctgtgagcttcagggggccgggggtgagctattctggctttggactggaggtgagtgaggtctctggataggacagagtctacccttcacaaaaccagtcatacagaggacacaaggaatcgccccttgtcctcctgctacaaacatgaatctcttggccgggcacggtggctcacgcctgtaatcccagcactttgggaggccgaggtggatggatcatctgacgtcaggagttcgagaccagcctggccaacgtggtgaaaacccgtctctactaaagatacaaaattagcctagcatggtggcaggcacctgtaatcccagctactcaggaggcagaggcaggagaatcacttgaacccaggaagcggggggtgcagtgagctgagatcacgccattgcactccagcctgggcgacagagtgagaccctgtctcaacaaaataaaacaaaacaagaatctccacctggatttcagcccacgagatgtgcaggaaactccccgcagagccagcacatggctctccaggagcccctgctggcagctccttagtgggtcatctctggcaaagttgccctcctggctggtgaccctgaatctgggattagccccaaagggccctgggcaccagctgtatcccaggattgaccagaatgtgtgctgggagctcagggcatgcaaagagcgagctggcatggaggtggggtggctgactgatcaaggagtgagctggctggaaagagggattgatgtgccaggtgttgcagggaggcggtggagagccccgggggagaggcttcatacttggccctggaggacttcacaggacagagatgggcagggagggggcacacccaggcgtggaggcaagtgcctgcttggtgcgctctgaaaccagcgtccgctgtgcgttgtcctacgcacgggaaggaagtgcatccttgggcgggtgtagtagggggcaggctggctccagtgtgtgacaaatggccaaagtctgcagggctatgctaagaaatcccacttcattctgcaggcagttgggagccaaggattgcttgtgagcagaggagggacacacactgtctgcaaggactgcagctgtggcagagtttgaacaatggtgtgtgtgagggcaaagctcagaagacagggacaacaggagatcagtccaacaatgtctgggggcctgaaacagctcgacagcagagggacgggactctgaatggggggaggagctaccagcctctggtgagcagtggttgggtcacaaggtgagtgaatgagatgagcacacagataccccaagagcccggccacgtgctggggaggcctcacatcccgttcgtccaggacaaagctaatgtccttgtcaccaccaagccttcaaggaaggctaaatgatgagccgtactttctagaaggccaggaactgtgtaccacgttaggacaatttatgtagaaaaccatggaaaccactaccaccaccaccgctgccaccagggccccctttgcacgcttaaagcagcaagttccagctgtccagaacaccaacttgctgggtcctgagggtggcccgagcggcactgggaatgttttttgggagtcaggacatgagatatgtcccacagataatgaagaaacacacagagctgcgactggtcattttcctccccgaagctcatttcccaggcccatgggggtgggggagcagagggctcttaccttgacttttcagggaattactgaactttcttctcagaagatagggcacagccattgcctagaagaaacagagtgtctccaggcttcatcaagttgtgacgtttaggaattgtcaactaattttggatttcttattgttcttccagcttctaattaaccatggccactattttctgctctctagcaatatttgaacttttagcaatatgagaatggacattttcaataaattaagcatgaaatgcctgaaataagagatgctcagctttggggaagctgccacatttgggtggtatggcagaaagagtacaagtttctgccctgcaggtctggtttaaatcccagcactcccccttaccactgtgtgacatggacaattaattcacttctttttttgtttgagatggagtctcgctctgtcacccaggctggagtgcagtggtgcgatcgcggctcactgcaagctccgcctcccgggtttatgccattctctcgcctcagtctcctgagtagctgggcctacaggcgcccgccaccacgcccggctaatttaattttgtttttctgtatttttagtagagacagggtttcaccgtgttagccagaatggtctcgatctcctgatcttgtgatccgcccacctcggcctcccaaagtgctgggattacaggtgtgagccactgcgcccggctaattcacttcttaccctctctgaacctcggtctcctcctctgtaaaatgggcctgtagctctctttacagggatactggaagatcacttgtggctaacacgattcctgggtccctgtgactgttggtcctcacacttctcctcctgtctcttttccagttgattgccttgctacagtgtgataagaaatccattctctgtttggcttttcagggaagtgaagagacagccaaatggccaaattcccctggaaatttctcctggtgtctggcaccctgggattttgcctggctgggtttgtgggcggctgccagaggcactgcagaagctgtcaggctgggcttccagggacaaaggtggaagcgcccccaccagagaagagtgtgggtgtcaggcatggcctgggctgagaccccgctgtcacttcctgtctgtgatcttgatcaagctcaccccctgccctgagccggctggtttgttcatcagtacaacagggttaataaatagcactgcctacccgctgggtgctgtaaacatcctgtggaaagatggacttttgaaaacatcgcgtgtcactgtgaggagctgccggggttggaagaggagtggctagatgttccttgaggctccctgctgcgctgggctgcaggtaaggcctgaagctaaagcccattcctcctggggcgctggccatggtacctctcatcctacccctaaccactccacctgaacacggggagcaactccctcccaggctggctctgccctctgtgcactgctcctacccctaaccactccacctgaacacggggagcaactccctcccaggctggctctgccctctgtgcactgctcctactcctaaccactccacctaaacacggggagctcctccctcccaggctggctctgccctctgtgcactgctcctactcctaaccactccacctgaacacggggagcaactccctcccaggctggctctgccctctgtgcactgctcctactcctaaccactccacctgaacacggggagctcctccctcccaggctggctctgccctctgtgcactgctcctactcctaaccactccacctgaacacggggagctcctccctcccaggctggctctgccctctgtgcactgctcctactcctaaccactccacctgaacacggggagctcctccctcccaggctggctctgccctctgtgcactgctcctactcctaaccactccacctaaacacggggagctcctccctcccaggctggctctgccctctgtgcactgcatctgtgggtcccgctcacaccccccgagtccctgtgccattttcgagcacactggctcctgagtgttttcacctctggcagccagcgcctatgtctcccagatggaagaagtccccaggccacgggcccgctgtgcctgttcagggaagggcagaagtgcctgggaatgtgtgtggcccagggcctggcccttactcaggactgacgggtgtgggtggccttgctcctacgcggaattaactgtggggtgtgatctgcgtggtctccagagcccccaggaggactgagccacagtcagcctgtgtgggtttgcttcatgtcagatgcttgcctccttcctttcccgtctcactttcccgctcccctactgggctttcttggattttcaacaaatgcatctacacaaatccagctcaggtgtgtgccacggaggaagccaactcacaagagttgccacggtgttgtggcagctgtgtgggcattgctgtgtgggtagctgtgaggacattgcatctctgccaccccgtggacttgccacactgctggaaaggggtgcagtcttccacctttgtcgggtgtctggggcttgaatggagtaacacataccttggcctcacttgaagggtctgcatttgggtcctctggtctcttgccaagtttcccagccactcgagggagaaatatctggagggcaaagaagagacttatgttattgttgaacctccagccacagggaggagcatgggcatgggtcagctggatgtaaggatggatgctctctatacatgctgggttggggatgctgggactgcacagccacccccagtatgccgctccaggactctgggactagggcgccaaagtgtgcaaatgaaaatacaggatacccagggaactttgaatttcagattgtgaaaagaaaacaaatcttgagactccacaatcaccaagctaaaggaaaaagtcaagctgggaactgcttagggcaaagctgcctcccattctattcacagtcatccccctgaggctcacctgcatagctgattgcttcctttcccctatcgcttctgtaaaaatgcagactcactgagccagactaaattgtgtgttcagtggaaggctgatcaagaactcaaaagaatgcaaccttttgtctcttatctactacaaccaggaagcccccacttaagggttgtcccaccttactggactgaaccaaggtacatcttacacctactgattgatgtctcatgtccccctaagatgtataaaagcaaatt

SEQ ID NO: 9842 - DNA, 508 bp, Homo sapiens
gtaactctgagccagtggcccccaaggtggcagaacaggtgtcagccacatctagaaggaggcctagggacctgcagggtgccacccttggtgaggcggctgtgggccacccttggtgaggcggctgtgggctgtgggtgaggcagccccttggtgaggggctgggaggagtgggcttctctcggcctggctgggagtccaggtgccagggtcactaagacaggcctggcatgcgggtgtggaggctggcatggtttgcttgggcatgggtggggcatgggacaagctgcacaggtgtgcagagcactctccacatagtcactccctcttaggaaaagactccttcctccacttgagagggcatcaggccagcagggaccagacgttcgcctaatccagaggctgtcccccaccagataagggcgtagccaggcacgctgtttaccatccgtcctcaccaaggactctgtggccataaaaagagcagggcttcaccagctcgaggcgg

SEQ ID NO: 9843 - DNA, 508 bp, Homo sapiens; identical to SEQ ID NO: 9842

SEQ ID NO: 9844 - DNA, 380 bp, Homo sapiens
ctcacctgtccactagcagctggacgggaaaatggcaaggggtcatttcctgtactgtaccgtgaggcagtgattagctacgtgtggctcgtccaactagagatgtgctgtgagtgtaagatgcacactggatttctaaaactttgtgcaaagaaaagggaaatatctaattagtaatttcatatggattctgtgttgaaatgacaatattttaggtttttgagctaagtaaaaatacattattaaaattagtttcaccttttttattctacttcttaaaaatgtgcttgctgctagaaaatttaaaatgatagatgtggcccatattatgtttctgtgtgatagactgctctggatcaagagtcggcaaactatggccc

SEQ ID NO: 9845 - DNA, 380 bp, Homo sapiens; identical to SEQ ID NO: 9844

SEQ ID NO: 9846 - DNA, 2318 bp, Homo sapiens
ttttattttattttttttaattttttattgatcattcttgggtgtttctcgcagagggggatttggcagggtcataggacaatagtggagggaaggtcagcagataaacaagtgaacaaagaaacaagtgaacaaaggtctctggttttcctaggcagaggaccctgcggccttccgcagtgtttgtgtccctgattacttgagattagggagtggtgatgactcttaacgagcatgctgccttcaagcatctgtttaacaaagcacatcttgcaccgcccttaatccatttaaccctgagtggacacagcacatgtttcagagagcacaggtttgggggtaaggtcatagatcaacaggatcccaaggtagaagaatttttcttagtacagaacaaaatgaaaagtctcccatgtctacttctttctacacagacacggcaaccatctgatttctcaatcttttccccacctttccccctttctattccacaaagccgcgattgtcatcctggcccgttctcaatgagctgttgggtacacctcccagacggggtggtggccgggcagaggggctcctcacttcccagtaggggcggccgggcagaggcgcccctcacctcctggacggggcggctggccgggcggggggctgaccccccacctccctcccggacggggcggctggccgggtagaggggctcctcacttcccagtaggggcggccgggcagaggcgcccctcacctcctggacggggcggctggccgggcggggggctgaccctccacctccctcccggacggggcggctggccgggcagaggggctcctcacttcccagtaggggcggccgggcagaggcgcccctcacctcccggacgaggcggctggccgggcggggggctgacccccccacctccctcccagacggggcggctggccgggcggggggctgacccccccaccaccctcccggacggggtggctggccgggcagaggggctcctcacttcccagtaggggggccgggcagaggcgcccctcacctcccggacggggcggctggccgggcggggggctgacccccccacctccctcccggacggggtggctggccgggcagaggggctcctcacttcccagtaggggcggccgggcagaggagcccctcacctcccggacggggtggctggccgggtggggggctgaccccccaacctccctcccggatggggcggctggccaggcggggggctgacccccccacctccctcccggacggggcggctggccaggcagaggggctcctcacttcccagtaggggcggccgggcagaggcacccctcacctcctggacggggcggctggccgggcggggggctgatcccccacctccctcccggacggggcggcttgccgggcggggggctgacccccccccccggacggggcagctggccgggcagaggggctcctcacttcccagtaggggcggctgggcagaggcgcccgtcacctcccggacggggcagctggcctggcgggggctgacccccacctccctcccggacggggtggctgccgggcggagacgctcctcacttcccagacggggtggctgccgggcggaggggctcctcacttctcagacggggcggctgccgggcggaggggctcctcacttctcagacggggcggttgccaggcggagggtctcctcacttctcagacggggcggctgggcagagacgctcctcacctcccagatggggtcacagccgagcagaggcgctcctcacatcccagacggggcggcggggcaaaggcgctccccacatctcagacgatggggcggccgggccagagacactcctcgcttcctagatgggatggcgccgggaagaggcgctcctcatttccctagacgggatggcggccgggcagagacgctcctcactttccagactggggcagccaggcagaggggctcctcacatcccagacgatgggcggccaggcagagacgctcctcacttcccagacggggtggcggccgggcagaggctgcaatctcggcactttgggagggccaaggcaggcggctgggaggtggaggttgtagctagcccagatcacgccactgcactccagcctgggcaccattgagcactgagtgaaccagacaccgtctgcaatccccgcacctccggaggctgaggctggcggatcactcgcggttaggagctggagaccagcctggccaacacagcgaaaccccgtctccaccaaaaaaaaacgaaaaccagtcaggcatggc

SEQ ID NO: 9847 - DNA, 686 bp, Homo sapiens
cagggagaatgagactgagagacaggagggcaggagaaggtcagagacaacttttgcttctgaggctgctgctgaggacttcattttggggcgttgttttctgagccccaacagaaggaaggaagcctctccctccaggggtcagtcctgggcctcaagggcaccctcgaagcaggcagctcagctcacagagctcccctcggccatgtcctccacctgcccttccttggtccagcacctcacctgcacacacctgtctggagagtccccaaggttggagagctgctgagtcagctgggccgagcacacagcgcaatacttccttgtgcctcctaaccaggatgggcgacaccagcccattttatggatgggacaagaagaagctgggctgacaagcccaacatagtggagccagcaacaggcttttactctcctctctgtctctttgtctctctcccccaccgcacctccatccgctccattctcctctctgcacatcagcttcccagacaatattcttggtttctgtggctcccaaactgaagcttccccacagtggctgcaactatccagacctggggccacacttgggcctccaggcaggggatctagtgatcacattctggtcatgtcatcaggccaacttggctgagctctgccctccttatctctcttctcccctcgag

SEQ ID NO: 9848 - DNA, 490 bp, Homo sapiens
tcgattgaagcacaatttattagagcccagaaatcatggcaatccattcccacaagcacacagcacagctaaaccagctccaaggagggtccgagtgtccacaactgcaccccaggcccattgtgcctgccgctggagagtgtggggccccttggcccctaaaggtttgctgagaagtcactgacatgagacagatggattaataggagaaacggtatgcaaatttatgtgatgtgtacatataagaacctttagaacgaagacccaacgatgggggaaattgtccatttttatgtttaggtttaataacgtatgaacagtcctctaaaaaaaggattggacacaaagggcttgatctaatgtgaatagactgagtgggaacccagcaaggtctgtctagatttgtcttcatctctgagcattttcttctctggacgtggggcagggccctctctggaatgacagtctcatgacctacagtcaaacaagg

SEQ ID NO: 9849 - DNA, 602 bp, Homo sapiens
aggtgcggtggctcacgcctgtaatcccagcactttgggaggccgaggcgggcagatcacaaggtcaggacatcaagaccatcctggctaacacggtgaaaccccgtctctactaaaaatacaaaaaattagccaggcatggtggcaggcacctgtagtcccagctacgcgcgaggctgaggcaggagaatggcgtgaacccgggaggcggtgcttgcagtgagccgagatcgcgccactgcactccagcctgggcgacagcgagactccgtctcaaaaaaaaaaaaaaaaaagaccagcctgaagcagagattgggtcccagcctggctctgcctggccctctgctcccgcttcacctcacagacagaacgctgccctgtggaggggtccccggaccctttggtgggtgccaagcgggtatggaggccaaggcctgagtggtgagaatagtccaggggctagcgctgcgtggggagggcgagctcagagagcaggggagcctgaccctgcaggtcaagacttctgtctgagagaaatgaaaagctggggattttaagcaaaggaatgccttgacccaaccctcacaacttacataataatt

SEQ ID NO: 9850 - DNA, 1429 bp, Homo sapiens
cagcctccagagtaaagtgaaggcgcaaagcctcatgcaaacatcgaggaatgccttcattgtttcgaggtctctcttcctggcctcccaagcccactccctgccccaagtgccacccttccctggcacctgatccctgaggacgttgggtcctggggtgggggcctctgggctcttcctctgggtcccaggagccccctccccactctgtggccccagctccagacttggcaaggcaagccggagtgaggtttctccactccctcccaagtgctgtgctggcggctcccgaaataaaaatcaaatgtgggcttggcaaagggagcggggtgggagaagcagcggcagcagggctggggcttcattctttccattgtaacttcacctcctaacctctggcattttaattatgtctcctacccccctcactctgcctgggccagggggtgagctcaccctttcctctagcctgggagggggcagctgctgcctggacccccagtccccggcctgctcgggggaatctgggtggcggccatgctgggggtgtcggcctcaggctccctccagcttctccagtctcagaggggcctggagaggggcccagcccccagacagccagccgacacctcaagttccatgtgtgaatcattagtcttcacacccactgctccatttagtggtggccactgtcctaaggcaaggcacggcaggctcaccagcccattctatggatgacttagccatcatcgtctgcagggccaagcctgggcccaggcctatcgctcctggttctgcactctttccaaacccaggaagaggggcaagaacagctcaggcctgataatttgccttatctcttcgagtgtccgtttttttccaatggtaagtgatggaaagcattattttgatactaaaacatacaaggacatagcatggggtaggaagtaaaatgcctgtgaaagttcaaggtagaaaacaaatcctcaaggaagatctcgtggggctctctgcaggcgggccccagggagtagcatcctcctccttggcatggctgtggactggagtgagatgcagtcatatgtgtttgtagccagtttgtgcagacccaaggctgctgtggaagatgccagtgggtgctgggtgctgggtgctggcaggcagccttggcccaccccaggatgcagaggccttcttccctccaaggcccacagtgggagtcctgccgactctctccgtctcctggggagggaaacctccacaggacaagcagcctgtgtgggggtgggggctgcctccacggacagtgcaggcacagggcaaccttgactgtgagcccagggccagcacccaaccaccccaactgaggcttcctctccatcctctgggaggtcccccgccacactgccttagaggcccagcccctcga

SEQ ID NO: 9851 - DNA, 1428 bp, Homo sapiens
cagcctccagagtaaagtgaaggcgcaaagcctcatgcaaacatcgaggaatgccttcattgtttcgaggtctctcttcctggcctcccaagcccactccctgccccaagtgccacccttccctggcacctgatccctgaggacgttgggtcctggggtgggggcctctgggctcttcctctgggtcccaggagccccctccccactccgtggccccagctccagacgtggcaaggcaagccggagtgaggtttctccactccctcccaagtgctgtgctggcggctcccgaaataaaaatcaaatgtgggcttggcaaagggagcggggtgggagaagcagcggcagcagggctggggcttcattctttccattgtaacttcacctcctaacctctggcattttaattatgtctcctacccccctcactctgcctgggccagggggtgagctcaccctttcctctagcctgggagggggcagctgctgcctggacccccagtccccggcctgctcgggggaatctgggtggcggccatgctgggggtgtcggcctcaggctccctccagcttctccagtctcagaggggcctggagaggggcccagcccccagacagccagccgacacctcaagttccatgtgtgaatcattagtcttcacacccactgctccatttagtggtggccactgtcctaaggcaaggcacggcaggctcaccagcccattctatggatgacttagccatcatcgtctgcaggccaagcctgggcccaggcctatcgctcctggttctgcactctttccaaacccaggaagaggggcaagaacagctcaggcctgataatttgccttatctcttcgagtgtccgtttttttccaatggtaagtgatggaaagcattattttgatactaaaacatacaaggacatagcatggggtaggaagtaaaatgcctgtgaatgttcaaggtagaaaacaaatcctcaaggaagatctcgtggggctctctgcaggcgggccccagggagtagcatcctcctccttggcatggctgtggactggagtgagatgcagtcatatgtgtttgtagccagtttgtgcagacccaaggctgctgtggaagatgccagtgggtgctgggtgctgggtgctggcaggcagccttggcccaccccaggatgcagaggccttcttccctccaaggcccacagtgggagtcctgccgactctctccgtctcctggggagggaaacctccacaggacaagcagcctgtgtgggggtgggggctgcctccacggacagtgcaggcacagggcaaccttgactgtgagcccagggccagcacccaaccaccccaactgaggcttcctctccatcctctgggaggtcccccgccacactgccttagaggcccagcccctcga

SEQ ID NO: 9852 - DNA, 774 bp, Homo sapiens
caacctctggtgtgaagagcatagagaaggcttcccagagtgaggggtgaccaggaggagcccgggaggaagagcatggagggcagagggagcagcatttgcaaggcccagaggtaagacagtgcctagggcagggcccacgggagcatccggcctggagggagcggccagggtcctgggagctgcgcgagctgttagggtgcatcttaggaagatttctgggcaggctgtggaggatgggttggaaggtaatcagaacggaggtggagtgacctcttagaaggctgccacagaggcccaggtgagaggtgatggtagccaggcccaggccagtggcagccaggtggaaagaggtggccagactgataagagatttaaaaggcagaagccagaggacttggtgactgatgggcagaaggatgggggccagtgatctgctcaggctggctcctgggcttctgaagaatgaatgaacgaatgaatgaatgaatgaacaaacgaactgggaaacagcaccagatctgaaagccccaggtttcagcttgatcgtcgggctggggagtttgctgctgcacttgcatttggtacacctgcagggcatccaagtggaggtgcccatgagatggctggacgcatggaggtgccctggagaaggtggagagagaggaagccggcacagcctgcaaagaggccagagaatgagtagccagagcccctgaagcctcacaggaggaggtcttagacaaggcacagccaacagtgccaatggcaaga

SEQ ID NO: 9853 - DNA, 771 bp, Homo sapiens
caacctctggtgtgaagagcatagagaaggcttcccagagtgaggggtgaccaggaggagcccgggaggaagagcatggagggcagagggagcagcatttgcaaggcccagaggtaagacagtgcctagggcagggcccacgggagcatccggcctggagggagcggccagggtcctgggagctgcgcgagctgttagggtgcatcttaggaagatttctgggcaggctgtggaggatgggttggaaggtaatcagaacggaggtggagtgacctcttagaaggctgccacagaggcccaggtgagaggtgatggtagccaggcccaggccagtggcagccaggtggaaagaggtggccagactgataagagatttaaaaggcagaagccagaggacttggtgactgatgggcagaaggatgggggccagtgatctgctcaggctggctcctgggcttctgaagaatgaatgaacgaatgaatgaatgaatgaacaaacgaactgggaaacagcaccagatctgaaagccccaggtttcagcttgatcgtcgggctggggagtttgctgctgcacttgcatttggtacacctgcagggcatccaagtggaggtgcccatgagatggctggacgcatggaggtgccctggagaaggtggagagagaggaagccggcacagcctgcaaagaggccagagaatgagtagccagagcccctgaagcctcacaggaggaggtcttagacaaggcacagcgaacagtgccaatggca

SEQ ID NO: 9854 - DNA, 148 bp, Homo sapiens; identical to SEQ ID NO: 6787
  SITE (136): n equals a,t,g, or c

SEQ ID NO: 9855 - DNA, 130 bp, Homo sapiens; identical to SEQ ID NO: 5837

SEQ ID NO: 9856 - DNA, 10553 bp, Homo sapiens
atccaaggcgcaagatggcgctgctttttgcacgttctttgcgcttgtgccgctggggagccaaacgattgggagttgcctccacagaggcccagagaggtaggattatctctttttactcttttacctccagaatggctgccgtctattattcccagaccccactccgagaagcaactccaaccctctcgggtcttttccttccccacctgccttggtcttaagattccaaacctgtgataccatttggtttctttaaattccgggacttactcaatccgagtttttcagctccgtgagctatccgtagtaaagcgacctcgcgactctcttgcccgcttggcattctgactcttccctagttgctcgtgtatcatggctgcctgcctcatatctgaatatatcaccagccctagggttctagcccctgttattatcccgtctttttgctctgcccgcaggcgtcagtttcaaactggaagaaaaaaccgcccacagcagcctggcactcttcagagatgatatgggtgtcaaatatggcttggtgggattggagcccaccaaggtggccttgaatgtggagcgcttccgggagtgggcagtggtgctggcagacacagcggtcaccagtggcagacactactgggaagtgacagtgaagcgctcccagcagttccggataggagtggcagatgtggacatgtcccgggatagctgcattggtgttgatgatcgttcctgggtgttcacctatgcccagcgcaagtggtacaccatgttggccaacgagaaagccccagttgagggtattgggcagccagagaaggtggggctgttgctggagtatgaggcccagaagctgagcctggtggatgtgagccaggtctctgtggttcacacgctacagacagatttccggggtccagtggtgcctgcctttgctctctgggatggggagctgctgacccattcagggcttgaggtgcccgagggcctctagtatgtccattactggagtccctaatcacgcctttggccagcctccttttgaaagtgtccgaagcctttttactttgcctcaagcaacctctagctcccacaattcagtgttgggtcctctgtgcaatatcatgatcatcttcctcatcccctaccttgtgaaagctaggcatacagccaaaccctccttttccccacccaccaactactgccaatttcctaggctaccatgggtgtatcttccttgacctgcttccttcagtccctctgcctccctttgcccaggcctttctcagactgtattccatcctggggtcttatcattcagctttgtttgaatttattaatcaccatgatacctctccctccctttgtccacatgtaacttgttcttggggctctaccagatggctgaagagtaaatcctttctacctctggctgaaggagtggtgcagtcaatgacttggccctttttctacagcacatttagagtttgggctctggctccctcagtaagtgctttattaactcagtgtgtcaaaatgaaaacagagccctccttccccagtagctcagtgccacagaccttcagccccacacagctgtagctatccttaccctgagtccatctaccttaaatctgtacctctgacacccagccagtctgtcataatcattatcccagttataaccttgaccaaaggggaagagagacacttgggggatatctaggggatgagtgctagaaactatttatttatttttgagacagagtctcactctgtcacccaggctggagtgcagtggcatgatcttggctcactgcaaactctgccttttgggttcaagcgactctcgtgcctcagcctcctgagtagctaggattacaggtgtgtgccaccatgcccgtctcatttttatatttttagtagagatggggttttgccatattggccaggctggtctcgaactcctggcctcatgtgatcagcccaccttggcctcccaaagtgctgggatttcaggcgtgagccaccacacccggccaaaactgtttattcttgagaagttccatcttcatttctgccacagttggaacttcccgaggaaggaaggaggcctgaggttttgcacaatctgtttcagagcctgtttagactcaaacctatgcttcccttggcagcagaatacacttaacctaaagcagtatttggagttgagaaaaacctggtggggtaagtgaatatgtactgtttggtagggtaggtagagaagctgtgctttgaccctgtgattccatctttttctaccttctatgatggtgatgaagctagatacccctagggaagaaagaaggactgggtttagcaaaaatgatttggtaattaaagtttatttgaacacaaaatactttctctgtctataaaattggctgttagcagtagcagcagcatgtcctggccaaggggagtagatttctccagactactaaagccatgtatatagccattcccacttcccatattctgtggatatgtacatgtgcatggtagctagagtccctccaccagagtatctctctcatgatggtttcttcagggagaggaagaggagacctgggtgaagagctgggatggttttgagtggggcaagccattaggctgtaccttgaagcccagtctctctggatagctgtactgcaggtgtcctctgaggcccttctctgtactctgtctgctgagggaatggggtattttgactcccatagaaagcactagcctaagtcaccaaatgactgcttggtccccactgaagcagtgtagctctccatagtatttttggtggttatggattacatgtgtggccagctcatgctttttcttgagcaggggctgtccatgacctgtgctcataccatgctttctaagttctctttggacagggcctcagctgctgcctcagcctgagtttcagagagtgtgtaggagtcctggtaatcttgaagcagtttgaccacctccagatggttgaactgcacagcatcatccaggggaatgttgccccacctgagaggaataatgatatgatcaggcaaaggagacgtggagagtggtggttgtatatatttgcatggtggctggagggtaggtggagaagctgtgcccaccctcctccacttttagcctattcctcacctgtccttggcaaaaggattcactttgcaagcctcgatcaggaatttaacaacttcgatgtgtcctaggaatatgggcagaaggaaaatgagaaggcgcaggtcttgaaccctttggtgcagacacttagccactgaagtctttaccaagaggggaggggaaaaggcctcttcccattttgtaccctgcagcactcagtcatagtctagctgcaaaccgaagggtgtctagataaaactagttgctgcccctataaccttgagggcacatataatgaaggtacttttggtgaaaaagaaagggtcttatgattaccctcctcctcccctccttaacccttcagtaccttcagctgcagcaacatgcagagctgtgcgcgagtcatagtctttctgttccatatccatggctgacaaggcaaacctgagggtagtgggaaagcagctagagttgcctagatcagactggaatcacaggtgttctttgtgaactggtgtcagactggatgagtttcagagaaagtgaaacagcctatagccagatttgttggctctgaataatcttttttccatatccagatgagactgttatactcatattagagagatgggaatgtgatccttccagaaatatcactcactgcctacctgtggtaagtgcccatttgaggcagggtacctacttcctaggacactgctcttaacactcaataacaatggctaacattaattatcatagagcagacagtttactttttttaaaaaaaatctccttttttaaaaaaatttcatttaaatgcaatctatatccattctaattccaaagctgaagcacttaactattttgctacgctgcctcctagtaaaatctctgaccaggagtattttattgtgtatatttggtcacagtagcattaccttcgaagagctgagacatcgccactataggcagcaaataacaggttgaccacagtcttgttctggaacacaaatcatacccacatgacattaattgaactcacctatgccagctgtgccctgtgaccctcctccatggatgcttagtccaagggtattgctgaagtgttatggaatgtgctactctgaaatattcttttttttttttttttttttgagacggagtctcgctctgtcgttcaggctgaagtgtagtggcgcgcggtcttggctcactgcaacctctgcctcccggtttcaagcgatgctcctgcctcagcctcccaagtagctgggaccacaggcgcgtgccaccacgtctggctaattttttgtattttcaatagagaccaggtttcaccgtgttagccaggatggtcttgatctcctgaccttgtgatccgcccgccttggcctctcaaagtgcagggattacaggcgtgagccaccgcacctggcctttgaaatattcttacaagccacctggagttttccttacccgaatttctgccccttcacgccgtgggtctaacttccgagcacagtgcctcaggttgtcatagttgtggaaattgaagagagacaccaacttctagaattgtaagccaaatatattgtttatttactccttacacttagtaggagctcaaaattgctttattatagtaaaagtggtaccattaaacaaatttattgcttcaaaaatagtaagtactatatgcaaagcatctcacctggcagaagctggtccccctatggctgttccccagcttgtccaatgggggtgacaggcacatcattcccatgacattgggtaccaccaggaggatggctcctgatacagctgacttggctggcaggcccacctggggaacagaactgaagctgaggataaagtgggtgtgccccaaatcagaaaataaacaagttaggctgtactcttaacaagtttacaaatgactgcatgaccacaatccacctcaaccttttggcttgttaattagcttcttttattactcctgtcctttccttcccttaaattcattgattcagctagaaaatattttttgaaatacttacagcattctgtgctagatgctgtgctagaactaggaacttccattctggtgttaggagataggtaataaacaggtaaataaatagacacgtaatgtttaaagtaattgtgataaatagtgagaagtagggtgctgtaaatagaggtagaggggggccacatgagatagggtggtcagaaaagtctttctttggaaatgacatctaagctgagaccccaaggagaagagccagcaatgtgaagcacaattcaggagctgcaacacctctggttgtttttctttttctttttttctttttttttgagatggagttttgctcttgttgcccaggctacagtgcaatggcacaatctcggctcagtgcaacctctgcctcccaggttcaagcacttctgcctcagcctcccaagtagctgggattacaggtgcacaccaccacccccggctaattttttgtatttagtagagatggggtttcaccatgtaggtcaggctggtctcgaactcctgacctcaggtgatccacctgcctcggcctcccaaagacatctctttatatattcgaggaacttggtgtttttgagaaactcgtctaaggagtctcaacctaattgccttcctggaagttagtgaatgagaggcaggaacaagcttccacctctatcttgagagagtcagtgttctctcttcttagcactgggctcatgacagatggatagcagagccagaaactcacgtggaaggcaaactggccagagaagtcatacatgccgcaggaatgcatgaggctgagggtgttgcgcactgcttcagcactcagcacactctcgcctgtgatggggcagatcccaccgttggcgagggtggctgccatgacactgcctgattcacaagtgacctccacagaacacagctatgaaaacaaagaataggtgaagatgtgacgtgaacctgcacatgggaccctcgggtgtagggaaagggcaagggcaaggacagtctgtcctgttccctcggccctgagcagtgttttcttacctggaagtagagatcaagggcagccatcatgtccacccccttaggaaagcactgcaaggaagagaggggagagcatttctcttcaggacatcagccctttcacactgtcagggtctcagctgaagcccccaacccctactgcccttccactagcagcagaattcccagggactttctcttccggcctcttctggttaccttcttttccttgagataatagccgatggcataattccgatcccctgtttccttctctgactggaatctgaagcaaacacccaatttagtacttgaagttggaggagtgggtgttgggagaaggggaaaaattaccttccctggagagacagaactacatcacaccacaaactaaatgaacccctttataacttctcacagtaatattagaggaaatttctgaacctgagcaaacactcagcatagttttgttataaagtaaacccaaaccaaacaccccaaactgtctagtcatctaggaaaactggtgaagtttttggctttgaaagtcttggcaagaaagggcttaggcacaaaccatcacactgcctctctcattatgtactaattagaaatggaacaaattattttacaagataaacaaatgtttatgaagggactcagaggaagctggagggccaaagttcccctgggatttcttcctcctaagattctctctcccccattcctcttgtccccatcctaagtacacacacatacaccacaatgctttcagtcagtcctctgagtagggacttacgtggcattgctgaaacccatgtattcattcccagccattttgttgagatactgcaacacctggaagagaaaaagggacattgaggctccacttggttaagaagctctattaatacctcacaggttgactagcccttctgaactcaggtcttgtcaagaggctttcctctctgaggccagcagatttccacatttctggaaataaggcttctagtatgggctggtgcacctggtagtggggttagagagccactggggcagctggagaggacagcatgccatggcgaaatgcagccaggggctaagtagcaagggaacttacaaaatcaaacttctctgctttgttacagtccatctgcagagaaagagagagatgtcagcattctaagtgtaggaggatgacagagggaagggtcagaaggatctagtggagttctagtgttagtctggtcctgctgctgcaaatgtgttcaattttataatggccctttttttatccttctgaaaacaccgcacttccattggctcctctctttctctttcttttttttgagacagtcttgctttgtcacccttgtcacccaggctggagtgcagtggcacgatcatggctcactgcagctttgacctcccaggctcaagcgatcctcccacttcagcctccaagtagctcggattacaggcatgagccagcttgctgggccatcccacttccattctcaatccaaaccctcatccctgactcccacgttcattttcctgactcgaatcctgtctcctagccccaccctatccctgatctccatccccattccttacaccccatgctggagctttactccatcccattggccagcatgatggttcatgcctgtaatctcagcaatttggggggctgaggcaggaggatcgcttgagaccaggggtttgagaccagcctaggcaacataggagagaccctgcctcaatttttttttttttttttttttgagatggagtcttgctctgtcgcccaggctggagtgcagtggcaggatctcggctcaactgcaagctccgcctcccgggttcataccattctcctgccttagcctcccgagcagctgggaccacaggtgcccaccaccaagcctggctaattttttgtatttttagtagagacggggtttcaccgtgctagccaggatggtctcgatctcctgacctcgtgatttgcccacctcggcctcccaaagtgttgggattacaggcgtgagccaccgcgcctggcctctatattttttaaaaaaggtcctacttagatgggaatgggatgaggcaggtcccagatacaggtttgtagatggagccatcacagaacaaggggagagactcagcctcttttcctcacccagactcattgcttactcatgtgtcaactacagagtcaataccacagggactctgatacctgagtccctgaggggaggattcctaacaccaccttccccaggaggggctgtgattggctccagggtgttgctgcccagctgctcccaggttcttgctcaagccctgggagacctacagctgatgggctagtctgacaccctgttcaaggccaactcacagttccaggtgacgtgaataactgccctggcctggccattcacccttgcctgcaggtgtcccacacccagaagtggccaatcagtgcccaatagtgctgtcctccccttgtctctggcatttggcccttggtcctaggcaggggtcaggacctgctcacttctctaagggtcagaaagctctaggctctagactcatgggtgggggcagggaacagtactgagtggggatgacggaggtggtgcagtctcttatactgacattgtcagcataacatgtgggtccctgctgtgcctcatgtgccttctggggaccctcaaaggaatcagagccccaccagtctccctggagagctgaacaaatatgagggatacaggaacacaggagcttagaggataatacctatcagaaggttaaggtggcactgaccttgatcagggagctgacaacaatggcaccagcattgaccatggggttatgggggattcctggggaaatacaaaccaccaagagtcttagccactgaacaaagcctccctgacagcccgctcactttgtgggttagacaagaaagactgctagggagaaaggcatgacagggctaatcaggaagggcagagaaacaaaaaaggctgggagatggggtggggataaggagaaggggacagctgtaagtacggtctgagccttggtagtgctcaccttcctcattgagggagagcttgttgtagcgcaggccacttggctctttgcccacaaacttgtgcacgtagtcagtgcctagggtgcttatggagatggcataggtgaggggcttcacacaggactgcaggcagaaggggatctttgtgtggcccacagagtgcctggaggcagacagatgccatgaaaggggttggcctgtgttcggcacctgtgccctgcctccccttcctcttgcccagcatctcaccgttgaccatccacagtgcacagggagacaccccacaggtctgggtttgacttggccagctgagggatgtaggctgccacctggacatgagtgggtagagaaaagggagatggatgtggagaagaggaacagagttgaggttgagggtcaagagaatcttttagataaaagctaaaattctgtcttctatagggcagaggggttccctcctgcctgttgctcccagaaatgcccgagccttaagtcctagaaggccatatctttgtgtatccgcaatcctgtagagatagcagtaaagccaatggaagttaaaaaaggagaattctgaggcaaccttccccttttggttcttaggctcagttaccctataaatccctttgaaggctctattcgatcttgattccctcacctgctctaggaatcgtgtatagaaacacatgaagccatgtcaccatttacagaagttctgcttctcatctctcattcataggactcccagccccaggaaatctctgagaagcgaggtatatctaggtgtggtggctcatgcctgtaatcccagcactttgggaggccgaggtgggtggatcacttgagatcaggagttcgagaccagcctggccaatatggcaaaaccccatctctactaaaaatacaaaaattagtcgggcatggtggtgtatgccagctactcgggaggctgagacaggagaatcgcttgaacctgggaggtggaggttgcagtgagctgagattgcaccattgcactccagcccgggtgacagagcaaaactctgtctcaggaaaaaaaaaaaaaaaaaaaatctggcccaggtccctgacccctcccttagtcccctgactctcactttgcctccagtgagctctttgacatcctcaaagatgcgatccacatggcccgtgaactcctcaaaatcaggaatgaca

SEQ ID NO: 9857 - DNA, 143 bp, Homo sapiens; identical to SEQ ID NO: 5839

SEQ ID NO: 9858 - DNA, 116 bp, Homo sapiens; identical to SEQ ID NO: 5840

SEQ ID NO: 9859 - DNA, 151 bp, Homo sapiens; identical to SEQ ID NO: 5841

SEQ ID NO: 9860 - DNA, 126 bp, Homo sapiens; identical to SEQ ID NO: 6134
  SITE (9): n equals a,t,g, or c
  SITE (10): n equals a,t,g, or c
  SITE (14): n equals a,t,g, or c
  SITE (20): n equals a,t,g, or c
  SITE (95): n equals a,t,g, or c
  SITE (107): n equals a,t,g, or c
  SITE (108): n equals a,t,g, or c
  SITE (110): n equals a,t,g, or c
  SITE (118): n equals a,t,g, or c

SEQ ID NO: 9861 - DNA, 151 bp, Homo sapiens; identical to SEQ ID NO: 5843
  SITE (4): n equals a,t,g, or c
  SITE (45): n equals a,t,g, or c
  SITE (89): n equals a,t,g, or c

SEQ ID NO: 9862 - DNA, 118 bp, Homo sapiens; identical to SEQ ID NO: 5844

SEQ ID NO: 9863 - DNA, 100 bp, Homo sapiens
tttttgtacttttggtagaggcggggtttcaccatattggccaggatggtcttgatctcctgacctcgtgatccgcctgcctcggcctcccaaagtgctg

SEQ ID NO: 9864 - DNA, 2953 bp, Homo sapiens
agctggctgcagggtctctggggagagaagggtctgtgcagggctgtggtgagagacgggctgggctggaggggcctaggaggccggcattctcccttcttacccttctctgaccaaggcagatcggaggccagggtgcccgccaggctgcctgacacccacagatgggtggagctcagtgctgctccagcgggcgagacgggcgggagaggactgtggcccaccacgtggggcactcttggtgaggcaggcggacctggccctgtgggtttgggggttctgtgccagctctgctcacgtcttcgtgtgtggaggggttgtgagttaggctgtcagaacagtgcgggctagaggcgcacacgtttcatctaggcttcgggcggggcgcagcaggtgggtgaggctgcggtggtggctgctgcccagggtgggaggctcaggggaggcgcttggcgacaggagcaggaagtgatgaggtggggagctcagccgagggctgcacaaagaccttcctggcctgccccagacagagctgaggacccctggccgtgggcttggtaagtgccctcctggggggcagctggggtctgggaggccttgggatgtggctgcagctgggtcagtcagccaggctgaagcccactccctgggtctgagcagactggccccaaactccagagaccacccctcaccccccagcttctgtctctgctgctggactgtgctgtttgtaaggcatcccccaccccgagaagttctgctaagatccccaagaaggggacagatcctctctggcagagacactggcagacaagaagagccagagagaagtggggtgggggcatcagcacccccagcagctgctgctgcctgctgacccagcctccagctcctccgggtgcagggtccctcctgctgaccagcctccagctcttcccagttctgggctccgcagcgagcggcttgggggcactacctgacacaggagaccatgtctgggcagagggtggctgcaggtggagtctgtggccctgtggcgcacacccaggggctcccccgatgctggttactatctgggctatggtggccacagctgtcttgcccctcctcacggccgtgctgggtgttaccgtggtcacccgcagggacacggaggggccaggcagagcagccctagttcacctcaccgggagcccccgccagaaggtgggcacctctgggagggagggactgccaggccttggggcttcctgtgctgagtcagagctggaacgggagacgcaggagccccgcagccgcgggaggtgcagatttggggctgccaggtggcgccaggtccccttggccagcccccagcgcccctttcttctgtccccagggcctcggcttcacaggatggggctgccagtgtcctgggcccctcctgccctctgggttctagggtgctgcgccctgctcctctcgctgtgggcgctgtgcacagcctgccgcaggtaggtccctcagccgcgttctgtctggggcctcgctgcggctgccattcacagcccagcgcgggaaggggctggaggcaggtccgcgcacccagctcggcacgcgcgcctgcaccgggccttggacccgaggctgacgaccccgccccccgccccccacctctacccccaaggcccgaggacgctgtagcccccaggaagagggcgcggaggcagcgggcgaggctgcagggcagtgcgacggcggcggaagcggtgagtgccaggctgtcccggggaccagggtggggtccgcagggcaccgaccagccttcctcgcccccagtccctactgaggcggacccacctctgctccctcagcaagtcggacaccagactgcacgagctgcaccggggcccgcgcagcagcaggggtgagcagagggcggggcgggggcggccgggcggggcttactgtgcagcgcgtgccaacccctgggccagacccgctcctgccccctgcccggagtgaactctgccctgaccccacccccagccctgcggcctgccagcatggatctcctgcgcccacactggctggaggtgtccagggacatcaccggaccgcaggcagccccctctgccttcccacaccaggagctgccccgggctctgccggcagctgcagccaccgcagggtgcgctggcctcgaggccacctattccaacgtggggctggcggcccttcccggggtcagcctggcggccagccctgtggtggccgagtatgcccgcgtccagaagcgcaaagggacccatcgcagtccccaagagccacagcaggggaagactgaggtgaccccggccgctcaggtaacgtgggccagggtagggcgctgtgggtggggccggcagatcctcagcaggttggatggtgctgacccctcctcgggttggcttcctgtctccaggtggacgtcctgtactccagggtctgcaagcctaaaaggagggacccaggacccaccacagacccgctggaccccaagggccagggagcgattctggccctggcgggtgacctggcctaccagaccctcccgctcagggccctggatgtggacagcggccccctggaaaacgtgtatgagagcatccgggagctgggggaccctgctggcaggagcagcacgtgcggggctgggacgccccctgcttccagctgccccagcctagggaggggctggagacccctccctgcctccctgccctgaacactcaaggacctgtgctccttcctccagagtgaggcccgtcccccgccccgccccgcctcacagctgacagcgccagtcccaggtccccgggctgccagcccgtgaggtccgtgaggtcctggccgctctgacagccgcggcctccccgggctccagagaaggcccgcgtctaaataaagcgccagcgcaggatgaaagcggcca

SEQ ID NO: 9865 - DNA, 2947 bp, Homo sapiens
agctggctgcagggtctctggggagagaagggtctgtgcagggctgtggtgagagacgggctgggctggaggggcctaggaggccggcattctcccttcttacccttctctgaccaaggcagatcggaggccagggtgcccgccaggctgcctgacacccacagatgggtggagctcagtgctgctccagcgggcgagacgggcgggagaggactgtggcccaccacgtggggcactcttggtgaggcaggcggacctggccctgtgggtttgggggttctgtgccagctctgctcacgtcttcgtgtgtggaggggttgtgagttaggctgtcagaacagtgcgggctagaggcgcacacgtttcatctaggcttcgggcggggcgcagcaggtgggtgaggctgcggtggtggctgctgcccagggtgggaggctcaggggaggcgcttggcgacaggagcaggaagtgatgaggtggggagctcagccgagggctgcacaaagaccttcctggcctgccccagacagagctgaggacccctggccgtgggcttggtaagtgccctcctggggggcagctggggtctgggaggccttgggatgtggctgcagctgggtcagtcagccaggctgaagcccactccctgggtctgagcagactggccccaaactccagagaccacccctcaccccccagcttctgtctctgctgctggactgtgctgtttgtaaggcatcccccaccccgagaagttctgctaagatccccaagaaggggacagatcctctctggcagagacactggcagacaagaagagccagagagaagtggggtgggggcatcagcacccccagcagctgctgctgcctgctgacccagcctccagctcctccgggtgcagggtccctcctgctgaccagcctccagctcttcccagttctgggctccgcagcgagcggcttgggggcactacctgacacaggagaccatgtctgggcagagggtggctgcaggtggagtctgtggcctgtggcgcacacccaggggctcccccgatgctggttactatctgggctatggtggccacagctgtcctgcccctcctcacggccgtgctgggtgttaccgtggtcacccgcagggacacggaggggccaggcagagcagccctagttcacctcaccgggagcccccgccagaaggtgggcacctctgggagggagggactgccaggccttggggcttcctgtgctgagtcagagctggaacgggagacgcaggagccccgcagccgcgggaggtgcagatttggggctgccaggtggcgccaggtccccttggccagcccccagcgcccctttcttctgtccccagggcctcggcttcacaggatggggctgccagtgtcctgggcccctcctgccctctgggttctagggtgctgcgccctgctcctctcgctgtgggcgctgtgcacagcctgccgcaggtaggtccctcagccgcgttctgtctggggcctcgctgcggctgccattcacagcccagcgcgggaaggggctggaggcaggtccgcgcacccagctcggcacgcgcgcctgcaccgggccttggacccgaggctgacgaccccgccccccgccccccacctctacccccaaggcccgaggacgctgtagcccccaggaagagggcgcggaggcagcgggcgaggctgcagggcagtgcgacggcggcggaagcggtgagtgccaggctgtcccggggaccagggtggggtccgcaggggaccgaccagccttcctcgcccccagtccctactgaggcggacccacctctgctccctcagcaagtcggacaccagactgcacgagctgcaccggggcccgcgcagcagcaggggtgagcagagggcgggggcggccgggcggggcttactgtgcagcgcgtgccaacccctgggccagacccgctcctgccccctgcccggagtgaactctgccctgaccccacccccagccctgcggcctgccagcatggatctcctgcgcccacactggctggaggtgtccagggacatcaccggaccgcaggcagccccctctgccttcccacaccaggagctgccccgggctctgccggcagctgcagccaccgcagggtgcgctggcctcgaggccacctattccaacgtggggctggcggcccttcccggggtcagcctggcggccagccctgtggtggccgagtatgcccgcgtccagaagcgcaaagggacccatcgcagtccccaagagccacagcaggggaagactgaggtgaccccggccgctcaggtaacgtgggccagggtagggcgctgtgggtggggccggcaggtcctcagcaggttggatggtgctgacccctcctcgggttggcttcctgtctccaggtggacgtcctgtactccagggtctgcaagcctaaaaggagggacctaggacccaccacagacccgctggaccccaagggccagggagcgattctggccctggcgggtgacctggcctaccagaccctcccgctcagggccctggatgtggacagcggccccctggaaaacgtgtatgagagcatccgggagctgggggaccctgctggcaggagcagcacgtgcggggctgggacgccccctgcttccagctgccccagcctagggaggggctggagacccctccctgcctccctgccctgaacactcaaggacctgtgctccttcctccagagtgaggcccgtcccccgccccgccccgcctcacagctgacagcgccagtcccaggtccccgggctgccagcccgtgaggtccgtgaggtcctggccgctctgacagccgcggcctccccgggctccagagaaggcccgcgtctaaataaagcgccagcgcaggatgaaagcggcca

SEQ ID NO: 9866 - DNA, 2943 bp, Homo sapiens
agctggctgcagggtctctggggagagaagggtctgtggtgagagacgggctgggctggaggggcctaggaggccggcattctcccttcttacccttctctgaccaaggcagatcggaggccagggtgcccgccaggctgcctgacacccacagatgggtggagctcagtgctgctccagcgggcgagacgggcgggagaggactgtggcccaccacgtggggcactcttggtgaggcaggcggacctggccctgtgggtttgggggttctgtgccagctctgctcacgtcttcgtgtgtggaggggttgtgagttaggctgtcagaacagtgcgggctagaggcgcacacgtttcatctaggcttcgggcggggcgcagcaggtgggtgaggctgcggtggtggctgctgcccagggtgggaggctcaggggaggcgcttggcgacaggagcaggaagtgatgaggtggggagctcagccgagggctgcacaaagaccttcctggcctgccccagacagagctgaggacccctggccgtgggcttggtaagtgccctcctggggggcagctggggtctgggaggccttgggatgtggctgcagctgggtcagtcagccaggctgaagcccactccctgggtctgagcagactggccccaaactccagagaccacccctcaccccccagcttctgtctctgctgctggactgtgctgtttgtaaggcatcccccaccccgagaagttctgctaagatccccaagaaggggacagatcctctctggcagagacactggcagacaagaagagccagagagaagtggggtgggggcatcagcacccccagcagctgctgctgcctgctgacccagcctccagctcctccgggtgcagggtccctcctgctgaccagcctccagctcttcccagttctgggctccgcagcgagcggcttgggggcactacctgacacaggagaccatgtctgggcagagggtggctgcaggtggagtctgtggcgtgtggcgcacacccaggggctcccccgatgctggttactatctgggctatggtggccacagctgtcttgcccctcctcacggccgtgctgggtgttaccgtggtcacccgcagggacacggaggggccaggcagagcagccctagttcacctcaccgggagcccccgccagaaggtgggcacctctgggagggagggactgccaggccttggggctttcctgtgctgagtcagagctggaacgggagacgcaggagccccgcagccgcgggaggtgcagatttggggctgccaggtggcgccaggtccccttggccagcccccagcgcccctttcttctgtccccagggcctcggcttcacaggatggggctgccagtgtcctgggcccctcctgccctctgggttctagggtgctgcgccctgctcctctcgctgtgggcgctgtgcacagcctgccgcaggtaggtccctcagccgcgttctgtctggggcctcgctgcggctgccattcacagcccagcgcgggaaggggctggaggcaggtccgcgcacccagctcggcacgcgcgcctgcaccgggccttggacccgaggctgacgaccccgccccccgccccccacctctacccccaaggcccgaggacgctgtagcccccaggaagagggcgcggaggcagcgggcgaggctgcagggcagtgcgacggcggcggaagcggtgagtgccaggctgtcccggggaccagggtggggtccgcagggcaccgaccagccttcctcgcccccagtccctactgaggcggacccacctctgctccctcagcaagtcggacaccagactgcacgagctgcaccggggcccgcgcagcagcaggggtgagcagagggcggggcgggggcggccgggcggggcttactgtgcagcgcgtgccaacccctgggccagacccgctcctgccccctgcccggagtgaactctgccctgaccccacccccagccctgcggcctgccagcatggatctcctgcgcccacactggctggaggtgtccagggacatcaccggaccgcaggcagccccctctgccttcccacaccaggagctgccccgggctctgccggcagctgcagccaccgcagggtgcgctggcctcgaggccacctattccaacgtggggctggcggcccttcccggggtcagcctggcggccagccctgtggtggccgagtatgcccgcgtccagaagcgcaaagggacccatcgcagtccccaagagccacagcaggggaagactgaggtgaccccggccgctcaggtaacgtgggccagggtagggcgctgtgggtggggccggcagatcctcagcaggttggatggtgctgacccctcctcgggttggcttcctgtctccaggtggacgtcctgtactccagggtctgcaagcctaaaaggagggacccaggacccaccacagacccgctggaccccaagggccagggagcgattctggccctggcgggtgacctggcctaccagaccctcccgctcagggccctggatgtggacagcggccccctggaaaacgtgtatgagagcatccgggagctgggggaccctgctggcaggagcagcacgtgcggggctgggacgccccctgcttccagctgccccagcctagggaggggctggagacccctccctgcctccctgccctgaacactcaaggacctgtgctccttcctccagagtgaggcccgtcccccgccccgccccgcctcacagctgacagcgccagtcccaggtccccgggctgccagcccgtgaggtccgtgaggtcctggccgctctgacagccgcggcctccccgggctccagagaaggcccgcgtctaaataaagcgccagcgcaggatgaaagcggcca

SEQ ID NO: 9867 - DNA, 28091 bp, Homo sapiens
gcggcgctcgggaggaagtgccgatcggctgctggggcgaaaagggggcgccgggccgctctagccggtgaggccggcgggctctctgtggctgcggctgggaaaccgcgcggaggaggtgcccggccggggaccaggtggccgcggtttgcggggacgcggccctggccagacagaagagacgccgggcgggggggcgcggccggcctggaaggcggcgggcgcggcgggtgggctcggcggagggtgaggcggcggggcgccccgcggggaaggggctccggagtgacgcgggacccggctagcggcgagcccacggcggctcggaagggaagcgcggagcctgagcgggggtacccgggctgcgacctctgcgctgggagctgtgcctctgagccggtgtctccccgagggaaaggggacgtgcccgtgcccgtgcccgccctcaggctgtggggtcggtcccgagacgcggggctcagctggcttctcttcttgcagccctggtccagcgcctccctctctcagcatggacgaggagagcctggagtcggccttgcagacctaccgtgcgcagctgcagcaggtggagctggccttgggcgccggcctggattcgtctgagcaggctgacctgcgccagctgcagggggacctgaaggagctcatcgagctcaccgaggccagcctggtgtctgtcaggaagagcagcttgttggccgcgctggacgaagagcgcccgggccgccaggaagatgctgagtaccaggctttccgggaggccatcactgaggcggtggaggcaccagcagcggcccgtgggtccggatcagagaccgttcctaaagcagaggcggggccagaatctgcggcaggtgggcaggaggaggaagagggagaggacgaggaagagctgagtgggacaaaggtgagcgcgccctactacagctcctggggcactctggagtatcacaacgccatggtggtgggaacggaagaggcggaggatggctcggcgggtgtccgtgtgctttacctgtaccccactcacaagtctctgaagccgtgcccgttcttcctggagggaaagtgccgctttaaggagaactgcaggtaaagccctttgttgtcagatgccaaccttaggggcgtaaggggcacgcacacagggtcgggtcaggatcggccctccctttgctttgcagttttgtctcagcttcctggggcaggcgtgctttgacagctgtgtctgtgttcaggcgtctacgtcttccttctggggtgaatcaagaagcatggaaggaggccaggcgcggtggctcacgcctgtaatcccagcactttaggaagccgaggcgggcagatcacctgaggtcaggagttcaagaccacgctggtcaacatggtgaaaccccatctccttaaaaacacaaaaatgaaccggtcgtggtggcgcgcacctgtggtcctggctactcaggaggctgaggcaggagaattggttgaacccaggaggccgagtttgcagtgagtggagatgcagccactgtactgcagcccgagcagcagtgcaaggcttatgtggaagagagtaggtctccagcctatcgtcagtttttttttggtggttgttttaattttttttgagacagggtcttactttgtcaaccaggctggagtgcagtggcatagtcctggctcactgcagcctggacctcctgggctcaaccgatcctcctgcctcagcccccctaggagctgggctacagactcacgctactacacccagctaatttttatattactataattttttatcttttttttgagatggagtcttgttctgttgcccaggctggagtgcagtggcgtgatctcggctcactgcaagctccgcctcccgggttcacgccattctcctgcctcagcctcccgagtagctgggactacaggcgcccgccaccatgtctggctaattttctgtatttttagtagagacggggtttcaccatgttagccaggatggtctcaatctcctgacctcgtgatccgcccaccttggcctcccaaagtgctgggatgacaagcgtgagccaccgcgcctggccttttttttttggagacagagtttcactctcctcacccaggctggagtgtagtggcgcaatctcagcttaccgcaacctctgtctcccgggttgaagtaattctctacctcagcgtccagagtagctggcattacaggcgcccgccaccacactgggctaattttttgtatttttagtagagtcggagattcaccatcttggccaggctggtcttgaactcctgacctcgtgatccacccaccttggcctcccaaagtgctgggatcacaggcgtgagccactgcgcctggccctgttgttagttttattctctagagttcaacttttaaattttactttcatggagattttcaaacataccccaaattagagagtttagcataatcaccgcccacggtccatcatccaatgtcgtcatttattaatattttcccagtctcattttgtctgttctccctgccctatttttttctttcctgggccattttaaagcaaattccagaagttactggttttttccaattatgaatacttcatagttgcatctctaatctaactgattaggaaattacttaaaaagtaactttttggaagtccaagtccgatgtgaggacaaaaaagagtaacttctgtgtcataataggtaacacatttaatggtaatacctcttccatattcaaatatgaacaattattactgtaatgtctctatttccctaagcgcatagctttatttttcctcctttttacttttctcttagaagaaatatttaccaagccttctagtaggtaattttcttttttagccaatagttcaggctgaccgtgtaaccatccctagttctagttctagttctttgaatgtcttccttttttttttttttttgaaacagcgtcttgctgctctgtcacccaggctggagtgcagtggcacaatctcggctcactgcaatctccgcctccctggcccaagccatcctcccacctcagcctccctaatagctgatactacaagtgtgcactgccacgcccagctaatttttgtattttttgtagagacgggatttcaccatattacccaggtctcgaattcctgatccctttgatgagagatctgacacatccctgtggtgctccctctgggccaggcactgctccaagggtttcatatactttcattcatctgtgcaacagccctgtaggtaggccctgcagtcacaccatctgacagaggaggaaacaggagtagaagaactgagtggtccagggcttcaaggctcagagggctccggttgcccccagccctcgttccgtcccctgctccacccagtgctgcttgccatgtcggcatcaggcctgatctgaaagcttccggagcatcttacagacgtccaccttgccaccattcaggactgataagttctcttggatttgcgttggaccttttttttttttttaagatggagtttcactgttgttgcccaggctagagtacaatggcatgacctccacctcctgggttcaagggattctcctgcctcagcctcccaagtagctgggattacaggcgcctgtcaccacgtggtgcccagctaatttttatatttttagtagaggcagggtttcaccatgttggccaggctggtctcgaactcttgacctcaggtgatcccgccttggtttcccaaagtgctgggattacaggcatgagccaccacacccggcccaggatttctttatatattctggatatcatcccttatgaagtatatagtttgcagatatttgctcccattgtttgggttgtcttttcacttgatatagtgtcctttgatgcacaaacattttaaattttgatgcagtgcaatttattgtttctttattgcctatgtttttgtcatcaggtttaagaaaccacctcatccatagttatgaggattttcacctatgttttcttctaagagttctgtagttttagctgttaaatttaggtctttgatccattttgagttaatttttgtatatgttattaggtgagggtccactttattcttttgcatgtggatttccagttttcccagcaccatttgtttaaaagactgctttttctccactgaatggtcttggcacttttgtccaaaatcaattggcaatatatgtaagggtttatttctgagctctctctcctgttccattggtgtatatgtgccagtaccacactgttctgattattatagctttgtgataagttttaaactcaggaagtggtagttattcaccatttgctcctctttttcaagtttgttttgtttctggatcctttgcaatttcatatgaattttaggatcggcttgtccaattctgcataaaagacagtttgaattttgatatggattgcatagaatgtgtagatctgtttggggcacattgtcatctttacaatattaagccttctggctgggtgtggtggctgacgcctgtaatcccagtactttgggaggctgaggcgggcatatcacttgaggtcaggagttcaagaccagcctggccaacgtggtgaaaccccgtctctactaaaaataaaaaacaaattagtcggaggtggtgcacacctgtaatcccagctacacgagagggtgaggcaggagaatcgcttgaacctgggaggaggaggttgcagtgagctgagatcatgccactgcactccagcctgggtaacagagggagactccatcttaaacaacaacaataacagaagaaaaaaacagtattaagtcttccaattcatgaatgaaggatctgtccatttatttacgtctttaatttctttcaacagtattttgtactgttcaagtcttgcacattcttggttaaataagtattatttttgatgcttctctaaggaattgtttttcttttccttttttttttgagacagagtcttgctctgtcacccaggctggagtgcaatggcacaatcttggctcactgcaacctctgcctcccgggttcaagcaattcttctgctcagcctcccaagtagctgggatcacaggtgcctgccaccacacccagctaatttttttttttgagatggagtcttgctctgttgcccaggctggagtgaagtggcccaatcttggctcactgcaagctccacctcccgggttcacaccattcttctgcctcagcctcctgagtcgctgggaatacaggtgcctgccaccacgcccagctaattttttgtatttttagtagagatggggtttcaccatgtagccaggatggtctcgaactcttgacctcaggtgatctgcctgcctcggcctcccaaagtgctgggattacagatgtgagccactgtgcccggctggagttgttttccttagttacattttcaggctgtttgttgctagtatatagaaatacaagctgggcaccgtggctcacgcctgtaatcccagcactttgggaggccaaggcgggtggatcacctgtggtcaggagttcgagaccagcctggccaacatggtgaaatccagcctctattaaaaatacaaaaattagtctggcatggtggcaggtgcctgtaatcccatctactcaggaggctgaggcaagagaattgcttgaacctgggaggcggaggttgcagtgagctgagatcgcgccattgcactccagcttggggaacaagagtgagacttcatctcaaaaaaaaaaaaaaagaaatacagtggatttttttatgttaatcctgtattgattgctgaattggtttattagtgctaataggattttttatgcactatttaggattttcgatatatacaatcatatatattcaatatatacaattaatatatatgtgaatagagataattgtagtctttgtttctagtttgcatggcatttatttctttttcttgcttaactgccttagctagaacttcaagtacaatgttgaataaaagtgactagagcgggccgggggtggtggctcacacctgtgttcccagcactttgggaggtggaagtgggcagatcacttgagatcagcagtttgagaccagcctggccaacacggcgaaaccccatctctactaaaaatacaaaaattagctgggtgaggtgatgtgcacctgtagtcccagctacttgagagggtgagacatgagaattgcttgaacctggggggcggaggttgcagtgagccaagatcatgccactccactccagcctggacgacagagcaagaaccctgtctttaaaaaaaaaaaaaaaaaaagtggctagaacaaacatctttatcttgttcctgatcttaggtggaaaacttttttgttcctgatattaggtggaaaacttttagtctttcactgttgaatatgatgttacttgtaggttttctgtagattccctttatcgagttgaggaaattctcttatattcatagtgtgttgagtgttttttatcatgaaagggtgttgattttttttttaaagatagggtcttgttctgtcacccaggctggagggcagtggcatgatcatggctcactgcaacctcgaattcctgggctcaggggatcctcctacttcatcctcctgagtaggtgagactacaggcatgagccaccatgcccagctaattttttaatttttctgtagaggtagggtcctgctttgctgcccaggctggtcttaaactccagggctcaagcaatcctgcctcagcctcccaaagtgctgagattacaggggtgagtcactgcactgcacccagctgtgtgggatttttcaaatgcttttttcctttagatgatcatgtgtggtttttttcctttcattttgttaatgtggtatattgattttcgtatgttgaaccatccttgaattcctcagataaagcacgcatattcatggcgtattatctctttattattattatttttgtagagatgagatttcactctgttgcccaagctggtctcaaactcctgggctaaagtgatcctcctgcctcagcctccgaaagcgctgggattataggcatgagccacttggccctatcttttttctttttctttttttttttttttgagacagagtctcactctgtcgccgggctggagtgagtggcgcgatctcggctcactgcaacctccatctcccgggttcaagcaattctcctgcctcagcctcctgagtagctgggactacaggtgcccgccactatgcccagctaattttttgtgtttttagttgagacggtgttttgccatgttggacaggctggtcttgcactcctgacctcgtgattcacccaccttggcctcccgaagtgctgggattacaggcgtgagccaccgcagcgagccttatctttttaacagttaaaagtttaaggccttatcatgtaataacattgctggatttgatttgctgctgttttgttgagaatatttgcatctgtattgataagggatattggtctgtagttttcttttcttggcatgtctttgtatagctttgatgccagcataatattggcctcatagaatgagttaggaagtattctttatattatgggaagaggtaaaaagggattggtgttaattcttcttcaaatgtttgatagaattcaacagtgaagtgatatatacaatcatatatagagagagagagagagagagagagatggacttttcttttgttggaagtttattgactattgattcaatttccttattgaaattgacttttctttttggaagctaaaacgtataactgtagtgaaagtttctgaacttttctttcattggaagttttttgactactgattctttatttgttataggtctattcagattttctgtttcttcttgagtcagtttggtctcgctctgtcgcccaggctggagtgcagtggtgccatcttggctcactgcaacttctacctcccgagttcaagtgattctcccacctcagcctccccagtatctcggactacaggcgcacgccagcatacctggctaatttttgtatttttagtaggaacagcatttcaccatgttggccaggctggtctcgaactcctgacctcaggtgatccacccgcctcggcctcacaaagtgctgggactacagacataagccaccgcgtccagccttgagtcagtttagatagtttgcatgcatgtttctaggaatttgtccattttgtttatgttatctaatctgttaccatacaattgttcatagtatccttttatagccctagttatttctgtaagatcagtagtaatagctccactttctctcttggttttagcaatttgagtcatctcttttcttcctctttttttttttttgagatggagtctcactgtgtcacccaggctggagtgcagtggcatgatcttggctcactgcaacccctgcctcccaggttcaagcaattctgccttagcctcctgagtagctgggattacaggtgtgagccaccacacccagctagttttgttttgtttttttgtttttgagacggagtctgtttctgtctcccaggctggagtgcagtggtgcaatctcactcattgcaacctccgactcccagattccagcaattctcctgcctcagcctcctgagtagctggaactataggcgtgcaccaccacgcctggctgatttttatatttttagtagagatgggatttcaccatgttggccaggctggtcttggactccctacctgaggtgatccgcccaccttggcctcccaaagtgctgggattataggcatgagccaccatgcccagccagtttttgtatttttagtagagatggggtttctccctgtcggccaggctggtcttgaaatcctgacctcaggttatccaccagccttggcctcccaaagtgctaggattacaggcatgagccaccacgcatggcctgtcttttcttcttggtcattttcgctaaaggtttgtcaattttgttgatcttttttgttgctgatctctattgttttcccattctgtttcatttatttccattttaacctttgtttccttttttctgctggtttgggtttaatttgctctttttttcccctaatttttcaaggtatacagttaagttattgatttgagatctcttttttcttttctttttttttttttttttttttttttggttgctgttgagatggagtctccctctgtcacccagactggagtgcagtggcatgatctcagctcactgcagcctccgccgcccaggcgattctcctgcctcagcctcctgagtagacgtttcccggccaaggtgtttctttttgaatgtaagcatttacagctacagatttccctctaaacactgctttcactgcattccataagattgttttttgttgttgttttgttgtttgagacacagtctcactctgttgccgtttggagagcagcgatgcgatcatagctctgtagccttgagctcctggactcaatcagtcctcctgcctcagcctcccaagtagctgggactacaggtgtacaccactgcacctaactaatttcttttataagtttttgcagaggccaggcacagtggctcacacctgtaatcccagcactttgggaggccaaggtgggtggatcacctaaggtcaggagttcgagaccagcctggccgacagggagaaaccccatctctactaaaaatacaaaaattagctgggcgtggtggcaggtgcctgtaatcccagctactcaggaggctgaggcaggagaatcgcttgaacctgggaggcagaggttgcagtgagccaggatcacaccattgcactccagcctgggtaacaaaagcaaaactccatctcaagaaaagaaaaaaaaaagtttttgcagagacagggtatcactttgttgcccaggctggtctcaaactcctgacttgaaggagtcctactgcctcggcctcccaaagtgctgagattatgggcaagagccaccgcaccctgccacttggctgttttgttctgttgtatttccattttcattgatctcaagacatcctaatctcccttttgtttttttgttcgacttactcgttattcaagagtgtctttatttctgcatatttgtaaattttccaaaaaagtttttctttctttcttttttttttgagaaagggtcttgctctgtcgcccaggctggagaatggtggtgcacaatcttgcctcactgcaacctctgcctcccgggttcaagtgatcctcccacctcagccttcccagtagctgggattacaggcacacaccaccacacctggctaatttttgtattttagtcttaacgtgctggtcagactggtctcgaattcctgacctcaggtgatctgcccgccttggcctcccaaagcactgggattacaggcgtgaaacaccatgcccagcccccaattttttttttttaatagagagaaggtctcactcaagcccaggctggtcttgaactcctgagctcaagctgtcatccctcctcggcctcccaaggtgctgagattacaggtgtgagtcacagtacctggccttctttcaagactttaaaaatgccatcttggctgggcacggtggctcacgcctgtaatcccagcactttgggaggccgaggtgggcagatcacgaggtcaggagatcaagaccaccctggctaacatggtgaaaccctgtctctactaaaaatacaaaaaattaaccaggtgtggtggcaggtgcctgtagtcccagctactcgggaagctgaagcaggagaatggcgtgaacccgggaggtggagcttgcagtgagctgagatcacaccactgtactccagcctgggcaacagtgcgagactccatctcaaaaaaaaaaaaaaatgtcatctcactgccttctggtccaatagtttctgatgagaaattggctgttaatcttattgaggaacatttatatattgactagtcacttgtctcttgctgttttaggagattctctatctttgggtttcagcagtttgattataatgtatcagtgtggatccctcaatttataagctacttggagttcattggacttcttggatgtgtaaattcatgtctttcattaaatttgcaaagtttcagctactattctttgcatcttgaaatactagttttgtttctttctgtctgtttgccgcttatggaactttatgcatacattgatgtgcttcatggtgtagcacaggtcccttgggctctaggcatttttctttgttctttttttctttctgctcctcattttggataaattcagctgacctgtcctcaagttcactgtttctttcttcttccttctcaaatctgctgttgaaacttctggtgaaattttcactacagttactgtactttttagctccaaagtttctatttggtttctttctgtagtaattatcactttactagtattctctatttggttagacatggttcttttgttttcctttagttcattatccatggtttcctttatttttaaatttctttttatttagttattaattttttttttttttgaagcggggtttcactcttgtcacccaggctggcaggcaatgtcacaatcttggctcactacaacctccgcctcctgggttcaagtgattctcctgcctcagcctcccaagtagctgggattataggcatgtgccaccacacccacctaatttttggtatttttagtagaaactgggtttcaccacattggccagactggtcttaaactactaacctcaggtgatctgtccgcctcagcctcccaaaatgctgggattacagatgtgagccactgtgcccagcctctttttttagtgtatttaaggtaattgattgaaagtttttgtctagtcattcaaatgtctaggcttcctcaggaacagtttctattaatttctttatttttaaaaaattttttttaattttcttttttttttagatggagtctcactctatagcctaggctggagtgcaatggcttgatcttggctcactgcaacctctgcctcctgggttcaagcgattctcctgcttcagcctcctgagtagctgggactataggtgcgtgccaccactcctggctaattttttgtattttcagtagagacatggttttgccgtgttagccaggatggtctcgatctcgtgacctcatgatcctcctgcctcggcctcccaaagtgctggaattacaggtgtgagccaccgcgcccagcctattttttattttttgagacaaagtctccctctctcacccaggctgtagtgcagtggcacaaccctggcacactgcagccttaaccgtccaggcttaagtgagtctcccaccttagtctcctgagtagctagaactacaagcatgtgccaccatgcctggctggttgtgttgttactgttttagacacagggtcttgctacatttctctgactggtcttgaactcctgggctcaagcagtcatcccaccttggcctcccaaggtgttgagattacaggtgtgagccaccgcacccggcctgttaatttctttatttccggtgaatgggccacactttcttgtttctttgcatgccttgtaattttttgttgaaacctgcacaatttgaagatgataatgtggttactttgaaaatcagatcctccgccctctgcagggttcattgttgctgtttgttgtggattgtcgtttctcgtttgtttagttactttcctgacctttttaaataaagattatattctgtcaggggtgcttgtttctgttcttttaggttagtggttagcttgtgctttgaaagagatttctttaaatatctagtggcaaaaaggataaagaggccgggcgcagtggctcacgcctgtaatgctaggactttgggaagtggaggcgggtggatcacttgaggtcaggagtttaagatcagcctggccagtatggtgaaaccctgtctctactaaaaatacaaaaattaaccgggcatggtggcacctgcctgtagtcccagctactgggaagactgaggcaggagaatcgcttcaacccagggggcggaggttgcagtgagctgagattgcgccattgcactccagcctgggcaacagagcgagactctgtctcaaataaaaaaaaaaaaaaaaaggataaagagtgtcttccatcctttccaggttgcctctgtactggggcaagtccttcagtgtccgccaggctgttcacggcttttcctcagcctttacttcttgctcccatggagcctaaggatgaaccagaggtgaaagttgagggcctcctcaggtgtttctgagcccctgtctagccccagctgtgtgcatggccttctggatttccaagcatgaacaggagctttccaaagcccttagaccttcatgtagctcttttcccagcctcttccttcctaggcttttctgtcagctctttgcccatctgttgttgtccctcccccacaacttcaggtagtatctacctgtaaatgccttcaggccaggcgcggtggctcatacctgttatcccagcactttgggaggccgaggcgggtgaattgcttgaggtcaggagttcgagaccagcctggccaacatggtgaagccccgtctctagtaaaaatacaaaaattagctgggcgtggtgggtgcctgtaatctcagctactcgggaggctgaagcaggagaattgcttgagcctgggaggcggaggttgcagtgagctgagatcgtgccattgcactccagcctgggcgacagagtgagactccatctcggggaaaaaaaaaaaaaaaaaatgccatcaacagcacgaccctggaggctgccccagccctgagagagttcgagggggtgaaacaaaggcaagcccttcagggagacactagaaagatccaaatgcataagcaggattccttgagaaaaggtctgtatcatcccttctgacaccagcaagccacatcagaaatacaggttgccttccccatggctacatgtgagctggtagtagtggctgagcagaaatagcccagctgtcctcctgaaatttagcagggtcttacttcattgagcagtcatctggttcgtagacaccagagttacagaaaagtttattgggaggttttgacagtttaatagaaaaaagtttattgtgacagttttgacagctgaatagaaaaaagtttattgtgacagttttgacagcagaatagttgctttgctggagagacggatctttggagctgccaactccatcattttggtgatatccagctctgttgctgaatttttagctatgctgttttaagttattttcttagtggttgctctagagatgacaatgtacatctttaacttaccacaatgtacttcagattattactaacttaacacttaaagtacagcatttttttttttatggagtttcactctgtcacccaggctggagtgcaatggtgtgatctcggctcactgcaacctccgcctcccaggttcacgccattctcctgcctcagcctcctgagtagctgggactacaggcacccccaccacacccggctaattttgtatttttagtagagatgaggtttcaccatgttggtcaggctggtctcgaactgctgacctcaggtgatccgcccatcttggcctcccaaagtgctgggattacaggtgtgagcgactgcactgagcctaagtatggcaacgtgtctataacatagatctacttccgttgtactatgacatagttccccctccattttcctatagcacagtcccaacctcccttttcctctgacatagttccatcctccctcctcctatgacgtcctcccttctcctctggcatagctccatcctcccttctcctatgacacagctccatcctcccttctcctctgacatagctccatcctcccttctcctatgacacagctccatcctcccttctcctctgacatagctccatcctcccttctcctgtgtcatagctccatcctcccttctcctctgacacagctccatcctcccttctcctctggcatagctccatcctcccttctcctatgacacagctccatcctcccttctcctatgacacagctccatcctcccttctcctatgacacagctccatcctcccttctcctatgacacagctccatcctcccttctcctatgacacagctccatcctcccttctcctctggcatagctccatcctcccttctcctctgacatagctccatcctcccttctcctctgacatagctccatcctcccttctcctctgacatagctccatcctcccttctcctctgacatagctccatcctcccttctcctctgacatagctccatcctcccttctcctctgacatagttccatcctcccttgtcctctgacatagctccatcctcccttctcctctgacatagctccatcccctcttctccttcatgtattattgccatatatacatttatgtatgttataacttcagctcttcagcgttataattattgcttcaaaagtattttgaaagaagttgcctggaggcagtggcttatgcctttaactccagcacttttgggggctgaggtgggcagatcgcctgagccagggagttggagaccagcctgggcaacatgacgaaacccatctccaccaaaattacaaaaaattagtctggcatggtggcacgcgcctgtagtcccagctatttgggggaggatcccagctaaggtgggaggatcacttgagcctgggaagtcaaggctgcagtgagctgagattgtgccactgcactccagcctgggtgcagatcttatctcagaagtaaagggactaggaatggtggcttttatctctaatcccagcactttgggaggctgaggtgagtggatcaccggaggtcaggagtttaagaccagcctggccaacatggtgaaaccccgtctctactaaaaatacaaaaagtagccgggtgtggtggtgggtgtctgtaatcccagctactcgggaggctgaggcaagagaatcgcttgaacctgggaagcggaggttgcagtgagcaagatcgcaccactgcattacagcctagatgacagagcgagactctgcctaaaaaaaaaaaaaaaaagaaaagaaaagaaattaagatctggacactgtggttcatgcctgtaatcccaaagccttgggaggccaaggcaggaggatcacttgaggccaggagttcaacaccagcctgggcaacatagcgagactccatctctatttaaaaaagaaagaaattcaaagagaaaaaaagtatacttgtttttttgtatcatccatattttacctttcttttttttgcccctttttctttcctgtgaatttgagttactgtctagtgtcatttccttttagtctgaagaacttcatttagaattttttttttttttttttgagacaaagtctcactgtgttgcccaggctggagtgcaatggtgcagtctcagatcactgcaacctctgcctccctggttagagtgattttcctgcctcagcctcccaagtagctgagactgcaggcacctgccaccacccccagccaatttttttggtatttttagtagagacagggtttcactatgttggccaggctggtctcgaattcatgacctcatgatctgcctgtcctggcctcccaaaatgctgggattaccatgagccaccacgcccagcccatttagaatttctttttttttttttttttgagatggggtctcgctcttgtttcccaggctggagtgcagtggcacgatctcggctcactgcgagctccgcctcccgggttcacgccattctcctgcctcagcctcccgagtagctgggattacaggcgcctgccaccacgcccacctaattttttgtatttttaggagagatggggtttcaccgtgttagccaggatggtcttgatctcctgacctcgtgatccgcccgccttggcctcccaaagtgctgggattacaggcgtgagccaccgcgcccggctagaatttcttgtaggacaggcttgctagcaaccaattcagtgtttatttgggaatgtctttatttcagcttcattttttgaaggatagtttagctggctatagaattattaattgatcattcttttcagtgtttaaaagtgtcatcatgctaccttctgggttccattgtttctgatgagaagtcatctgtcaaattgtccctttgtacttgaagaattatctttttttctcttgatgttttcaagattttctctttgtctttggcctttagtagtttgtgatgtatctaggtgtggatctcttggtgtgcatcgtatttgggcttcagtaagcctcttagattcatagattaatgttttgttttgttttaccaaatttggagagtttttactcatcatttcaacaaatttttttcctgcccctctctcatctccttttgggagtaccactgcatgtatgttggtgtgcgttctctaaagctttttttttttttttccaaccttttttctccttattcctcaaactggattatttatttatttatttatttattttttaattttttgagacggagttttgcttttgttgctgaggctggagtgcagtggcgcgatttcggctcactgcaacctccaccaccttcgaggttcaagcaattctcctgcctcagcctcctgagtagttgggactaccggagtgtgccaccaccatgcccagctaatttttgtatttatagtagagacgaggtttcaccatgttggcaaggctggtgttgaactccggacctcaggtgaaccacctgcctcagcctcccaaagtactaggattacagtcgtgagccactgcacccggccaggataatttttaatgaatttttttcttctgccatctcaaatctgccgttgagtacatctaattaattttttttttttgagtcggagtctcactgtgtcgcccaggctggagtgcaatggcgcgatcttggctcactgcaacctccacctctcaggttcaagtgattctcctgcctcaccctcccaagtagctgagatgataggcgcccgccaccacgcccagctaatttttttgtatttttagtagagacagggtttcaccatgttggccaggctggtcttaaacccctgacctcaggtgatccgcccgcctaggcctctcaaagtgctgggattacaggcatgagcccggccttgaatttttttttaataggctttttgtttgtttgtttgtttgtttttgagatggagtcttgctctgtcgcccaggctgaagtgcaatggtgcaatctcggctcactgcaacctccgcctcccaggctcaagcgattcttatgcctcagcctccccagtagctgggactgcaggcaccctccaccacacctggctaaataatttttgtagttttagtagagacaggatttcaccatgttggccaggctggtcttgaactcctgacttcaggtgatctgcccacctcggcctcccaaagtccagggattacaggcatgagccactgctcctgaccatggctttagtttttagagtagttttaggttcacaacaaaattgggtggaggatacagagatttcacatatactccagacccccacacatgcaacagcccctccccacaacaccatcatgctccctcaccagactggtacgtttattacaatccataaacctacacagacccatcattgtcacccaaggtccatagtttacattagggctaactcttggtggtgtacattctatggactttgacacatgtataatgacaggcatctactattgtggtatcagacagagaagcttcacaacctcattctctgtactttacctgttcatcctgccctccccactacattcactaaaaatgtcctttcagtgattgtcctttttaactctggaatttccatttgatttttttttttctttttttctttttttttttagacagagtctgcctctgttgcccaggctggagtgcagtggtgccatctcggctcactgcaaccctctgccttctgggttcaagcagttctcctgttttagcctcccaagtagcagggagtacaggctcatgacaccacgcctggctaatttttgtatttttagtagagacggggtttctcaatattggtcaggctggttttgaacgtttgacctcaggtgaggcacatggtgaaaccccatctctactaaaaatataaaagttagctgggcgtagtagctcacacctgtagtcccagctactccagagactgaggcctgagaattgcttgaacttgggaggtggaggtgcattgagctgagatcatgccactgcactccagcctgggtgagagagtgggactcggtctcaaaaaaaaaaaaaaaaaaaaaggattctctatttcctgaatcattgccatcatattttcatttaattatttgaacatacttatagtagctgctttgaagtctttgctaaactcaacatctgggcccactcagagtcagattatatcaactgctttttttcctaaatatggatcatggtttcctgtttacctgtcttataattttttttgttgaatactggacatttcagatgatctatgtctggattctgagttgttttcctgagtcttgtgttctgtttgttttagttaagttgtttggacttaaactgcaaaacttgcccacccacccctgcagcctctgatatctctgctcagatttttaaattcttttttttttttttttgagatggagtcttgctgtattgcctaggctggagtgccagtggtgccatctcagctcactgcaacctccacctcctgagttcaagcaattctcctgcctcagcctcccaagtagctgggattacagatgtgtgccaccatgcctggctaattttttgtttttttagtggagatgaggtttaaccgtgttagccaggatggtctcgatctcctgaccttgtgatccgcccacctcggcctctcaaagtgctcggattacaggtgtgagccaccacgcacggccttaaattctattttttagtctggcttcctagcagttgcttctgtgtttgcatatggtagtggtcagccagggatttgggcaagagggtgtgctcaaacactcctaacccaaaaggctccccaccacaccatgtggtttcagagcacgttgtgagttcagccagcccctctctctttgctttcacttcaccctggcctctcttggagctcccaacacctgcagtggtttcctcaagagccaggcccttcctgggagagctgagcccttctgtggctctcattttcagagtcttcctgttaagtatctggctggcccagtgctcactccagctgggatcacagccccaaatgatcagggctgtcagttttctttgtaagtgtttatcgagtcaccacttttaactacgaggcctgggttttcccttctgtcccacatccacctctgctgctgctggtttttgcagccagccttgacctggtaaatcactcagatttgctgactcaggagtaggagccaggggcagccccaggtgcaaaggctgtagacttcccagtattctggcccaaggcccaacatttttcaagaagaatctcttctcagtgagttctcagctttggtcagtttccagaactctgaaaagttctaaatcagtgagttttgataattttgtctagttttagattattttttctttttttctttttttttttttttgagatggagtctcacttcgtcacccaggctgaagtgcagtggtgcgatcttggctcactgcaacctctgccttttgggttcaagcgattctcctgcctcggcctcccgagtagcataattataggcgcacgccatcacaccggctcatttttaaatttttggtagaggtggggtttcaccacgttggccaggctggtctcaaactcctgacctcaagtgatccgcctacctcagcctcccaaagtgctgggattacaggcgtgagccaccgctcccggcccatattcgattcaacgacctctctacttgagtgtggctggaactcagaagcttcttttagttttagatgttgtttgttttcagggttaagtctttactaattctggaatgtatttctgtcaatgctgtgaggtaggtgattgggttgggatcttttatgtatgaaaacccagtttttaattttctcttgtgaaatccatcgtctttctccttgcaccccatctgtgatgcttcctctgccacacgaggctttctgtgtgagggggggctcttcctggaggctctcttttgctccattgatcgatttgcctgttctcttggttttcagttaacttcatggatatgccattaacttctctccatggttagaaatttaggttatttccaagtttttcatatttggttaatatctttgtggccaaatctttacatacattctccttaaaaatcatgtcactgaggcggaaggattacatgagcccaggagttcaagaccagcctggccaacatgacaagaccttggctcaacaaaaagattcaaaaattagctggcatggtggcacactcccatagtcccagccacttgggaggctgaggcaagaggattgcttgagcccaggaggtcaaggttgcagtgagctgtgatcctaccatgcacttcagcctgggcaagagagcaagactctactgcgcacacacacacacacacacacacacacaaaataatagaagcactttctgggttaaagagtttacaaatttcaaggcttttaatattgtcaaatattctagaagaggttttactaatgatggtgtgggtgtgctgaaggggcgtatttaatcgaattcactctgggtttaaccctctctttttgaacatgttctcagtctcctttcagccagtctctgctgcagtgcatttgaggcacagtcctgtagcccctggcgcccccggtcattggcagggccctgtgtgcctaagaacagtaggcactagaaggaaccgcccaaaatcctggcctggggaggtgtacgaggccacctttgtctacgcatgagacaaaatccctgttccacctcactctgctccacccacccgttcctactggaaagacagccttggctccatgtcacgggctgaaggcctgtcctcagttgctccttttttgtttttttgagacagtctcactctgtcttccaggctggagtgcagtgacacaatctctgctcactgcaacctccgcctcccgggttcaagcgattcttgtgcctcagcctcccgagtaggtgggactataggcacgcgccaccacacccggctaatttttgtatttttagtagagacgggtttctccatgttggccaagctagtctcgaactcctgacctcgtgatccacccgtctcggcctcccaaagtgctgggattacaggcgtgagccgctgcacctggcccctcagttgcttttgtggggttgaaagaacttcctttttgaaacgatggcatggcagcagtggatggcggttggtttttcatgtctttatttggcaaagttgaagattgcagttctgtctgtccccacatttcctcttcattctctctctctctctctctctctctctctctctctctctctctctctctgtgtgtgtgtgtgtgtgtgtctcggttttggttttaattttactggttcactgatgcctaaaagtcaaggcatcactatttcataagcaggttctcctagtttgggggaggactcagtcatgcacatacacacccccagcacatctgccttgatgcactggtgctgtggcctgtgcagtagtgaggctgtgggagctgctgtcagaaggctgctgccacactgtgactccagcagaggcgatgggacacacggggcatattctggagcagccaagtccatcccgagagagaatgcgggtgtctgtgtgtgtgatgtgtgtgagactgtgtgtgtgtgtgcatgtgcatacatgtgtaaagtgtacagttggcccttgtgtgtgtgagattgtgtatgtgcatacgtgtgtaaagtgtacagttggcccttggtgtgtgtgtatgtgtgcatgtgcatacgtgtgtaaagtgtacagttggtccttggtgtgtatgtgtgcatgtgcatacgtgtgtaaagtgtacaattggcccttggtgtgtgtgtgattgtgtgcatacgtgtgtaaagtgtacagttggcccttggtgtgtgtatgtgtgcatgtgcatacatgtgtaaagtgtacagttggcccttggtgtgtgtgtgattgtgcatatgtgtgtaaagtgtacagttggccctgtgtgtgattgtgtgtgcatatgtgtgtaaagtacagttggccctttgtgtgtgtgagattgtgtgtgcatacgtgtgtaaagtgtacagttggcccttggtatctgcaggttccatatccatcatttcaaccaatctcgagttgaaaataattggggaagaaaaggatggctgcgtctgtacactgtataacaactatttacatagcatttacatcgtattaggtactgcaagtaatctagggatgatttaaagtacgtgggaagatgtgcgtaggttatatgcaaacactatgtcattatatataagggacttgagcatccttggattttggtttgcacagggggtttcccatggataccaagagactacgtgtgtatgcaagtgtgagtgtgtatatgcatgtgtgtatatgcatgccatgtgtgtgcatgtatgtgtatatgcatatatgagtgagtgcacgtgacagtctacacgtgagggtgcatgtgtgtgcgcgtgtgggtgactgcatatgtgtgtgcatgtgtgggtgcgggtgcatctgtgtgtgcatgtttgggtgcgggtgcatgtgtgcgtgcacgtgtgtgtggatgagaggtcgcatgtgtgtgggtgagggcgtgtgtgtgtgcatgtgtgtgggtgagggggcatgtgtgtgcacgtgtgtgggtgaggtgtgtgtgtgcatgtgtcagggtgtgtgtgcgcgcatgtgtgtgggtgagggcctgtgtgtgcgtgtgtgtgggtgagagatgtgtgcgcatgtgtgtaggtaagggtgcttgtgtgcgcatgtgtgtgggtgagggcgtatgtgtgtgggtgagggcacgtgtgcgcgcgtgtgggtgagatggcgtgtgcgtatatccatgtatgactgcatctgtatttgcatgagttcatgtgtgagtgcatgtttatacgcgtgtcagggtctctgtgtatgtgtatgacgtgtgagtacatgtgttaatgtgtgtgtacatgtgtatatgcctgtgtgcatgtgtgtatgcatgtgtatacatgtgtacttgtgtatgtgtatatgtgtatgtctgtatatgtgtgtgtatgcctgtgtacgtatgtatatgcgtgtgtgtatgcatgtgagtgcatgtttatgcgtgtgtatgtgtacttgtgtgtgcctgtgtgagtgcatgtgtgtgtacatgtgtatatgcgcgtgtgcgtatgcgtgtatgtgtacgtgtgtatatgcatgtgtgtgtatatgcctgcatgtatatgcacaagtgtgtatatatgtgtatgtgtgagtgtatgtgtgcatgtgtatctgtatgtgcgtgtgtatatgtgcatgtgtgtatgtgtgcgtgagtgtgtgcatgtgtgtgtgtatgtgtgcgtgtgtatgtgtgtgcgtgagtgtgtgagagtgtgtatgtatacgcacgcgtgtgtgtctgtctccctcaggacagtgcccaggcggatgggtcagtgctcctgggttggtttgcccctggtggcccatgtctgagccctgccccttacggctctgtctgcaggttctcccatgggcaggtggtctctctggatgagctgcgccccttccaggacccagacctgagctccctgcaggccggctctgcgtgtctggccaagcaccaggatggcctctggcacgcagcacgcatcaccggtgaggctggccgtgggggcctcccgggaacaccctcccaggccccacgtgtgttgtcactgtgtggctgctccctgcttcctttgggttgagtgtcgggactctggctctgggcccgaaatgagcacacctaccctcagcctctgccctgccttgctcctcatgtccagggtggttcccttcagtggcacctgctgtcaaggattctgacctgcagcttgtctctgcccccagatgtggacaacggctactacacagtcaagtttgactcgctgctgctgagggaggccgtggtggagggggacggcatcctgcccccactgcgcacagaggccacagagtccgactcagacagcgacggtacgggtgactccagctatgccagaggtatggcagcagctgcggagcccaggagccaggaaggtggggtcaccctgagaggctcctggccggtgagggcaccaaccatctaaccaaactattggagagtgtgtgactgcggcgagggtgccacctgtgcctgaggaggccgtgtgggtaggggtagatccgtggcggcctttatcttcaaggagtgtgggtgcaacagctacagtctcattgatgggaggccatggtcgtggctgtggccatgggagaggaggggcctggagttgccgaggaagtcacagaaaatgaccaactgatggggcctggagtgcaggaggggcagctcctctgcatggcttctcagacttgggacctgggtgcctgggatcctggcagacagaggttgtgtccagacagccagcatggaagtttcgggaatgggaactggtgggcagtgtccagctctccagaggggtgtgtgtatgcgtgtgcgtgtgtgtgtatatatgtgggaggtcacctgacccaagcatggcgggctgagtccaggaggggtctgcatgttggaggtgtacccagggatcagtgatggtggtttctgaagccccatgtccctggtgaaggaggactgaaccaaggactctgtgagggcaggtgaggcgctcacagcctcgcgaaggtggagaagggcaggggcaggagagggctgcggaggaggggccacggtgcagcaggccgtggggactgccatgcactctgcctggtgtcacatgcccacagcagcctcggtgacgagagcacggagcccaagaggtggggtgtcgtggctctgcccaggatctgagctcattggtcaaagcccgggtcaccatgcacaatcctctggcctggctgggccactgccctctgtccatctcttgcagtggtggggtcggacgccgtggactctgcacagtcctctgccctctgtccgtctcttgcagtggtggggtcagatgctgtggactctgggacctgcagctctgcctttgctggctgggaggtgcacacgcgaggtataggctccagactcctcaccaagatgggctatgagtttggcaagggtgagtacaagctgccctggagaagtgggcaggctgctgcagcatagcccaggtccagcagccatcaggttcccggggtcccgcagccatcgggttcccagggtcccgcagccacagcactgccatccccgtgctcctcagattcccggggtcccgcggccacagcactgccatccccgtgctcctcagattcccagggtcctacggccacagcactgccatctccgtgctcctcagattcccggggtcccgtggccacagcactgccatccccgtgctcctcagattcccggggtcccgcagccacagcactgccatccccgtgcctccgcaggtttgggccgacacgcggaaggccgggtggagcccatccatgctgtggtgttgcctcgagggaagtcgctggaccagtgtgtggagaccctgcagaagcagaccagggttggcaaggctggcaccaacaagccccccaggtgccggggaagaggggccaggcctgggggccgcccagctcctcggaatgtgtttgacttcctcaatgaaaagctgcaaggtcaggctcctggggccctagaagccggggcggccccagcggggaggaggagcaaggacatgtaccatgccagcaagagtgccaagcgggccctgagcctgcggctcttccagactgaggagaagatcgagcgaacccagcgggacatcaggagcatccaggaggctctcgcccgcaacgctggccggtacgtgtggggcccagctcagggcaaagggcgacccagggtggccctgcccccgggatacatgctggaggtcacctgacccaagcatagcgggctgagtccaggaggggtctgcatgttggaggacgggcagcgggcacacaggcagtgggtacggcagactggggttggtggcatggcccaggaccccacgctgactagtgagcccctccgcaggcatagcgtggcgtcagcccagctgcaggagaagctggcaggagcccagcgccagctggggcagctccgggctcaggaagccggcctgcagcaggagcagaggaaggcagacacccacaagaagatgactgagttctagagaccccacaagcactatggacgaagcgtgggaccccagcacgggctgccctcaggaagaccagtgttgcccgaggaggggccggcctgctggcctggggcgtgcagacactgctgagtggagacagagctgcggggtcccatctggacacttacttgcccacctgccagtgtcttgggcatttccttggcaaggacattaaagtgatttcatcacagtgtca

SEQ ID NO: 9868 - DNA, 7109 bp, Homo sapiens
cgcgtcctgagagtcagccctcgccgctgcagcctcggcgcccggccggccggccatggagcgccccccgccccgcgccgccggccgggaccccagtgcgctgcgggccgaggcgccgtggctgcgcgcggagggtccggggccgcgcgccgcgcccgtgacggtgcccacgccgccgcaggtaccgggcgccggtgggcgggggcgccgaccaagtttctctcgctgcaaagatggcgtcagtgctgcccaaacttcgggcccccgggggcggggcagcggggagggcggccgcgtcggtccgcgcgtgtccgtgggtcccgccggggctgcgccgggcggccggggagcccttcccgccgcgccgggctgggggcggggccgggggcggggccgcgccgtccacaccggccgcagccggttttcgaggcgggcgccgagcggatccgcggcggaggttgagggacccccctcccccggccaccgcctccgctgagtctgccccctccccatccgcagggctcttccgtgggcggcggcttcgcgggcttggagttcgcgcggccgcaggagtcggagccgcgggcctcggacctgggggccccccggacgtggacgggggcggcggcggggccccggactccgtcggcgcacatccccgtcccagcgcagaggtgagcgggaggcccggtgcctcgggactcggtgtgcgcaggggcggtgggtggggtgcggagacaccggccccgacggaggccaggtcagggccccaggtttgtaattaccagccacccccaagctcttcagccctggaggagctgagcagaaatgatcgatgactgggagtccctacacctccctccaccgcagttcctcggggctagagctcagaacccggagcgggtggctgtgcgtctctgtgcagaagaggctgcgcggtcggcatggggcgactgtccaggaatccctggggctcctgaccgccacctcccaacccctgccaggccggacacctcggtctggctgccagggcaggggcgggccctggcctggctcgctggggcctggggagctgcccgtgcttccagcccagtctccccctggctgctgccggctgctggccactcccacctcccaggcctggcgtgaggcccacagctgctgttgcacaaccctggttaatgtgtgatggggggaggcctgggcctggcccgcccctctgccagggcttcagacccctgcccagccccagtatctgaaggaaccacagtggagccaagcccgcgatgtggagaactcaggcttcaggagaccctggccctgctcctggcggctccgggtggctttcagctctctctgcaacctgagctgggggaggagccaggcctcatgcccagggctgggagtggggagcctggtgtgcacgcgtgcccaggcctgcacgtggaccgaccaggggaggggcccagagctctggctgggtcacccgcaccccgcccccatctcctccagagccaccccaggaaaagcccggctggacgaggtcatggctgccgctgcccttacaagcctgtccaccagccctctccttctgggggccccggttgcagccttcagcccaggtaagactcagatgtctgcatttaggggtgtgggtggggacagggctcagaacctacagccacccagcctctgtggggcaagcagagccctcaaacctgggactcctttctaaaatggactcccgcaccctcagtgccccctactgaggccaaagcggcaggacccaggccttctggcctccctgacctgctcacctccacgcggctggccacacacgtctgccaaccctttcctgtgccgggggggtttctccccaagccctggggccagctcctccaagacgctctgcccaccagtctcaccggacttggtgaacaggggcagctcaggattagggactccctggacccacccgaagttctaaggcggggggcccgtgtccccacagagcctggcctggagccctggaaggaggccctggtgcggcccccaggcagctacagcagcagcagcaacagtggagactggggatgggacctggccagtgaccagtcctctccgtccaccccgtcacccccactgccccccgaggcagcccactttctgtttggggagcccaccctgagaaaaaggaaggtgagcttgggggcggcccccagggaggggcgggtgtggcggctgagcctgaccctggcccctgttgctgcagagcccggcccaggtcatgttccagtgtctgtggaagagctgcgggaaggtgctgagcacggcgtcggcgatgcagagacacatccgcctggtgcacctggggtgcggcggggcctggggtgcggcggggcctgcgggttggctggggttgtgaggcccggccaggccaccccttcagctcccactggctggctgtgtctcccgcaggaggcaggcagagcctgagcagagtgatggtgaggaggacttctactacacagagctggatgttggtgtggacacgctgaccgacgggctgtccagcctgactccagtgtcccccacggcctccatgccgcctgccttcccccgcctggagctgccagagctgctggagcccccagccctgcctagtcccctgcggccgcctgccccgcccctgcccccgccccctgtcctgagcaccgttgctaacccccagtcctgtcacagtgaccgtgtctaccaggtgggtgaggccacgggtggcagctggggcgggtctcagggctctctggaggggagtgaagccctggctgtgtctccctgtagggctgcctgacgcccgcccgcctggagccgcagcccacggaggtcggagcctgcccacccgccttgtcctccaggatcggagtcaccctgaggtgcgtgtgggctgagggcctgcggctggcaccaggtggggagggtcctggtctcacagcaccccatgtcctgtgaccccccgcacaggaagccccgcggcgacgcgaagaagtgccggaaggtgtatggcatggagcgccgggacctctggtgcacagcctgccgctggaagaaagcctgccagcggttcctggactaagtccggctcgttcaagaacataagctaccaccttctccctccccaccccctccaggcccggggctgaaacagcccgaggacagccccaggggctggctttcaccagctgcagggtctgcttttacttggggtgggggggcggggctgaccctgaaccctcccccccgccaggtcggggaggggtcccaccactcaaagtgcctctaaagaaaccagctttttgcactaaagccaaaccacaccgctgtccccttagccccaagggccctgggggcagccaccctcccgcctgtcggcccgtagatttatcaagggtgttatgggcccagctttggggggccagtcccgatgcactttgaggggtgttggagaggggactcccccactcgcacttaactcaacggctctcgggccctggggctgtttttaccatgtttgtttttgaagctcaggtgtctcacgtctgggctgcaccaggcgaagagagaaattaaagatttgaggtttttccagaagctttgtctgcctctcgggaggaaggccgtggggctgggaccctgtggtgggcaagtgggtggagtctggcagctgcccacagagggccgagggtcacccgtcggccgccgccaccccaggcgaggccggaggaaggatcatctgagacgcaggaggcatctgctggagcagcaatttcccaatttattgaaagtgatcgctttgcaaggatgtctaagctaatcccgtcacagaaaggaaacgcacaggcgcctaggcagaaacttggagactcaccgcagaggccacgtgaacccacggccacagagaggcaggacggcagagccatgatttcccaccgagcgattacgagaacctcttcccccaatagtagacacatctccaatacaaacacaggtttataataagtaataggaagtcaatataatatagattatccccagaaaaaaatcaacaatcttcaaacactgccctttttttgtgtgttttgtttttgttgacaggttgaaagcatgttgaaaaaaataaatatttaagaaaagcacacacagcaccctcactacaagtagttctaaaagggctgcatacaaaacacaatataagatctaaaaaaaaccaccaccattaagtatggctttcttaagagtcgcacatgtcacagaatgagctaaaataagattacttcttttataatattgcaaaaagttccagtttttgcattttctcagttttttaaagaggaagatgtgcaaagttggaagcagtaagctgcgtcttctgagtcagttccctacgtagccctggcagtgtcctgtgtcccaaagctcagagagccccagtgtacaacctggtcaggatccagagcttgacagaaaaatcgtggtgtccctgccccctccccgcccccaaataacaccatccccaatggactgtatttcccactttggtgttgtaaacaccaaaatacaaacagacacaaacaaaaatacaaaatgtgaaatgtaatctacacatttttcctcttcataaaaaaatatttattagtttgaacatcgatttaaaaaaaaatcagtcacataaaaaaaacccttcatgacatgtcttttccctccacgcctcctgagatggacgtgctcacctgggcctcggaaatcccacactcttcagtcggcaaactgcgaacaagaacaggaaatctgccacgcagcaaacacttggggaggtcagtgggacactgttggttttagggaagaaaatgcccctgtagctccggcggggaaccccaaaacggtcagcaaaggcaggccacacggagtgagccggccagatggagcaggacatcctgagtgtggagggggaggcgggcctgggtcctgggcagggtggcctgagagcagggactggtacaaaacccagagacattggtgggtagcaaaggtctggtttccaaatgcattttgtaagaaagtcagtctgtttagaaaaagggtttaaaaatcaggggaaaggtacaaagttctgagaattctcaaagaggccggggtggggctggcctggggtgagggctggagggctccgctgcagctccctggtagccatgctctccccctgggggactcgtgccagagccacccaccttgctcggtaagagtgggcagggctcaccgctgaggggccagcgcttggcccggctcctatccccacactccgtgtgcagaaaaatcttggcctctttctccagctttgaggagcccacagcctccgagctgaggggtgtgtgtgatgacagctccagccagggcaccctgtcattggtagaaccgggggccaatgtcaaaaaacaaaagccgtgactcctgcgctgtacctggagtcctccatgtactcctccacaggacccccggccagccccagccctccccgagcagcagcggtcagggaagctggtgctctacctgacaatgtggggaaaagcctggtatacaggctagaaaaagagagtaaaaactctttccacgcagccctgaagctcagcactccggggggtcttcacacgggcaggtcctggagggaaggaggaggccaccgcgcccacctcccatctgaaggcacagcaccgcagtggtggcctgtgccagaggagggggtgaaggatggaatgtcctcatggtgagtgctgtcagaggcaggcctgaacgagaagacaggccgtggcaacggtcccgaggctgtgagtctaggcagcctgcctccgggacccccaaagccaggcggtgcaccacagcacacaccgtgggacctttgcttttcactcaggaaaagaaagaacatgtgagtgcttctgaaaacacagcaagaggacttgagcacaagctaaaggaaaaacaaccctatatagtttcttcgagtgagaaaaataatgccaaacaaaataattttatgtaactacctcgatatgtctctgactacttaaaaatttggttacccacgcggggaggtgtaagcagcacactgcagttaggaacaccgcctccagtgttagcagcaaaggcaggagcccagctccagcccgtccaggaggggtcagcaggagcggccgggctgggccatgggcagaacaggacgggcagagcccggggtggacgtggcagcccaaggctctccgaggaagtgcacacgactgagccgaggcccttgcagagggaacctggtgtggcctgaagtggtggggggcacagggctgagggtcccctcctggaaggagcccccagggctgtgtccacctaagatagcacctggagccctcggcctccagcagggtctgcagctgtgttgtgtgttaagcaccaaagcccagaggtaagacggtggcagggctctctgtgcacctggattctacaggctgccatgggccacggctgcaccacgggccacggctgcagccacaggcagtgacctggctgctaggggaggggagggcgggctccagccgggctgaccgggtgtctgtaaaactctgcacctgctcaggccaggggcctctgggccgaacacaccaccccgcccagtgcccactggacccggccacaggcccatcacgtgtccaagccaggctggccatcacaggggccactcacacacccgcaccacctgctggggacttaggaccgtgctctcccttcactcaaacccaccctgtgccctcccccaactcacttcatgtctggtcccagagcacccctcttgctggggtcgcacctgcttagcccgcagggctggtttccgtggggggtgggttcagggggaagcagaggaggggccgcgagaggggtgagcgtggccctggccccgcagtggagacccaccggacacacacacgggtggacggagcgaggcagccaccgaccctgccggcgggcgggcctaggagagccaggcgaagtccttgtcagggcctcct

SEQ ID NO: 9869 - DNA, 2538 bp, Homo sapiens
acacagtcaagtttgactcgctgctgctgagggaggccgtggtggagggggacggcatcctgcccccactgcgcacagaggccacagagtccgactcagacagcgacggtacgggtgactccagctatgccagaggtatggcagcagctgcggagcccaggagccaggaaggtggggtcaccctgagaggctcctggccggtgagggcaccaaccatctaaccaaactattggagagtgtgtgactgcggcgagggtgccacctgtgcctgaggaggccgtgtgggtaggggtagatccgtggcggcctttatcttcaaggagtgtgggtgcaacagctacagtctcattgatgggaggccatggtcgtggctgtggccatgggagaggaggggcctggagttgccgaggaagtcacagaaaatgaccaactgatggggcctggagtgcaggaggggcagctcctctgcatggcttctcagacttgggacctgggtgcctgggatcctggcagacagaggttgtgtccagacagccagcatggaagtttcgggaatgggaactggtgggcagtgtccagctctccagaggggtgtgtgtatgcgtgtgcgtgtgtgtgtatatatgtgggaggtcacctgacccaagcatggcgggctgagtccaggaggggtctgcatgttggaggtgtacccagggatcagtgatggtggtttctgaagccccatgtccctggtgaaggaggactgaaccaaggactctgtgagggcaggtgaggcgctcacagcctcgcgaaggtggagaagggcaggggcaggagagggctgcggaggaggggccacggtgcagcaggccgtggggactgccatgcactctgcctggtgtcacatgcccacagcagcctcggtgacgagagcacggagcccaagaggtggggtgtcgtggctctgcccaggatctgagctcattggtcaaagcccgggtcaccatgcacaatcctctggcctggctgggccactgccctctgtccatctcttgcagtggtggggtcggacgccgtggactctgcacagtcctctgccctctgtccgtctcttgcagtggtggggtcagatgctgtggactctgggacctgcagctctgcctttgctggctgggaggtgcacacgcgaggtataggctccagactcctcaccaagatgggctatgagtttggcaagggtgagtacaagctgccctggagaagtgggcaggctgctgcagcatagcccaggtccagcagccatcaggttcccggggtcccgcagccatcgggttcccagggtcccgcagccacagcactgccatccccgtgctcctcagattcccggggtcccgcggccacagcactgccatccccgtgctcctcagattcccagggtcctacggccacagcactgccatctccgtgctcctcagattcccggggtcccgtggccacagcactgccatccccgtgctcctcagattcccggggtcccgcagccacagcactgccatccccgtgcctccgcaggtttgggccgacacgcggaaggccgggtggagcccatccatgctgtggtgttgcctcgagggaagtcgctggaccagtgtgtggagaccctgcagaagcagaccagggttggcaaggctggcaccaacaagccccccaggtgccggggaagaggggccaggcctgggggccgcccagctcctcggaatgtgtttgacttcctcaatgaaaagctgcaaggtcaggctcctggggccctagaagccggggcggccccagcggggaggaggagcaaggacatgtaccatgccagcaagagtgccaagcgggccctgagcctgcggctcttccagactgaggagaagatcgagcgaacccagcgggacatcaggagcatccaggaggctctcgcccgcaacgctggccggtacgtgtggggcccagctcagggcaaagggcgacccagggtggccctgcccccgggatacatgctggaggtcacctgacccaagcatagcgggctgagtccaggaggggtctgcatgttggaggacgggcagcgggcacacaggcagtgggtacggcagactggggttggtggcatggcccaggaccccacgctgactagtgagcccctccgcaggcatagcgtggcgtcagcccagctgcaggagaagctggcaggagcccagcgccagctggggcagctccgggctcaggaagccggcctgcagcaggagcagaggaaggcagacacccacaagaagatgactgagttctagagaccccacaagcactatggacgaagcgtgggaccccagcacgggctgccctcaggaagaccagtgttgcccgaggaggggccggcctgctggcctggggcgtgcagacactgctgagtggagacagagctgcggggtcccatctggacacttacttgcccacctgccagtgtcttgggcatttccttggcaaggacattaaagtgatttcatcacagtgtca

SEQ ID NO: 9870 - DNA, 6643 bp, Homo sapiens
cccccttcccccggccaccgcctccgctgagtctgccccctccccatccgcagggctcttccgtgggcggcggcttcgcgggcttggagttcgcgcggccgcaggagtcggagccgcgggcctcggacctgggggccccccggacgtggacgggggcggcggcggggccccggactccgtcggcgcacatccccgtcccagcgcagaggtgagcgggaggcccggtgcctcgggactcggtgtgcgcaggggcggtgggtggggtgcggagacaccggccccgacggaggccaggtcagggccccaggtttgtaattaccagccacccccaagctcttcagccctggaggagctgagcagaaatgatcgatgactgggagtccctacacctccctccaccgcagttcctcggggctagagctcagaacccggagcgggtggctgtgcgtctctgtgcagaagaggctgcgcggtcggcatggggcgactgtccaggaatccctggggctcctgaccgccacctcccaacccctgccaggccggacacctcggtctggctgccagggcaggggcgggccctggcctggctcgctggggcctggggagctgcccgtgcttccagcccagtctccccctggctgctgccggctgctggccactcccacctcccaggcctggcgtgaggcccacagctgctgttgcacaaccctggttaatgtgtgatggggggaggcctgggcctggcccgcccctctgccagggcttcagacccctgcccagccccagtatctgaaggaaccacagtggagccaagcccgcgatgtggagaactcaggcttcaggagaccctggccctgctcctggcggctccgggtggctttcagctctctctgcaacctgagctgggggaggagccaggcctcatgcccagggctgggagtggggagcctggtgtgcacgcgtgcccaggcctgcacgtggaccgaccaggggaggggcccagagctctggctgggtcacccgcaccccgcccccatctcctccagagccaccccaggaaaagcccggctggacgaggtcatggctgccgctgcccttacaagcctgtccaccagccctctccttctgggggccccggttgcagccttcagcccaggtaagactcagatgtctgcatttaggggtgtgggtggggacagggctcagaacctacagccacccagcctctgtggggcaagcagagccctcaaacctgggactcctttctaaaatggactcccgcaccctcagtgccccctactgaggccaaagcggcaggacccaggccttctggcctccctgacctgctcacctccacgcggctggccacacacgtctgccaaccctttcctgtgccgggggggtttctccccaagccctggggccagctcctccaagacgctctgcccaccagtctcaccggacttggtgaacaggggcagctcaggattagggactccctggacccacccgaagttctaaggcggggggcccgtgtccccacagagcctggcctggagccctggaaggaggccctggtgcggcccccaggcagctacagcagcagcagcaacagtggagactggggatgggacctggccagtgaccagtcctctccgtccaccccgtcacccccactgccccccgaggcagcccactttctgtttggggagcccaccctgagaaaaaggaaggtgagcttgggggcggcccccagggaggggcgggtgtggcggctgagcctgaccctggcccctgttgctgcagagcccggcccaggtcatgttccagtgtctgtggaagagctgcgggaaggtgctgagcacggcgtcggcgatgcagagacacatccgcctggtgcacctggggtgcggcggggcctggggtgcggcggggcctgcgggttggctggggttgtgaggcccggccaggccaccccttcagctcccactggctggctgtgtctcccgcaggaggcaggcagagcctgagcagagtgatggtgaggaggacttctactacacagagctggatgttggtgtggacacgctgaccgacgggctgtccagcctgactccagtgtcccccacggcctccatgccgcctgccttcccccgcctggagctgccagagctgctggagcccccagccctgcctagtcccctgcggccgcctgccccgcccctgcccccgccccctgtcctgagcaccgttgctaacccccagtcctgtcacagtgaccgtgtctaccaggtgggtgaggccacgggtggcagctggggcgggtctcagggctctctggaggggagtgaagccctggctgtgtctccctgtagggctgcctgacgcccgcccgcctggagccgcagcccacggaggtcggagcctgcccacccgccttgtcctccaggatcggagtcaccctgaggtgcgtgtgggctgagggcctgcggctggcaccaggtggggagggtcctggtctcacagcaccccatgtcctgtgaccccccgcacaggaagccccgcggcgacgcgaagaagtgccggaaggtgtatggcatggagcgccgggacctctggtgcacagcctgccgctggaagaaagcctgccagcggttcctggactaagtccggctcgttcaagaacataagctaccaccttctccctccccaccccctccaggcccggggctgaaacagcccgaggacagccccaggggctggctttcaccagctgcagggtctgcttttacttggggtgggggggcggggctgaccctgaaccctcccccccgccaggtcggggaggggtcccaccactcaaagtgcctctaaagaaaccagctttttgcactaaagccaaaccacaccgctgtccccttagccccaagggccctgggggcagccaccctcccgcctgtcggcccgtagatttatcaagggtgttatgggcccagctttggggggccagtcccgatgcactttgaggggtgttggagaggggactcccccactcgcacttaactcaacggctctcgggccctggggctgtttttaccatgtttgtttttgaagctcaggtgtctcacgtctgggctgcaccaggcgaagagagaaattaaagatttgaggtttttccagaagctttgtctgcctctcgggaggaaggccgtggggctgggaccctgtggtgggcaagtgggtggagtctggcagctgcccacagagggccgagggtcacccgtcggccgccgccaccccaggcgaggccggaggaaggatcatctgagacgcaggaggcatctgctggagcagcaatttcccaatttattgaaagtgatcgctttgcaaggatgtctaagctaatcccgtcacagaaaggaaacgcacaggcgcctaggcagaaacttggagactcaccgcagaggccacgtgaacccacggccacagagaggcaggacggcagagccatgatttcccaccgagcgattacgagaacctcttcccccaatagtagacacatctccaatacaaacacaggtttataataagtaataggaagtcaatataatatagattatccccagaaaaaaatcaacaatcttcaaacactgccctttttttgtgtgttttgtttttgttgacaggttgaaagcatgttgaaaaaaataaatatttaagaaaagcacacacagcaccctcactacaagtagttctaaaagggctgcatacaaaacacaatataagatctaaaaaaaaccaccaccattaagtatggctttcttaagagtcgcacatgtcacagaatgagctaaaataagattacttcttttataatattgcaaaaagttccagtttttgcattttctcagttttttaaagaggaagatgtgcaaagttggaagcagtaagctgcgtcttctgagtcagttccctacgtagccctggcagtgtcctgtgtcccaaagctcagagagccccagtgtacaacctggtcaggatccagagcttgacagaaaaatcgtggtgtccctgccccctccccgcccccaaataacaccatccccaatggactgtatttcccactttggtgttgtaaacaccaaaatacaaacagacacaaacaaaaatacaaaatgtgaaatgtaatctacacatttttcctcttcataaaaaaatatttattagtttgaacatcgatttaaaaaaaaatcagtcacataaaaaaaacccttcatgacatgtcttttccctccacgcctcctgagatggacgtgctcacctgggcctcggaaatcccacactcttcagtcggcaaactgcgaacaagaacaggaaatctgccacgcagcaaacacttggggaggtcagtgggacactgttggttttagggaagaaaatgcccctgtagctccggcggggaaccccaaaacggtcagcaaaggcaggccacacggagtgagccggccagatggagcaggacatcctgagtgtggagggggaggcgggcctgggtcctgggcagggtggcctgagagcagggactggtacaaaacccagagacattggtgggtagcaaaggtctggtttccaaatgcattttgtaagaaagtcagtctgtttagaaaaagggtttaaaaatcaggggaaaggtacaaagttctgagaattctcaaagaggccggggtggggctggcctggggtgagggctggagggctccgctgcagctccctggtagccatgctctccccctgggggactcgtgccagagccacccaccttgctcggtaagagtgggcagggctcaccgctgaggggccagcgcttggcccggctcctatccccacactccgtgtgcagaaaaatcttggcctctttctccagctttgaggagcccacagcctccgagctgaggggtgtgtgtgatgacagctccagccagggcaccctgtcattggtagaaccgggggccaatgtcaaaaaacaaaagccgtgactcctgcgctgtacctggagtcctccatgtactcctccacaggacccccggccagccccagccctccccgagcagcagcggtcagggaagctggtgctctacctgacaatgtggggaaaagcctggtatacaggctagaaaaagagagtaaaaactctttccacgcagccctgaagctcagcactccggggggtcttcacacgggcaggtcctggagggaaggaggaggccaccgcgcccacctcccatctgaaggcacagcaccgcagtggtggcctgtgccagaggagggggtgaaggatggaatgtcctcatggtgagtgctgtcagaggcaggcctgaacgagaagacaggccgtggcaacggtcccgaggctgtgagtctaggcagcctgcctccgggacccccaaagccaggcggtgcaccacagcacacaccgtgggacctttgcttttcactcaggaaaagaaagaacatgtgagtgcttctgaaaacacagcaagaggacttgagcacaagctaaaggaaaaacaaccctatatagtttcttcgagtgagaaaaataatgccaaacaaaataattttatgtaactacctcgatatgtctctgactacttaaaaatttggttacccacgcggggaggtgtaagcagcacactgcagttaggaacaccgcctccagtgttagcagcaaaggcaggagcccagctccagcccgtccaggaggggtcagcaggagcggccgggctgggccatgggcagaacaggacgggcagagcccggggtggacgtggcagcccaaggctctccgaggaagtgcacacgactgagccgaggcccttgcagagggaacctggtgtggcctgaagtggtggggggcacagggctgagggtcccctcctggaaggagcccccagggctgtgtccacctaagatagcacctggagccctcggcctccagcagggtctgcagctgtgttgtgtgttaagcaccaaagcccagaggtaagacggtggcagggctctctgtgcacctggattctacaggctgccatgggccacggctgcaccacgggccacggctgcagccacaggcagtgacctggctgctaggggaggggagggcgggctccagccgggctgaccgggtgtctgtaaaactctgcacctgctcaggccaggggcctctgggccgaacacaccaccccgcccagtgcccactggacccggccacaggcccatcacgtgtccaagccaggctggccatcacaggggccactcacacacccgcaccacctgctggggacttaggaccgtgctctcccttcactcaaacccaccctgtgccctcccccaactcacttcatgtctggtcccagagcacccctcttgctggggtcgcacctgcttagcccgcagggctggtttccgtggggggtgggttcagggggaagcagaggaggggccgcgagaggggtgagcgtggccctggccccgcagtggagacccaccggacacacacacgggtggacggagcgaggcagccaccgaccctgccggcgggcgggcctaggagagccaggcgaagtccttgtcagggcctcct

SEQ ID NO: 9871 - DNA, 28120 bp, Homo sapiens
gcggcgctcgggaggaagtgccgatcggctgctggggcgaaaagggggcgccgggccgctctagccggtgaggccggcgggctctctgtggctgcggctgggaaaccgcgcggaggaggtgcccggccggggaccaggtggccgcggtttgcggggacgcggccctggccagacagaagagacgccgggcgggggggcgcggccggcctggaaggcggcgggcgcggcgggtgggctcggcggagggtgaggcggcggggcgccccgcggggaaggggctccggagtgacgcgggacccggctagcggcgagcccacggcggctcggaagggaagcgcggagcctgagcgggggtacccgggctgcgacctctgcgctgggagctgtgcctctgagccggtgtctccccgagggaaaggggacgtgcccgtgcccgtgcccgccctcaggctgtggggtcggtcccgagacgcggggctcagctggcttctcttcttgcagccctggtccagcgcctccctctctcagcatggacgaggagagcctggagtcggccttgcagacctaccgtgcgcagctgcagcaggtggagctggccttgggcgccggcctggattcgtctgagcaggctgacctgcgccagctgcagggggacctgaaggagctcatcgagctcaccgaggccagcctggtgtctgtcaggaagagcaggttgttggccgcgctggacgaagagcgcccgggccgccaggaagatgctgagtaccaggctttccgggaggccatcactgaggcggtggaggcaccagcagcggcccgtgggtccggatcagagaccgttcctaaagcagaggcggggccagaatctgcggcaggtgggcaggaggaggaagagggagaggacgaggaagagctgagtgggacaaaggtgagcgcgccctactacagctcctggggcactctggagtatcacaacgccatggtggtgggaacggaagaggcggaggatggctcggcgggtgtccgtgtgctttacctgtaccccactcacaagtctctgaagccgtgcccgttcttcctggagggaaagtgccgctttaaggagaactgcaggtaaagccctttgttgtcagatgccaaccttaggggcgtaaggggcacgcacacagggtcgggtcaggatcggccctccctttgctttgcagttttgtctcagcttcctggggcaggcgtgctttgacagctgtgtctgtgttcaggcgtctacgtcttccttctggggtgaatcaagaagcatggaaggaggccaggcgcggtggctcacgcctgtaatcccagcactttaggaagccgaggcgggcagatcacctgaggtcaggagttcaagaccacgctggtcaacatggtgaaaccccatctccttaaaaacacaaaaatgaaccggtcgtggtggcgcgcacctgtggtcctggctactcaggaggctgaggcaggagaattggttgaacccaggaggccgagtttgcagtgagtggagatgcagccactgtactgcagcccgagcagcagtgcaaggcttatgtggaagagagtaggtctccagcctatcgtcagtttttttttggtggttgttttaattttttttgagacagggtcttactttgtcaaccaggctggagtgcagtggcatagtcctggctcactgcagcctggacctcctgggctcaaccgatcctcctgcctcagcccccctaggagctgggctacagactcacgctactacacccagctaatttttatattactataattttttatcttttttttgagatggagtcttgttctgttgcccaggctggagtgcagtggcgtgatctcggctcactgcaagctccgcctcccgggttcacgccattctcctgcctcagcctcccgagtagctgggactacaggcgcccgccaccatgtctggctaattttctgtatttttagtagagacggggtttcaccatgttagccaggatggtctcaatctcctgacctcgtgatccgcccaccttggcctcccaaagtgctgggatgacaagcgtgagccaccgcgcctggccttttttttttggagacagagtttcactctcctcacccaggctggagtgtagtggcgcaatctcagcttaccgcaacctctgtctcccgggttgaagtaattctctacctcagcgtccagagtagctggcattacaggcgcccgccaccacactgggctaattttttgtatttttagtagagtcggagattcaccatcttggccaggctggtcttgaactcctgacctcgtgatccacccaccttggcctcccaaagtgctgggatcacaggcgtgagccactgcgcctggccctgttgttagttttattctctagagttcaacttttaaattttactttcatggagattttcaaacataccccaaattagagagtttagcataatcaccgcccacggtccatcatccaatgtcgtcatttattaatattttcccagtctcattttgtctgttctccctgccctatttttttctttcctgggccattttaaagcaaattccagaagttactggttttttccaattatgaatacttcatagttgcatctctaatctaactgattaggaaattacttaaaaagtaactttttggaagtccaagtccgatgtgaggacaaaaaagagtaacttctgtgtcataataggtaacacatttaatggtaatacctcttccatattcaaatatgaacaattattactgtaatgtctctatttccctaagcgcatagctttatttttcctcctttttacttttctcttagaagaaatatttaccaagccttctagtaggtaattttcttttttagccaatagttcaggctgaccgtgtaaccatccctagttctagttctagttctttgaatgtcttccttttttttttttttttgaaacagcgtcttgctgctctgtcacccaggctggagtgcagtggcacaatctcggctcactgcaatctccgcctccctggcccaagccatcctcccacctcagcctccctaatagctgatactacaagtgtgcactgccacgcccagctaatttttgtattttttgtagagacgggatttcaccatattacccaggtctcgaattcctgatccctttgatgagagatctgacacatccctgtggtgctccctctgggccaggcactgctccaagggtttcatatactttcattcatctgtgcaacagccctgtaggtaggccctgcagtcacaccatctgacagaggaggaaacaggagtagaagaactgagtggtccagggcttcaaggctcagagggctccggttgcccccagccctcgttccgtcccctgctccacccagtgctgcttgccatgtcggcatcaggcctgatctgaaagcttccggagcatcttacagacgtccaccttgccaccattcaggactgataagttctcttggatttgcgttggaccttttttttttttttaagatggagtttcactgttgttgcccaggctagagtacaatggcatgacctccacctcctgggttcaagggattctcctgcctcagcctcccaagtagctgggattacaggcgcctgtcaccacgtggtgcccagctaatttttatatttttagtagaggcagggtttcaccatgttggccaggctggtctcgaactcttgacctcaggtgatcccgccttggtttcccaaagtgctgggattacaggcatgagccaccacacccggcccaggatttctttatatattctggatatcatcccttatgaagtatatagtttgcagatatttgctcccattgtttgggttgtcttttcacttgatatagtgtcctttgatgcacaaacattttaaattttgatgcagtgcaatttattgtttctttattgcctatgtttttgtcatcaggtttaagaaaccacctcatccatagttatgaggattttcacctatgttttcttctaagagttctgtagttttagctgttaaatttaggtctttgatccattttgagttaatttttgtatatgttattaggtgagggtccactttattcttttgcatgtggatttccagttttcccagcaccatttgtttaaaagactgctttttctccactgaatggtcttggcacttttgtccaaaatcaattggcaatatatgtaagggtttatttctgagctctctctcctgttccattggtgtatatgtgccagtaccacactgttctgattattatagctttgtgataagttttaaactcaggaagtggtagttattcaccatttgctcctctttttcaagtttgttttgtttctggatcctttgcaatttcatatgaattttaggatcggcttgtccaattctgcataaaagacagtttgaattttgatatggattgcatagaatgtgtagatctgtttggggcacattgtcatctttacaatattaagccttctggctgggtgtggtggctgacgcctgtaatcccagtactttgggaggctgaggcgggcatatcacttgaggtcaggagttcaagaccagcctggccaacgtggtgaaaccccgtctctactaaaaataaaaaacaaattagtcggaggtggtgcacacctgtaatcccagctacacgagagggtgaggcaggagaatcgcttgaacctgggaggaggaggttgcagtgagctgagatcatgccactgcactccagcctgggtaacagagggagactccatcttaaacaacaacaataacagaagaaaaaaacagtattaagtcttccaattcatgaatgaaggatctgtccatttatttacgtctttaatttctttcaacagtattttgtactgttcaagtcttgcacattcttggttaaataagtattatttttgatgcttctctaaggaattgtttttcttttccttttttttttgagacagagtcttgctctgtcacccaggctggagtgcaatggcacaatcttggctcactgcaacctctgcctcccgggttcaagcaattcttctgctcagcctcccaagtagctgggatcacaggtgcctgccaccacacccagctaatttttttttttgagatggagtcttgctctgttgcccaggctggagtgaagtggcccaatcttggctcactgcaagctccacctcccgggttcacaccattcttccgcctcagcctcctgagtcgctgggaatacaggtgcctgccaccacgcccagctaattttttgtatttttagtagagatggggtttcaccatgtagccaggatggtctcgaactcttgacctcaggtgatctgcctgcctcggcctcccaaagtgctgggattacagatgtgagccactgtgcccggctggagttgttttccttagttacattttcaggctgtttgttgctagtatatagaaatacaagctgggcaccgtggctcacgcctgtaatcccagcactttgggaggccaaggcgggtggatcacctgtggtcaggagttcgagaccagcctggccaacatggtgaaatccagcctctattaaaaatacaaaaattagtctggcatggtggcaggtgcctgtaatcccatctactcaggaggctgaggcaagagaattgcttgaacctgggaggcggaggttgcagtgagctgagatcgcgccattgcactccagcttggggaacaagagtgagacttcatctcaaaaaaaaaaaaaaagaaatacagtggatttttttatgttaatcctgtattgattgctgaattggtttattagtgctaataggattttttatgcactatttaggattttcgatatatacaatcatatatattcaatatatacaattaatatatatgtgaatagagataattgtagtctttgtttctagtttgcatggcatttatttctttttcttgcttaactgccttagctagaacttcaagtacaatgttgaataaaagtgactagagcgggccgggggtggtggctcacacctgtgttcccagcactttgggaggtggaagtgggcagatcacttgagatcagcagtttgagaccagcctggccaacacggcgaaaccccatctctactaaaaatacaaaaattagctgggtgaggtgatgtgcacctgtagtcccagctacttgagagggtgagacatgagaattgcttgaacctggggggcggaggttgcagtgagccaagatcatgccactccactccagcctggacgacagagcaagaaccctgtctttaaaaaaaaaaaaaaaaaaagtggctagaacaaacatctttatcttgttcctgatcttaggtggaaaacttttttgttcctgatattaggtggaaaacttttagtctttcactgttgaatatgatgttacttgtaggttttctgtagattccctttatcgagttgaggaaattctcttatattcatagtgtgttgagtgttttttatcatgaaagggtgttgattttttttttaaagatagggtcttgttctgtcacccaggctggagggcagtggcatgatcatggctcactgcaacctcgaattcctgggctcaggggatcctcctacttcatcctcctgagtaggtgagactacaggcatgagccaccatgcccagctaattttttaatttttctgtagaggtagggtcctgctttgctgcccaggctggtcttaaactccagggctcaagcaatcctgcctcagcctcccaaagtgctgagattacaggggtgagtcactgcactgcacccagctgtgtgggatttttcaaatgcttttttcctttagatgatcatgtgtggtttttttcctttcattttgttaatgtggtatattgattttcgtatgttgaaccatccttgaattcctcagataaagcacgcatattcatggcgtattatctctttattattattatttttgtagagatgagatttcactctgttgcccaagctggtctcaaactcctgggctaaagtgatcctcctgcctcagcctccgaaagcgctgggattataggcatgagccacttggccctatcttttttctttttcttttttttttttttttgagacagagtctcactctgtcgccgggctggagtgagtggcgcgatctcggctcactgcaacctccatctcccgggttcaagcaattctcctgcctcagcctcctgagtagctgggactacaggtgcccgccactatgcccagctaattttttgtgtttttagttgagacggtgttttgccatgttggacaggctggtcttgcactcctgacctcgtgattcacccaccttggcctcccgaagtgctgggattacaggcgtgagccaccgcagcgagccttatctttttaacagttaaaagtttaaggccttatcatgtaataacattgctggatttgatttgctgctgttttgttgagaatatttgcatctgtattgataagggatattggtctgtagttttcttttcttggcatgtctttgtatagctttgatgccagcataatattggcctcatagaatgagttaggaagtattctttatattatgggaagaggtaaaaagggattggtgttaattcttcttcaaatgtttgatagaattcaacagtgaagtgatatatacaatcatatatagagagagagagagagagagagagatggacttttcttttgttggaagtttattgactattgattcaatttccttattgaaattgacttttctttttggaagctaaaacgtataactgtagtgaaagtttctgaacttttctttcattggaagttttttgactactgattctttatttgttataggtctattcagattttctgtttcttcttgagtcagtttggtctcgctctgtcgcccaggctggagtgcagtggtgccatcttggctcactgcaacttctacctcccgagttcaagtgattctcccacctcagcctccccagtatctcggactacaggcgcacgccagcatacctggctaatttttgtatttttagtaggaacagcatttcaccatgttggccaggctggtctcgaactcctgacctcaggtgatccacccgcctcggcctcacaaagtgctgggactacagacataagccaccgcgtccagccttgagtcagtttagatagtttgcatgcatgtttctaggaatttgtccattttgtttatgttatctaatctgttaccatacaattgttcatagtatccttttatagccctagttatttctgtaagatcagtagtaatagctccactttctctcttggttttagcaatttgagtcatctcttttcttcttctttttttttttttgagatggagtctcactgtgtcacccaggctggagtgcagtggcatgatcttggctcactgcaacccctgcctcccaggttcaagcaattctgccttagcctcctgagtagctgggattacaggtgtgagccaccacacccagctagttttgttttgtttttttgtttttgagacggagtctgtttctgtctcccaggctggagtgcagtggtgcaatctcactcattgcaacctccgactcccagattccagcaattctcctgcctcagcctcctgagtagctggaactataggcgtgcaccaccacgcctggctgatttttatatttttagtagagatgggatttcaccatgttggccaggctggtcttggactccctacctgaggtgatccgcccaccttggcctcccaaagtgctgggattataggcatgagccaccatgcccagccagtttttgtatttttagtagagatggggtttctccctgtcggccaggctggtcttgaaatcctgacctcaggttatccaccagccttggcctcccaaagtgctaggattacaggcatgagccaccacgcatggcctgtcttttcttcttggtcattttcgctaaaggtttgtcaattttgttgatcttttttgttgctgatctctattgttttcccattctgtttcatttatttccattttaacctttgtttccttttttctgctggtttgggtttaatttgctctttttttcccctaatttttcaaggtatacagttaagttattgatttgagatctcttttttcttttctttttttttttttttttttttttttggttgctgttgagatggagtctccctctgtcacccagactggagtgcagtggcatgatctcagctcactgcagcctccgccgcccaggcgattctcctgcctcagcctcctgagtagacgtttcccggccaaggtgtttctttttgaatgtaagcatttacagctacagatttccctctaaacactgctttcactgcattccataagattgttttttgttgttgttttgttgtttgagacacagtctcactctgttgccgtttggagagcagcgatgcgatcatagctctgtagccttgagctcctggactcaatcagtcctcctgcctcagcctcccaagtagctgggactacaggtgtacaccactgcacctaactaatttcttttataagtttttgcagaggccaggcacagtggctcacacctgtaatcccagcactttgggaggccaaggtgggtggatcacctaaggtcaggagttcgagaccagcctggccgacagggagaaaccccatctctactaaaaatacaaaaattagctgggcgtggtggcaggtgcctgtaatcccagctactcaggaggctgaggcaggagaatcgcttgaacctgggaggcagaggttgcagtgagccaggatcacaccattgcactccagcctgggtaacaaaagcaaaactccatctcaagaaaagaaaaaaaaaagtttttgcagagacagggtatcactttgttgcccaggctggtctcaaactcctgacttgaaggagtcctactgcctcggcctcccaaagtgctgagattatgggcaagagccaccgcaccctgccacttggctgttttgttctgttgtatttccattttcattgatctcaagacatcctaatctcccttttgtttttttgttcgacttactcgttattcaagagtgtctttatttctgcatatttgtaaattttccaaaaaagtttttctttctttcttttttttttgagaaagggtcttgctctgtcgcccaggctggagaatggtggtgcacaatcttgcctcactgcaacctctgcctcccgggttcaagtgatcctcccacctcagccttcccagtagctgggattacaggcacacaccaccacacctggctaatttttgtattttagtcttaaacgtgctggtcagactggtctcgaattcctgacctcaggtgatctgcccgccttggcctcccaaagcactgggattacaggcgtgaaacaccatgcccagcccccaattttttttttttaatagagagaaggtctcactcaagcccaggctggtcttgaactcctgagctcaagctgtcatccctcctcggcctcccaaggtgctgagattacaggtgtgagtcacagtacctggccttctttcaagactttaaaaatgccatcttggctgggcacggtggctcacgcctgtaatcccagcactttgggaggccgaggtgggcagatcacgaggtcaggagatcaagaccaccctggctaacatggtgaaaccctgtctctactaaaaatacaaaaaattaaccaggtgtggtggcaggtgcctgtagtcccagctactcgggaagctgaagcaggagaatggcgtgaacccgggaggtggagcttgcagtgagctgagatcacaccactgtactccagcctgggcaacagtgcgagactccatctcaaaaaaaaaaaaaaatgtcatctcactgccttctggtccaatagtttctgatgagaaattggctgttaatcttattgaggaacatttatatattgactagtcacttgtctcttgctgttttaggagattctctatctttgggtttcagcagtttgattataatgtatcagtgtggatccctcaatttataagctacttggagttcattggacttcttggatgtgtaaattcatgtctttcattaaatttgcaaagtttcagctactattctttgcatcttgaaatactagttttgtttctttctgtctgtttgccgcttatggaactttatgcatacattgatgtgcttcatggtgtagcacaggtcccttgggctctaggcatttttctttgttctttttttctttctgctcctcattttggataaattcagctgacctgtcctcaagttcactgtttctttcttcttccttctcaaatctgctgttgaaacttctggtgaaattttcactacagttactgtactttttagctccaaagtttctatttggtttctttctgtagtaattatcactttactagtattctctatttggttagacatggttcttttgttttcctttagttcattatccatggtttcctttatttttaaatttctttttatttagttattaattttttttttttttgaagcggggtttcactcttgtcacccaggctggcaggcaatgtcacaatcttggctcactacaacctccgcctcctgggttcaagtgattctcctgcctcagcctcccaagtagctgggattataggcatgtgccaccacacccacctaatttttggtatttttagtagaaactgggtttcaccacattggccagactggtcttaaactactaacctcaggtgatctgtccgcctcagcctcccaaaatgctgggattacagatgtgagccactgtgcccagcctctttttttagtgtatttaaggtaattgattgaaagtttttgtctagtcattcaaatgtctaggcttcctcaggaacagtttctattaatttctttatttttaaaaaattttttttaattttcttttttttttagatggagtctcactctatagcctaggctggagtgcaatggcttgatcttggctcactgcaacctctgcctcctgggttcaagcgattctcctgcttcagcctcctgagtagctgggactataggtgcgtgccaccactcctggctaattttttgtattttcagtagagacatggttttgccgtgttagccaggatggtctcgatctcgtgacctcatgatcctcctgcctcggcctcccaaagtgctggaattacaggtgtgagccaccgcgcccagcctattttttattttttgagacaaagtctccctctctcacccaggctgtagtgcagtggcacaaccctggcacactgcagccttaaccgtccaggcttaagtgagtctcccaccttagtctcctgagtagctagaactacaagcatgtgccaccatgcctggctggttgtgttgttactgttttagacacagggtcttgctacatttctctgactggtcttgaactcctgggctcaagcagtcatcccaccttggcctcccaaggtgttgagattacaggtgtgagccaccgcacccggcctgttaatttctttatttccggtgaatgggccacactttcttgtttctttgcatgccttgtaattttttgttgaaacctgcacaatttgaagatgataatgtggttactttgaaaatcagatcctccgccctctgcagggttcattgttgctgtttgttgtggattgtcgtttctcgtttgtttagttactttcctgacctttttaaataaagactatattctgtcaggggtgcttgtttctgttcttttaggttagtggttagcttgtgctttgaaagagatttctttaaatatctagtggcaaaaaggataaagaggccgggcgcagtggctcacgcctgtaatgctaggactttgggaagtggaggcgggtggatcacttgaggtcaggagtttaagatcagcctggccagtatggtgaaaccctgtctctactaaaaatacaaaaattaaccgggcatggtggcacctgcctgtagtcccagctactgggaagactgaggcaggagaatcgcttcaatccagggggcggaggttgcagtgagctgagattgcgccattgcactccagcctgggcaacagagcgagactctgtctcaaataaaaaaaaaaaaaaaaaggataaagagtgtcttccatcctttccaggttgcctctgtactggggcaagtccttcagtgtccgccaggctgttcacggcttttcctcagcctttacttctcgctcccatggagcctaaggatgaaccagaggtgaaagttgagggcctcctcaggtgtttctgagcccctgtctagccccagctgtgtgcatggccttctggatttccaagcatgaacaggagctttccaaagcccttagaccttcatgtagctcttttcccagcctcttccttcctaggcttttctgtcagctctttgcccatctgttgttgtccctcccccacaacttcaggtagtatctacctgtaaatgccttcaggccaggcgcggtggctcatacctgttatcccagcactttgggaggccgaggcgggtgaattgcttgaggtcaggagttcgagaccagcctggccaacatggtgaagccccgtctctagtaaaaatacaaaaattagctgggcgtggtgggtgcctgtaatctcagctactcgggaggctgaagcaggagaattgcttgagcctgggaggcggaggttgcagtgagctgagatcgtgccattgcactccagcctgggcgacagagtgagactccatctcggggaaaaaaaaaaaaaaaaaatgccatcaacagcacgaccctggaggctgccccagccctgagagagttcgagggggtgaaacaaaggcaagcccttcagggagacactagaaagatccaaatgcataagcaggattccttgagaaaaggtctgtatcatcccttctgacaccagcaagccacatcagaaatacaggttgccttccccatggctacatgtgagctggtagtagtggctgagcagaaatagcccagctgtcctcctgaaatttagcagggtcttacttcattgagcagtcatctggttcgtagacaccagagttacagaaaagtttattgggaggttttgacagtttaatagaaaaaagtttattgtgacagttttgacagctgaatagaaaaaagtttattgtgacagttttgacagcagaatagttgctttgctggagagacggatctttggagctgccaactccatcattttggtgatatccagctctgttgctgaatttttagctatgctgttttaagttattttcttagtggttgctctagagatgacaatgtacatctttaacttaccacaatgtacttcagattattactaacttaacacttaaagtacagcatttttttttttatggagtttcactctgtcacccaggctggagtgcaatggtgtgatctcggctcactgcaacctccgcctcccaggttcacgccattctcctgcctcagcctcctgagtagctgggactacaggcacccccaccacacccggctaattttgtatttttagtagagatgaggtttcaccatgttggtcaggctggtctcgaactgctgacctcaggtgatccgcccatcttggcctcccaaagtgctgggattacaggtgtgagcgactgcactgagcctaagtatggcaacgtgtctataacatagatctacttccgttgtactatgacatagttccccctccattttcctatagcacagtcccaacctcccttttcctctgacatagttccatcctccctcctcctatgacgtcctcccttctcctctggcatagctccatcctcccttctcctatgacacagctccatcctcccttctcctctgacatagctccatcctcccttctcctatgacacagctccatcctcccttctcctctgacatagctccatcctcccttctcctatgtcatagctccatcctcccttctcctctgacacagctccatcctcccttctcctctggcatagctccatcctcccttctcctatgacacagctccatcctcccttctcctatgacacagctccatcctcccttctcctatgacacagctccatcctcccttctcctatgacacagctccatcctcccttctcctttggcatagctccatcctcccttctcctatgacacagctccatcctcccttctcctctggcatagctccatcctcccttctcctctgacatagctccatcctcccttctcctctgacatagctccatcctcccttctcctctgacatagctccatcctcccttctcctctgacatagctccatcctcccttctcctctgacatagctccatcctcccttctcctctgacatagttccatcctcccttgtcctctgacatagctccatcctcccttctcctctgacatagctccatcccctcttctccttcatgtattattgccatatatacatttatgtatgttataacttcagctcttcagcgttataattattgcttcaaaagtattttgaaagaagttgcctggaggcagtggcttatgcctttaactccagcacttttgggggctgaggtgggcagatcgcctgagccagggagttggagaccagcctgggcaacatgacgaaacccatctccaccaaaattacaaaaaattagtctggcatggtggcacgcgcctgtagtcccagctatttgggggaggatcccagctaaggtgggaggatcacttgagcctgggaagtcaaggctgcagtgagctgagattgtgccactgcactccagcctgggtgcagatcttatctcagaagtaaagggactaggaatggtggcttttatctctaatcccagcactttgggaggctgaggtgagtggatcaccggaggtcaggagtttaagaccagcctggccaacatggtgaaaccccgtctctactaaaaatacaaaaagtagccgggtgtggtggtgggtgtctgtaatcccagctactcgggaggctgaggcaagagaatcgcttgaacctgggaagcggaggttgcagtgagcaagatcgcaccactgcattacagcctagatgacagagcgagactctgcctaaaaaaaaaaaaaaaaagaaaagaaaagaaattaagatctggacactgtggttcatgcctgtaatcccaaagccttgggaggccaaggcaggaggatcacttgaggccaggagttcaacaccagcctgggcaacatagcgagactccatctctatttaaaaaagaaagaaattcaaagagaaaaaaagtatacttgtttttttgtatcatccatattttacctttcttttttttgcccctttttctttcctgtgaatttgagttactgtctagtgtcatttccttttagtctgaagaacttcatttagaattttttttttttttttgagacaaagtctcactgtgttgcccaggctggagtgcaatggtgcagtctcagatcactgcaacctctgcctccctggttagagtgattttcctgcctcagcctcccaagtagctgagactgcaggcacctgccaccacccccagccaatttttttggtatttttagtagagacagggtttcactatgttggccaggctggtctcgaattcatgacctcatgatctgcctgtcctggcctcccaaaatgctgggattaccatgagccaccacgcccagcccatttagaatttctttttttttttttttttgagatggggtctcgctcttgtttcccaggctggagtgcagtggcacgatctcggctcactgcgagctccgcctcccgggttcacgccattctcctgcctcagcctcccgagtagctgggattacaggcgcctgccaccacgcccacctaattttttgtatttttaggagagatggggtttcaccgtgttagccaggatggtcttgatctcctgacctcgtgatccgcccgccttggcctcccaaagtgctgggattacaggcgtgagccaccgcgcccggctagaatttcttgtaggacaggcttgctagcaaccaattcagtgtttatttgggaatgtctttatttcagcttcattttttgaaggatagtttagctggctatagaattattaattgatcattcttttcagtgtttaaaagtgtcatcatgctaccttctgggttccattgtttctgatgagaagtcatctgtcaaattgtccctttgtacttgaagaattatctttttttctcttgatgttttcaagattttctctttgtctttggcctttagtagtttgtgatgtatctaggtgtggatctcttggtgtgcatcgtatttgggcttcagtaagcctcttagattcatagattaatgttttgttttgttttaccaaatttggagagtttttactcatcatttcaacaaatttttttcctgcccctctctcatctccttttgggagtaccactgcatgtatgttggtgtgcgttctctaaagctttttttttttttttccaaccttttttctccttattcctcaaactggattatttatttatttatttatttattttttaattttttgagacggagttttgcttttgttgctgaggctggagtgcagtggcgcgatttcggctcactgcaacctccaccaccttcgaggttcaagcaattctcctgcctcagcctcctgagtagttgggactaccggagtgtgccaccaccatgcccagctaatttttgtatttatagtagagacgaggtttcaccatgttggcaaggctggtgttgaactccggacctcaggtgaaccacctgcctcagcctcccaaagtactaggattacagtcgtgagccactgcacccggccaggataatttttaatgaatttttttcttctgccatctcaaatctgccgttgagtacatctaattaattttttttttttgagtcggagtctcactgtgtcgcccaggctggagtgcaatggcgcgatcttggctcactgcaacctccacctctcaggttcaagtgattctcctgcctcaccctcccaagtagctgagatgataggcgcccgccaccacgcccagctaatttttttgtatttttagtagagacagggtttcaccatgttggccaggctggtcttaaacccctgacctcaggtgatccgcccgcctaggcctctcaaagtgctgggattacaggcatgagcccggccttgaatttttttttaataggctttttgtttgtttgtttgtttgtttttgagatggagtcttgctctgtcgcccaggctgaagtgcaatggtgcaatctcggctcactgcaacctccgcctcccaggctcaagcgattcttatgcctcagcctccccagtagctgggactgcaggcaccctccaccacacctggctaaataatttttgtagttttagtagagacaggatttcaccatgttggccaggctggtcttgaactcctgacttcaggtgatctgcccacctcggcctcccaaagtccagggattacaggcatgagccactgctcctgaccatggctttagtttttagagtagttttaggttcacaacaaaattgggtggaggatacagagatttcacatatactccagacccccacacatgcaacagcccctccccacaacaccatcatgctccctcaccagactggtacgtttattacaatccataaacctacacagacccatcattgtcacccaaggtccatagtttacattagggctaactcttggtggtgtacattctatggactttgacacatgtataatgacaggcatctactattgtggtatcagacagagaagcttcacaacctcattctctgtactttacctgttcatcctgccctccccactacattcactaaaaatgtcctttcagtgattgtcctttttaactctggaatttccatttgatttttttttttctttttttctttttttttttagacagagtctgcctctgttgcccaggctggagtgcagtggtgccatctcggctcactgcaaccctctgccttctgggttcaagcagttctcctgttttagcctcccaagtagcagggagtacaggctcatgacaccacgcctggctaatttttgtatttttagtagagacggggtttctcaatattggtcaggctggttttgaacgtttgacctcaggtgaggcacatggtgaaaccccatctctactaaaaatataaaagttagctgggcgtagtagctcacacctgtagtcccagctactccagagactgaggcctgagaattgcttgaacttgggaggtggaggtgcattgagctgagatcatgccactgcactccagcctgggtgagagagtgggactcggtctcaaaaaaaaaaaaaaaaaaaaaggattctctatttcctgaatcattgccatcatattttcatttaattatttgaacatacttatagtagctgctttgaagtctttgctaaactcaacatctgggcccactcagagtcagattatatcaactgctttttttcctaaatatggatcatggtttcctgtttacctgtcttataattttttttgttgaatactggacatttcagatgatctatgtctggattctgagttgttttcctgagtcttgtgttctgtttgttttagttaagttgtttggacttaaactgcaaaacttgcccacccacccctgcagcctctgatatctctgctcagatttttaaattcttttttttttttttttgagatggagtcttgctgtattgcctaggctggagtgccagtggtgccatctcagctcactgcaacctccacctcctgagttcaagcaattctcctgcctcagcctcccaagtagctgggattacagatgtgtgccaccatgcctggctaattttttgtttttttagtggagatgaggtttaaccgtgttagccaggatggtctcgatctcctgaccttgtgatccgcccacctcggcctctcaaagtgctcggattacaggtgtgagccaccacgcacggccttaaattctattttttagtctggcttcctagcagttgcttctgtgtttgcatatggtagtggtcagccagggatttgggcaagagggtgtgctcaaacactcctaacccaaaaggctccccaccacaccatgtggtttcagagcacgttgtgagttcagccagcccctctctctttgctttcacttcaccctggcctctcttggagctcccaacacctgcagtggtttcctcaagagccaggcccttcctgggagagctgagcccttctgtggctctcattttcagagtcttcctgttaagtatctggctggcccagtgctcactccagctgggatcacagccccaaatgatcagggctgtcagttttctttgtaagtgtttatcgagtcaccacttttaactacgaggcctgggttttcccttctgtcccacatccacctctgctgctgctggtttttgcagccagccttgacctggtaaatcactcagatttgctgactcaggagtaggagccaggggcagccccaggtgcaaaggctgtagacttcccagtattctggcccaaggcccaacatttttcaagaagaatctcttctcagtgagttctcagctttggtcagtttccagaactctgaaaagttctaaatcagtgagttttgataattttgtctagttttagattattttttctttttttctttttttttttttttgagatggagtctcacttcgtcacccaggctgaagtgcagtggtgcgatcttggctcactgcaacctctgccttttgggttcaagcgattctcctgcctcggcctcccgagtagcataattataggcgcacgccatcacaccggctcatttttaaatttttggtagaggtggggtttcaccacgttggccaggctggtctcaaactcctgacctcaagtgatccgcctacctcagcctcccaaagtgctgggattacaggcgtgagccaccgctcccggcccatattcgattcaacgacctctctacttgagtgtggctggaactcagaagcttcttttagttttagatgttgtttgttttcagggttaagtctttactaattctggaatgtatttctgtcaatgctgtgaggtaggtgattgggttgggatcttttatgtatgaaaacccagtttttaattttctcttgtgaaatccatcgtctttctccttgcaccccatctgtgatgcttcctctgccacacgaggctttctgtgtgagggggggctcttcctggaggctctcttttgctccattgatcgatttgcctgttctcttggttttcagttaacttcatggatatgccattaacttctctccatggttagaaatttaggttatttccaagtttttcatatttggttaatatctttgtggccaaatctttacatacattctccttaaaaatcatgtcactgaggcggaaggattacatgagcccaggagttcaagaccagcctggccaacatgacaagaccttggctcaacaaaaagattcaaaaattagctggcatggtggcacactcccatagtcccagccacttgggaggctgaggcaagaggattgcttgagcccaggaggtcaaggttgcagtgagctgtgatcctaccatgcacttcagcctgggcaagagagcaagactctactgcgcacacacacacacacacacacacacacaaaataatagaagcactttctgggttaaagagtttacaaatttcaaggcttttaatattgtcaaatattctagaagaggttttactaatgatggtgtgggtgtgctgaaggggcgtatttaatcgaattcactctgggtttaaccctctctttttgaacatgttctcagtctcctttcagccagtctctgctgcagtgcatttgaggcacagtcctgtagcccctggcgcccccggtcattggcagggccctgtgtgcctaagaacagtaggcactagaaggaaccgcccaaaatcctggcctggggaggtgtacgaggccacctttgtctacgcatgagacaaaatccctgttccacctcactctgctccacccacccgttcctactggaaagacagccttggctccatgtcacgggctgaaggcctgtcctcagttgctccttttttgtttttttgagacagtctcactctgtcttccaggctggagtgcagtgacacaatctctgctcactgcaacctccgcctcccgggttcaagcgattcttgtgcctcagcctcccgagtaggtgggactataggcacgcgccaccacacccggctaatttttgtatttttagtagagacgggtttctccatgttggccaagctagtctcgaactcctgacctcgtgatccacccgtctcggcctcccaaagtgctgggattacaggcgtgagccgctgcacctggcccctcagttgcttttgtggggttgaaagaacttcctttttgaaacgatggcatggcagcagtggatggcggttggtttttcatgtctttatttggcaaagttgaagattgcagttctgtctgtccccacatttcctcttcattctctctctctctctctctctctctctctctctctctctctctctctctgtgtgtgtgtgtgtgtgtgtctcggttttggttttaattttactggttcactgatgcctaaaagtcaaggcatcactatttcataagcaggttctcctagtttgggggaggactcagtcatgcacatacacacccccagcacatctgccttgatgcactggtgctgtggcctgtgcagtagtgaggctgtgggagctgctgtcagaaggctgctgccacactgtgactccagcagaggcgatgggacacacggggcatattctggagcagccaagtccatcccgagagagaatgcgggtgtctgtgtgtgtgatgtgtgtgagactgtgtgtgtgtgtgcatgtgcatacatgtgtaaagtgtacagttggcccttgtgtgtgtgagattgtgtatgtgcatacgtgtgtaaagtgtacagttggcccttggtgtgtgtgtatgtgtgcatgtgcatacgtgtgtaaagtgtacagttggtccttggtgtgtatgtgtgcatgtgcatacgtgtgtaaagtgtacaattggcccttggtgtgtgtgtgattgtgtgcatacgtgtgtaaagtgtacagttggcccttggtgtgtgtatgtgtgcatgtgcatacatgtgtaaagtgtacagttggcccttggtgtgtgtgtgattgtgcatatgtgtgtaaagtgtacagttggccctgtgtgtgattgtgtgtgcatatgtgtgtaaagtacagttggccctttgtgtgtgtgagattgtgtgtgcatacgtgtgtaaagtgtacagttggcccttggtatctgcaggttccatatccatcatttcaaccaatctcgagttgaaaataattggggaagaaaaggatggctgcgtctgtacactgtataacaactatttacatagcatttacatcgtattaggtactgcaagtaatctagggatgatttaaagtacgtgggaagatgtgcgtaggttatatgcaaacactatgtcattatatataagggacttgagcatccttggattttggtttgcacagggggtttcccatggataccaagagactacgtgtgtatgcaagtgtgagtgtgtatatgcatgtgtgtatatgcatgccatgtgtgtgcatgtatgtgtatatgcatatatgagtgagtgcacgtgacagtctacacgtgagggtgcatgtgtgtgcgcgtgtgggtgactgcatatgtgtgtgcatgtgtgggtgcgggtgcatctgtgtgtgcatgtttgggtgcgggtgcatgtgtgcgtgcacgtgtgtgtggatgagaggtcgcatgtgtgtgggtgagggcgtgtgtgtgtgcatgtgtgtgggtgagggggcatgtgtgtgcacgtgtggtgggtgaggtgtgtgtgtgcatgtgtcagggtgtgtgtgcgcgcatgtgtgtgggtgagggcctgtgtgtgcgtgtgtgtgggtgagagatgtgtgcgcatgtgtgtaggtaagggtgcttgtgtgcgcatgtgtgtgggtgagggcgtatgtgtgtgggtgagggcacgtgtgcgcgcgtgtgggtgagatggcgtgtgcgtatatccatgtatgactgcatctgtatttgcatgagttcatgtgtgagtgcatgtttatacgcgtgtcagggtctctgtgtatgtgtatgacgtgtgagtacatgtgttaatgtgtgtgtacatgtgtatatgcctgtgtgcatgtgtgtatgcatgtgtatacatgtgtacttgtgtatgtgtatatgtgtatgtctgtatatgtgtgtgtatgcctgtgtacgtatgtatatgcgtgtgtgtatgcatgtgagtgcatgtttatgcgtgtgtatgtgtacttgtgtgtgcctgtgtgagtgcatgtgtgtgtacatgtgtatatgcgcgtgtgcgtatgcgtgtatgtgtacgtgtgtatatgcatgtgtgtgtatatgcctgcatgtatatgcacaagtgtgtatatatgtgtatgtgtgagtgtatgtgtgcatgtgtatctgtatgtgcgtgtgtatatgtgcatgtgtgtatgtgtgcgtgagtgtgtgcatgtgtgtgtgtatgtgtgcgtgtgtatgtgtgtgcgtgagtgtgtgagagtgtgtatgtatacgcacgcgtgtgtgtctgtctccctcaggacagtgcccaggcggatgggtcagtgctcctgggttggtttgcccctggtggcccatgtctgagccctgccccttacggctctgtctgcaggttctcccatgggcaggtggtctctctggatgagctgcgccccttccaggacccagacctgagctccctgcaggccggctctgcgtgtctggccaagcaccaggatggcctctggcacgcagcacgcatcaccggtgaggctggccgtgggggcctcccgggaacaccctcccaggccccacgtgtgttgtcactgtgtggctgctccctgcttcctttgggttgagtgtcgggactctggctctgggcccgaaatgagcacacctaccctcagcctctgccctgccttgctcctcatgtccagggtggttcccttcagtggcacctgctgtcaaggattctgacctgcagcttgtctctgcccccagatgtggacaacggctactacacagtcaagtttgactcgctgctgctgagggaggccgtggtggagggggacggcatcctgcccccactgcgcacagaggccacagagtccgactcagacagcgacggtacgggtgactccagctatgccagaggtatggcagcagctgcggagcccaggagccaggaaggtggggtcaccctgagaggctcctggccggtgagggcaccaaccatctaaccaaactattggagagtgtgtgactgcggcgagggtgccacctgtgcctgaggaggccgtgtgggtaggggtagatccgtggcggcctttatcttcaaggagtgtgggtgcaacagctacagtctcattgatgggaggccatggtcgtggctgtggccatgggagaggaggggcctggagttgccgaggaagtcacagaaaatgaccaactgatggggcctggagtgcaggaggggcagctcctctgcatggcttctcagacttgggacctgggtgcctgggatcctggcagacagaggttgtgtccagacagccagcatggaagtttcgggaatgggaactggtgggcagtgtccagctctccagaggggtgtgtgtgtgcgtgtgcgtgtgtgtgtatatatgtgggaggtcacctgacccaagcatggcgggctgagtccaggaggggtctgcatgttggaggtgtacccagggatcagtgatggtggtttctgaagccccatgtccctggtgaaggaggactgaaccaaggactctgtgagggcaggtgaggcgctcacagcctcgcgaaggtggagaagggcaggggcaggagagggctgcggaggaggggccacggtgcagcaggccgtggggactgccatgcactctgcctggtgtcacatgcccacagcagcctcggtgacgagagcacggagcccaagaggtggggtgtcgtggctctgcccaggatctgagctcattggtcaaagcccgggtcaccatgcacaatcctctggcctggctgggccactgccctctgtccatctcttgcagtggtggggtcggacgccgtggactctgcacagtcctctgccctctgtccgtctcttgcagtggtggggtcagatgctgtggactctgggacctgcagctctgcctttgctggctgggaggtgcacacgcgaggtataggctccagactcctcaccaagatgggctatgagtttggcaagggtgagtacaagctgccctggagaagtgggcaggctgctgcagcatagcccaggtccagcagccatcaggttcccggggtcccgcagccatcgggttcccagggtcccgcagccacagcactgccatccccgtgctcctcagattcccggggtcccgcggccacagcactgccatccccgtgctcctcagattcccagggtcctacggccacagcactgccatctccgtgctcctcagattcccggggtcccgtggccacagcactgccatccccgtgctcctcagattcccggggtcccgcagccacagcactgccatccccgtgcctccgcaggtttgggccgacacgcggaaggccgggtggagcccatccatgctgtggtgttgcctcgagggaagtcgctggaccagtgtgtggagaccctgcagaagcagaccagggttggcaaggctggcaccaacaagccccccaggtgccggggaagaggggccaggcctgggggccgcccagctcctcggaatgtgtttgacttcctcaatgaaaagctgcaaggtcaggctcctggggccctagaagccggggcggccccagcggggaggaggagcaaggacatgtaccatgccagcaagagtgccaagcgggccctgagcctgcggctcttccagactgaggagaagatcgagcgaacccagcgggacatcaggagcatccaggaggctctcgcccgcaacgctggccggtacgtgtggggcccagctcagggcaaagggcgacccagggtggccctgcccccgggatacatgctggaggtcacctgacccaagcatagcgggctgagtccaggaggggtctgcatgttggaggacgggcagcgggcacacaggcagtgggtacggcagactggggttggtggcatggcccaggaccccacgctgactagtgagcccctccgcaggcatagcgtggcgtcagcccagctgcaggagaagctggcaggagcccagcgccagctggggcagctccgggctcaggaagccggcctgcagcaggagcagaggaaggcagacacccacaagaagatgactgagttctagagaccccacaagcactatggacgaagcgtgggaccccagcacgggctgccctcaggaagaccagtgttgcccgaggaggggccggcctgctggcctggggcgtgcggacactgctgagtggagacagagctgcggggtcccatctggacacttacttgcccacctgccagtgtcttgggcatttccttggcaaggacattaaagtgatttcatcacagtgtca

SEQ ID NO: 9872 - DNA, 5177 bp, Homo sapiens
cgcgtcctgagagtcagccctcgccgctgcagcctcggcgcccggccggccggccatggagcgccccccgccccgcgccgccggccgggaccccagtgcgctgcgggccgaggcgccgtggctgcgcgcggagggtccggggccgcgcgccgcgcccgtgacggtgcccacgccgccgcaggtaccgggcgccggtgggcgggggcgccgaccaagtttctctcgctgcaaagatggcgtcagtgctgcccaaacttcgggcccccgggggcggggcagcggggagggcggccgcgtcggtccgcgcgtgtccgtgggtcccgccggggctgcgccgggcggccggggagcccttcccgccgcgccgggctgggggcggggccgggggcggggccgcgccgtccacaccggccgcagccggttttcgaggcgggcgccgagcggatccgcggcggaggttgagggacccccctcccccggccaccgcctccgctgagtctgccccctccccatccgcagggctcttccgtgggcggcggcttcgcgggcttggagttcgcgcggccgcaggagtcggagccgcgggcctcggacctgggggccccccggacgtggacgggggcggcggcggggccccggactccgtcggcgcacatccccgtcccagcgcagaggtgagcgggaggcccggtgcctcgggactcggtgtgcgcaggggcggtgggtggggtgcggagacaccggccccgacggaggccaggtcagggccccaggtttgtaattaccagccacccccaagctcttcagccctggaggagctgagcagaaattatcgatgactgggagtccctacacctccctccaccgcagttcctcggggctagagctcagaacccggagcgggtggctgtgcgtctctgtgcagaagaggctgcgcggtcggcatggggcgactgtccaggaatccctggggctcctgaccgccacctcccaacccctgccaggccggacacctcggtctggctgccagggcaggggcgggccctggcctggctcgctggggcctggggagctgcccgtgcttccagcccagtctccccctggctgctgccggctgctggccactcccacctcccaggcctggcgtgaggcccacagctgctgttgcacaaccctggttaatgtgtgatggggggaggcctgggcctggcccgcccctctgccagggcttcagacccctgcccagccccagtatctgaaggaaccacagtggagccaagcccgcgatgtggagaactcaggcttcaggagaccctggccctgctcctggcggctccgggtggctttcagctctctctgcaacctgagctgggggaggagccaggcctcatgcccagggctgggagtggggagcctggtgtgcacgcgtgcccaggcctgcacgtggaccgaccaggggaggggcccagagctctggctgggtcacccgcaccccgcccccatctcctccagagccaccccaggaaaagcccggctggacgaggtcatggctgccgctgcccttacaagcctgtccaccagccctctccttctgggggccccagttgcagccttcagcccaggtaagactcagatgtctgcatttaggggtgtgggtggggacagggctcagaacctacagccacccagcctctgtggggcaagcagagccctcaaacctgggactcctttctaaaatggactcccgcaccctcagtgccccctactgaggccaaagcggcaggacccaggccttctggcctccctgacctgctcacctccacgcggctggccacacacgtctgccaaccctttcctgtgccgggggggtttctccccaagccctggggccagctcctccaagacgctctgcccaccagtctcaccggacttggtgaacaggggcagctcaggattagggactccctggacccacccgaagttctaaggcggggggcccgtgtccccacagagcctggcctggagccctggaaggaggccctggtgcggcccccaggcagctacagcagcagcagcaacagtggagactggggatgggacctggccagtgaccagtcctctccgtccaccccgtcacccccactgccccccgaggcagcccactttctgtttggggagcccaccctgagaaaaaggaaggtgagcttgggggcggcccccagggaggggcgggtgtggcggctgagcctgaccctggcccctgttgctgcagagcccggcccaggtcatgttccagtgtctgtggaagagctgcgggaaggtgctgagcacggcgtcggcgatgcagagacacatccgcctggtgcacctggggtgcggcggggcctggggtgcggcggggcctgcgggttggctggggttgtgaggcccggccaggccaccccttcagctcccactggctggctgtgtctcccgcaggaggcaggcagagcctgagcagagtgatggtgaggaggacttctactacacagagctggatgttggtgtggacacgctgaccgacgggctgtccagcctgactccagtgtcccccacggcctccatgccgcctgccttcccccgcctggagctgccagagctgctggagcccccagccctgcctagtcccctgcggccgcctgccccgcccctgcccccgccccctgtcctgagcaccgttgctaacccccagtcctgtcacagtgaccgtgtctaccaggtgggtgaggccacgggtggcagctggggcgggtctcagggctctctggaggggagtgaagccctggctgtgtctccctgtagggctgcctgacgcccgcccgcctggagccgcagcccacggaggtcggagcctgcccacccgccttgtcctccaggatcggagtcaccctgaggtgcgtgtgggctgagggcctgcggctggcaccaggtggggagggtcctggtctcacagcaccccatgtcctgtgcccccccgcacaggaagccccgcggcgacgcgaagaagtgccggaaggtgtatggcatggagcgccgggacctctggtgcacagcctgccgctggaagaaagcctgccagcggttcctggactaagtccggctcgttcaagaacataagctaccaccttctccctccccatcccctccaggcccggggctgaaacagcccgaggacagccccaggggctggccttcaccagctgcagggtctgcttttacttggggtgggggggcggggctgaccctgaaccctcccccccgccaggtcggggaggggtcccaccactcaaagtgcctctaaagaaaccagctttttgcactaaagccaaaccacaccgctgtccccttagccccaagggccctgggggcagccaccctcccgcctgtcggcccgtagatttatcaagggtgttatgggcccagctttggggggccagtcccgatgcactttgaggggtgttggagaggggactcccccactcgcacttaactcaacggctctcgggccctggggctgtttttaccatgtttgtttttgaagctcaggtgtctcacgtctgggctgcaccaggcgaagagagaaattaaagatttgaggtttttccagaagctttgtctgcctctcgggaggaaggccgtggggctgggaccctgtggtgggcaagtgggtggagtctggcagctgcccacagagggccgagggtcacccgtcggccgccgccaccccaggcgaggccggaggaaggatcatctgagacgcaggaggcatctgctggagcagcaatttcccaatttattgaaagtgatcgctttgcaaggatgtctaagctaatcccgtcacagaaaggaaacgcacaggcgcctaggcagaaacttggagactcaccgcagaggccacgtgaacccacggccacagagaggcaggacggcagagccatgatttcccaccgagcgattacgagaacctcttcccccaatagtagacacatctccaatacaaacacaggtttataataagtaataggaagtcaatataatatagattatccccagaaaaaaatcaacaatcttcaaacactgccctttttttgtgtgttttgtttttgttgacaggttgaaagcatgttgaaaaaaataaatatttaagaaaagcacacacagcaccctcactacaagtagttctaaaagggctgcatacaaaacacaatataagatctaaaaaaaaccaccaccattaagtatggctttcttaagagtcgcacatgtcacagaatgagctaaaataagattacttcttttataatattgcaaaaagttccagtttttgcattttctcagttttttaaagaggaagatgtgcaaagttggaagcagtaagctgcgtcttctgagtcagttccctacgtagccctggcagtgtcctgtgtcccaaagctcagagagccccagtgtacaacctggtcaggatccagagcttgacagaaaaatcgtggtgtccctgccccctccccgcccccaaataacaccatccccaatggactgtatttcccactttggtgttgtaaacaccaaaatacaaacagacacaaacaaaaatacaaaatgtgaaatgtaatctacacatttttcctcttcataaaaaaatatttattagtttgaacatcgatttaaaaaaaaatcagtcacataaaaaaaacccttcatgacatgtcttttccctccacgcctcctgagatggacgtgctcacctgggcctcggaaatcccacactcttcagtcggcaaactgcgaacaagaacaggaaatctgccacgcagcaaacacttggggaggtcagtgggacactgttggttttagggaagaaaatgcccctgtagctccggcggggaaccccaaaacggtcagcaaaggcaggccacacggagtgagccggccagatggagcaggacatcctgagtgtggagggggaggcgggcctgggtcctgggcagggtggcctgagagcagggactggtacaaaacccagagacattggtgggtagcaaaggtctggtttccaaatgcattttgtaagaaagtcagtctgtttagaaaaagggtttaaaaatcaggggaaaggtacaaagttctgagaattc

SEQ ID NO: 9873 - DNA, 13208 bp, Homo sapiens
ctgattttggtagcatcctttggtctcttctagtctgggagtcagagaaagtttgcatcaaaatgtcatcagggtaagtgcgagtgtgagtaaaggtagatgtttttagggcatctctggccggaggtaacattttaacatttcagagccaaatttttagttttggcaaaaacatgttttgcaactcaaaacttctcttcctgctttaccctgattagttgctagttgaaaacgctcggtatctcaactgtgtccttccctccctattgccaccccttctctccagctgctaacttgcgaactcagggctgtgcccagcgtagacgtttatagcagttgcagggaggtaggtgggaagaaaggagggaaagaagacagggaaggaaggtggaagggaagaaagaagaaattcattatctatccacttttagacttggagataacatttttctccaggacacggtgcaggcctgagcagttaggacagtcgggttcaaatcttaatcccccactgaaaacactgtgtgacgttggacaagtgacagaacctttctgagcctcagattttcctcatctctaaaggaagaatgtgagggattgatttcagtgaaatagctcccgtcaaatgctgctgctaccatgtttagcaaattgtttaacacataataagcattcaacctgagagttttattgttactttatttgggtactgagacctctgtttctggggtggcactgcctgacctggggtggagttacaccgtgtatcctaggtccaccaagtctgtggctttacatagctaagaggtttgaacaaccccagagcttctatcatacaggatttcatagagattcagataccagcaaagccgttggaagctgtgatggataagtttatgtgtcaatttggacaggctgcagtattcagtcatttaatcaaacaataatctaagtgttgctaaggaggtattttgtggatgttaacattgacaacctgttgactttaagtaaaggggattaccttggataatgtgggtgggcctcatccaatcagttgaaggccttgggaccaaaaacttggaggagaaattctgccttaagactgcagcctcagctcacacaggaatttccagcctgccagcctgccctatggattttagactttctagccctgagaattgcatgagctaattcctgaaagtaaataagctaataaatacttgtatattatgttattgtattattttatataatacaatatataaactatatcacacaattatgttgtgtgatatataaactatatcacaattatgttacctttgtaattgatatataaactatatcacacaattatgttacctttatataatataataattacatgctatttctaataaaatttctattacattatatattctatattatgttatgtgccaaattataaattataaatacatgtaaatttatgtataaatactaataataatttataatttgctatataacataatatggaatataatgtatatattccatattatgttatatattatattacatattatgttatagattatattccatattatgttatacagcaaattataaattattgttttttcttaatgatatgaaatatatatatataaatatatatataaatatatatatataaatatatatatataaatatatatatataaatatatatatataaatatatatatatataaatatatatatatatatatatatatatatatatatatatatataatctattcttggttctctttctccggagaaccctgactgatacagaagcttctagcttaagtgtgtatatggtatagacaaattttagcaggactctttcttcagctcttctgtaataggaatccagacttgaattcttaatgaaaaccaaaaagaggacaaaggcaggagcttctggctaggtggggaccaatgtggggatggatttcctaatcctaacctgaaaagggaatttcagggtagaatggatgacatcccaaaccccagaccagtgtttagtccctgaaaggctccgtggagaagtaaacaacttgggtggagtgcacagttttgtctgttccgttgcagagctttcctgggccttttccccaagctgggttgtggtggtttaaaattagttcttgtttggcctgcgagggaggagggaatttgcggagtctgggctggactcagccttttgctgtggaggttctgagggctgtgtctgtgacttgtgcacattgaaagtggagagacttgggctcaagacctccacgtgaccaaacctctgtccttgtcgtcagagctgtccagaaacctaaatggaactgaagtccaccaccctggtctgatctgggagacacctctcctgtcccaaatagagctctctacctacctccctctctgagatacctgcgatctgcaggaggaattactccttttgggcatgacctgtaagcaactgctccattgcaagtctcgttcccaaaccattactgcccatgagcacagtgacatttaatttcatctttaggattcatttccatcatttcaagcagggtcatcttggaacaggacacaggataggtaagctttggtggggatgggaggaggaaggttgcaatgctagttgcctatttaggaaagaagccctagctcactgggatgaaaacattgggggctggcgagcggatgatgctgattgttctatcaggggataaaagagcagaaaaacagacattcattctctttacaagtgtgttttcagctggcatgacacctcctttgactctggagttgttttccctgaatatctttgctttccccttttcggacattgattccaatgtcagcgtaaagctaaacatggctgactacacatctggcctggtccttgtgaaaatatctaagctattactgaattcagagctattgctgattggtttcttaagtggacttgaaatgtatagctttattcaaataatcatatcaacaagccatattgctaacaggtcagcatgggtagttgatgactaataccacacacacacacacacacacacacacacacacacagatacatatgtgcacacacaccacttcacttcattgtgagctgaatttagttataatcattccagtctcagtaatgtttgatttatttgttttattttgtctgataaaaacagaagtgatgaaagatgatcagctttagttgttaatacttattgatacatatttagatctttgattggcagttcagtcttatgaccactaaaaaagagagacccttggaggaaagattaactttataagaatgttaggattttaatagcttagataaagttttttaaaagttggaaactagaaaatttgctttgaatttaatttgtaaaaaggacttccagacctctgtcatatagacagtagatttctgttccaattgcagataactatgtaatctgttattcagttaagaatgtttatatagtttgtgtttaaatagacatatttaagcaatgaagaaagtattgtaactaggcaactattgattatctacccagtgtgtccattcctgctactcccttcctagcagaaccttgattaggtcgaggtttaaacagcaatgtgtcaaggcaggtggaccaggaggatcctaagggagggaacttgattgatctgggccaatcgtaacactcttgaacatcccttggtcagcaattggcttagaggtgggcatcctaaacttggcatatgagaaagacagtaggaatttgctgggcgctcttgggaaatattgcataaaacaattcatcaaaattggcctttcctttttgccttgacttgccatgtaagaagtaatgcctaatgctgcgacagacaaattgcaaccatcagggaaagccaggagactctgagagagaccaattattgagctgatgaatgaacccttcctgaagccacctacttcctcacttattggtgtgtccttactgtgtaaaccccttttaactgggtgttttgtttcttgcagccaaaaacaatccattgatacacttggtgacattaattgagaaaaaaacaatatgggtaagatttagtcttcatatttgttttttgtccttagtaaggcataatgtaattaaccaaaaaagaattgattatactttttgtaactcttgtagccattgtcaaaagataaagtgatttggaaaacatgcacatatgcatgtacacacacacacacacacacacacacacacacacacacacactctcttcaatccattcttgaggttgatatattagtttccaggcatttgttcagtatttctatatctaaaaatttgtggaaggatccgagagatccagattcagtttttatagctgtttgcaagtatgctaagttggcaatgcatagatgtgtagagaaggagagtaagagacacagggagcaacgtgagtgaataatctcaagggatgaacagttcccagctttgctgggacttctttagccatatcacatcacatgcttagaagtcaagtttgctaggtgtgttttacagatagaaaagtcaaggtgcagataagtcaggacctgcacatagaaattcagtgatctgagttcccagtgcccccaaaggattttcattactgcatattacctctgttttatttcctcttatgaaaatgcacacaagctcaaccctctgaggacctgttgcctttttgtgaacttgagtagaacagagatcaagccactttgctgtggctgttagactggaaactcagagttggtcatgagaaaaatggttttcatttccgtgaacccagccatctgaactggtcaggctctaataaccaagtttagggaagctcatttggaagaaatgaatttgcttttggtattttggaaaggtctcagggccttgccaacatcagctgctgatggagttcctgactgtgtgtgacaggtctcagcgccctgcttccaggttgctcgaggtacccactccctggtaatcacctctgattttaaacttcctaacagtctggccatggaggcatggtatccgtaacatcccccaaaggagctaaagaagaaatccacaatttaccatgagcatttctcgtctgaagattgccaagcgattcctccaggacattcctcaaggtgtgtatgaaaaatagtgtccaccagggactgacgtggttcaggtaccattgctgctttggggtggaacatttctgtaaagtgagaacaacatagggttaggagctacgtgaacaaaccccctattgactaggaacaagacataaaaactttctggtagacgcagatctagtggggaggacatggcagagtcaacgccctccaattttctatggattacatcccatctccctctcagtgacatggctgcagttgtgcttggcccatgagggtgctgttctcctttccttatggaaattggagaatgtgggaagaggagactttgtttttctttttaagtgttctctttttaaagaaaaacaattggactatattttttagagcagttttaggttcacagcaaaattgagcaaaaggtaaagagagtgattttactttttgtaactcttgtagccccctgcccccacacacatgcacagcctcctccactattaacacgccccatagagtggtacattccttacaaccaatgggcctgcactgacacatcattatcacccagagcccatagtttccattagggttcactctgggtgttgtatattctatgggtttggaccaatgtataatgacatgcatccactattataataccatacagagtgctttcactgccctaaaaatccccttgcttcacctatccatgcctcccttctcccaccttctggcaaccactcacctatttactatctccaatgttttgctttcttttcagaatgtcatatagttggactcatatagcatatagcatttcagattgttttctttcacttagcaataagcatttaagtttaagagactttttattttgttctgtaagatagcctaacatttttcaaaagtaggactgttttttaaacagatttttatcagaaggaagaaataatatgtggacactgtgaaatggctgtgtttataaaaaataagttttagacaacgaaaatatacctatagaattgctgatattaccaacgaacttttgtcttcatctctctggcttcctgtctctgtgccatctggtctcttagactgtttcactccttataaactgattggcctgaccttcctgctcttgttgaagttacattcaattgatattttcttattttaaataagcatattccttagggtctattctatgaggaccaggattgtgatttagaggaaaaatcttgttctctgtgtatttatgcagtgctatataattgatataccttgtacccaacaaaggcacagtgtcttcctatttttgcttctcccttgcactgctatctgaataattcttcagacaaatctgccccttcattctgggggcttttcatttagagactacaggaatttggtaattgctgcaatgtagaaaggtatcaccttccaaaatattggaaggtatcctgatatttcatgttctacctaataacacctttcaggactcatgttcttaggcaaatgctttggggaatgtggcagtgatgtatgtgctggggaaacacagaggcaagcatggatgaaaatcactgtggaatattgaagaaggcttccaagaggaggtgacatttgagcttgatcgtgaacacgaagtaaggacagaactaggagctcaactagaggaagaggcaaatggtatactagtgtagactgtgttaatgtgtagacaactgaaagaagtggcatatttgggaagctttaggatgtccatggtgaaaagtacctacgaacaagaggtgagagagatggagggaagaggggcagaggatgaaatttcatcaacattgcattgtatttcttccatttgtcctttcagatcaatttctgttcatccaccttgtcctgggagggacatcaatgggtttccatgtcctttggcttctggttgagttcactcagtggagaaccctggcaagaggcaggaaaaggggaggaaggtaagatcagggtattttctccagtggcttcctacatgagaagtcattttgggttggctgtttcccccaagtgaagatcattgactctctaaagctggccaactcaacttgtccttttactaattggatcaagtaattgctacctctgtttgtccttttgagtctaaaaatggcaagccccaggttactgcattgtcttttgtgatttccctataccacacctctgtaaataaacctttcttaaatcatccctttttgaatgtgccatctgcttcctgttgtggctctgagctatataaatatgatgtgaaaaacctaggacacaacgtagatcaaagagtgcctggaagaatcttttttcccccttattttattttattcttcccatatttaccagtgagatatctttatattacccctgagatctgaaaccgtaaaacataaaacatagaagtgttttttttaaacattttattttattttttatttatttaatttttacattttattttattttaggctttatgatacatgtgttgaatgtgcaggttcgttacataggtaaatgtgtggcatggtggtttgctgcacctatcaacccatcacctaggtattaagccctgcatgcattagctattagtcctgatgctctccctcccccgcaccccctagcaggtccctggtgtatgttgttccactccctgtgttcatgtattctcattgttcaactcccacttatgagtgagaacatgcagtgtttgattttctgttcctgtgtcagtttactgaggatactggcttccagcgtcatccacgtctcagtataggacatcatctcattcctttttatggctgcatagtattccatggtgtatatgtatcacatttttctttatccagtctaccattgtgggcatttgggttcattccaagtctttaataagggtttggtcttacctgatttatgttagaaggaaaccatttgtttggaatgaatagagtaaatcttttgggaaaatagaaaaaaagattattttaaaatcatgtgaatatttaggtctaagagttgtccatgaatccttagctcagtgttcatagatccctacaaacaagatctatgaatagaattcttggaatccttaagttaggataggaaaaaattacatctttattttttctaacctctatttgaaatgtagtatttctttccatcacaagtgtatgtgacaagacacaatagtgttggtcattactaaggctttatcaccgacaaaaatcataggtatttttatatcacactgcagtgttgtaaaaatctcaagatatcatctatactcttcactgcttcgaaattatggtagttggtagacccaccttcaggtcttgttattggcggcattaataaggaagtgtatatgttatgtttcacaattttattttctaaatactttcagattgcaactgcatttccatataatttattttataattcgttgtgtttcaagttatgcatttacacatgtaattctaaaaagaagtccatagacttgaccacatttccaaaagagttcacagtaaacaaattattaaaaatctctgttaattcatagatactcattccagaaaatacagcaatggctgcatatcaggaatatctttttccagaaaaaaaaatatccgaagttactagatattctgtagtttctgtatgtggagtttctggggtaaatcctttgagttcaatatgttgactatgtgctatgtcatctcaaatatttgaccttattctgtttttcttctctgggtcattgtatgttttgtaactagatttcctatttggtatttgtctcccaaattttaagagcaaaacttgtcatctatcgccttattttaattctcactatgtaaacttgtaagaactaactcacaacttggtgtctcataactcacttctgaaatatccaataaaaaactgccaagttattcaccattgtttattttggtcctagtacactgtccatgccctggttgaatatctcgccaaatttcctccaatttattgcaaaaccaattggcagaacaatgaggaaacctgtctggggccaatttcagcaattgatggtgccgccttctctccccacctccactttccactaatccatcaagtttcttccagatctagccattcttaatgggaatataacaccttggcatagctccaaacatgaacaaaaaatattcttcctgtccttactccgctgtttccctcccctctgcttctcatccttttctcaaaactgacaccctccaagtacttcttctcccagcagagaggatggcctacctggcattgcaacatttgagaatgaaccttattttgaaaataggtgatcatgctcttatcaatacaggaaatgggagatttaaagctcttcccatcaaggtgtgaaccttccacaaagcagcagctctgaaatatttcctgtgtggttggcataggtgaaagaactgttttgcagagcctattgagatcaaaactagggagtgtctttgcagcctgttgttagtcaaagtagttatgtattgctgatggtgcttttctaacatagaccttaaagctcttttatgtgggctgtctttttgctgcatttttaagacagagcaagaagctgagattatctgctcccactgtggtttcaagactagaaactcaaggaggttgtaggcttgtccaaataactttggacaagtatactttgatacttgttcaatgtatacttgatactagtatttcactagtatcaaaaccatagtgaaatacgtgaattaaactctgctgccattttgttttttgtttttttattattattttttaattatactttaagttctagggtacatgtgcacaacgtgcagatttgttacatatgtataaatgtgccatgttggtgtgctgcacccattaactcgtcatttacattaggtatatctcctaatgctacccctcccccctccccccaccccacgacaagccccagtgtgtgatgttccccttcctgtgtccaagtgttctcattgttcaattcctacctatgaatgataacatgtggtgtttggttttttatccttgtgatagtttgctgagaatgatggtttccagcttcatccatgtccctacaaaggacatgaactcatcctttttatggctgcatagtattccatggtgtgtatgtgccacattttcttaatccagtctatgattgatggacatctgggttggttcgaagtctttgctattgtgaatagtgctgcaataaacatacatgtgcatatgtctttatagcagcatgatttataatcctatgggtatatacccggtaatgggatggctgggtcaaatggtatttctagttctagatccttgaggaatcgccacactgtcttccacaatggttgaactcgtttacagtcccaccaacagtgtaaaagtgttcctatttctgcacatcctctccagcacctgttgtttcctaagcattatgttgagttgattttcagatttctcccttaggtaacaaccagaaagaattttgggatattgtgttagttaaggtgcatgcaggaatacagaaagcacattaggtgtttcaacagaggggatttaatttaggaagttggttatatatatttcagcctttttggaaggctgaagtaatgaaatgggaacaatgagataacatagagatagtaacttcaggaagaagctacccctaccagggctggggaataagggaaaagattaggtctattgcaacctaaaggatcagaggaagggtcttgaggagttgaagcccagcctctgagggggaggccctatatggctgctgatggcatcccaggagattgaaggaggaatcttatagagctggaattcaaatatctaaggaaggagcaatactgacttcctagagcttgtacctctgagaaagcactttgaggctgactctaggagatgggggctgtatccaactgctgctgtagggatgaagtattgctgctaggtagcactggcgggagcagcaagtaaaaaaaaagtggggaaatgcattctgccttctcctgattccaatctccctttactgccccctattgccagaatctatctattaggagcaactagcaaaggaaaaacatgatttacagagactcttttagcgtcccagagcagggtattggaggtttgggagctgggagacagtagcttactacatcacacaggtatgtaggacatttttggattaccagaggatgtaccagtcacccataaggatgtttggtatcaggaagaggatgatttaatatgaagtctacaggtcatatatgtatgcctagagctggcaggtgagtcactgggacttgagatcctaggccttctctcgtttgcatagtcatcttgcttggggcagagagagtggggttggtgtgggaagaagattgcagcatgcagggttgtgggtggtgatcccagtgtcccttgtccagccatgcaggtactagaagcttcagagcagttgggctgaggctacggtcagggattaggtggggaggtacctggcagaatatctgaaggaccacaccagcattttcttgtagagcagtcaatgtattggtttagacaaacatttgcacccacttaaggccccagtttctggaattataaggagtggaaagaatcttgattataaaaatctacagattaatgtgctcatcgaataattatagaacatctagtatatactacccattgtgctgggaccagggaatgtgaagatgaatcaggtaaagatgaatctgccttcagaggagctcaaacattaacagaaaattatagtcactttatttctggcagaatgggaacagagttgagggagaggcaacttactagggcacattagggacagcttcacccaggagcatgaactgagtcctgctatcaggagggatgttcagtagatggcaagggtcgggggacaaagggccatggaatgatgaagcaacgtgaacacagcccagaggtgtagcatagattggtgcctttgagaaagtgggagggacagcaggtagaaggtcagggtctccactgaggcagcagcttcacctgccttctctttccaaacattctatcagcagcctgaccggtttgaatttcaccttctgttcaccttggatgagagcagtaatcatcacgatcccagggaacagccaaaggaagagaaaaggcaaaagatttggacaagactcatgaagactaacagctcttggataattgagagaaggcagctgcgtgaacagttttgatgcaatcatgaaggcagggcccagtgcctgtggcatctgcctttttctggaaccaatccatatttccttgtggttttctaaggtgcagagagggcacattgggaactttgcttggggtctttttcacatcttagagggaaggtccctcaacatctgcattggcggagtgtgatcctcatgtccctctgaatgatctggacttgaggtaaccagccccttccaggaagctgtcccatgagtgaagcctcagcagcagcctctgtcagtccctcccccacagaacctttggcttccatttgaccagccttgacatccagtgtccaaacaccgataaaattgattccactaagcgtgggaaagtcctggagcatcgattgtttcctcctctgcacccccgataccctggcattagcactctcccagaatgtaccttgcttgtttgattggaggaggtcaaagccctgatgaagaatgagtggaattccacaggattggagcagtcttgataaatgacagcaggggatggtgtggggaggggaaaggatcagaggaagtgtggataaatgaatggcttaaaaaataatccacctttgcctcccccttttctaccagtctgtctagtgcttcagggtgaaaaaaaaaaaaaaaag

SEQ ID NO: 9874 - DNA, 4339 bp, Homo sapiens
agataacttcccatactataggcagttggacaaagatgtaaatgccttgtttacaaatgctacccagatctcctaattaggaccacacatgcggagaacccaacagcttttggacttatcggccaatggtcttcttgggaaggtctctcctagtcatgggaattgtctttttattgttcaagcttttgcatagacctggaagaggcatccattgctgttacccctgagtttataatcatgctgcaagtccagtggggaactttggcacaaagcattgaatgagatgggactgcacttatgtagcctgcatttcttgagaataaagatttctgttcatttagtgcagtggttatcatctgggggaaaaccagtgagtagaggccagggatgccactaaaatccctacactgtgcaggaaagctgtcagccctttgtcccacaagagattaactggttccaaaagtcagtagtgctgtggttgagaaaccctgtttaccacctgtaggttccagagagctcggatggtggtggtcattgtgctaagtttcaaattcagtatttaggtttggtttttagcttataggcaacaaattggctgactatggggtgaaaaggaagcacctcctttatcaagattggcttcaaaagatgtctgcctccccttctggtgggtcctgtgtccattcacagtgtgagaaatggaaaggaggtcactaagagacttgcaatggatgtaataactggatgcagaaactctggatctgaagggaatgttcatgactatttcatccctcctgctgccttggagaaccaaacgcaggagccacccaaggtgagactggggattatgcagttttcaacgttgcttcccatggactacttctccttccatcatttgcagattttttggtgtcttttttcttctggagactctccccttttctctgagcagtgttctggctatttcagatctctgcatctatggaggaacacatgctagtttgttgttgtgtggccaaatgccagcaagtcattgcattgtgttaccactagcaactctattagcctttttaagtgaggttcttgaaaaaaaataatgcgtagctcaattttccaatggtgaaaccgtaggtatcataatactttaaggaagaaaacacttttggttgcaggtctcttttactgcttttcaaatggttgtgtgtaagcaatcatttactcttaatatctaccttatccatggtaatattccaagcaagatattgtatactcttccttggaaacacccttgagtatttaacaagatagagtcctctagataacatagccctacttgcctaaatctaaactcttgaatataatgaaaagtctcccatctggaccatcttggaatagtcatggtttatagctgttaaactccaaatcagttacgtctcttggcattaaatacgatttgccttccagtttgtctcattagcacttttcagccctctctgacttagagtcccaggccgttgatgagggcacaggtgggccgtagggttaagcagaaggaaggaagccaccccctgcctgccatgctcagtgatggaccactgggtcctacccaatctattttcatctcccaaggccttttatgaccttgctttagagaaagaaaaccgcccttcaaaggcctcgctctgtcaatttcccccaccatatgttcttattaaaatgtttatgacactctttatcttaggcttattatcttaggattggtattgattaataaaacatgctacaaactaaaacttactatttagattttaaaaagtgggaataacaataacacatatatgattttaatcattttctaagcaaatgtttctagatgcaaagtagtctcaatagcaatggagaacactatcagggcatattattttcaaactagaaacacattgaatatatatttgtttgggtcatatgcctcatgatttttttttatgagactagataaagtatattgcaaggccgatagcagcagagcatttattgacatattttaggtgttttcctattgactgtagtttgtctttgtttgacaaatatagccctgtcaattcctttgatgatggtgttttcgcaaagtactgtatgttcagatattagcattaacagcatatggtaaataagctgtttatattaaagattttcattgtcttattataaaagtagttatgctcattgtaaaattttggaaagcatagaaaagagtaaggaagaaaataaatataattcatgatcccaccacccatttataaccgtaattttttaataaacatgtggatacattaagatacagctatactgcatacatacacacatataaacaagtaaaatatataattattttggtaactctattgcataaccaattttatatacttctactaccattttactatgaacattgcctatcaggacagaattctttataaacagttttaaaggctctgtggtaaaacattatgagggtgcagcataatgcttactcactcttagcagtatacaagaaggctgttttcaatttttcactatgattaacgatgccataataagcagcattgtctcaatctcatagattttgtgagaggtaaatgagatggttcatgtgaagttcctaatataatagtgatagatgttcaaaatgccttcctctccagctttcttcctctccctccacctatgtttctccttttctacctttaatgcatttttttttccttaaaaataagaccctagaattatagctacttggtgaacgtatatacacttttttttaaatttgtagtaatttttacttccccatcaaatgcagttatgtgcatctagttcttgattggcttgagatgccttgttaacctctgtcccagtctcaatcccatgttaaaatatagaaaggtgggaatgaaggtgtgctctgaagtcagttatcacgggtaggagggtctgtgagtacatttccaagtccttgctgtcttccagtcttatctagctgaaaccatcagcccatttggttcctgggcgtacccagatagaatggtgatgctttaagagttccatctgcactaggcatctagaatttgatttgttgtggaaggtaagatccaaacaccttcttgtccacaaaacccattgaattgtgccatatttattccattcataagattggatcctttctcccatttctgatttatatatactttacctccttcttgcaattgtaatcctgtcctacacactagtctgtttggctgggcttcaagcttctgtctggttcctgccgactccttacccctggggaaatgcagtctgtttccaactggacaggccatgtggaagcatattgctaccactctgccaggtgtacttagaagtttttgctctcctctttcaccttcaagaactaactaatttctttgagcacttatagaattccagatcaaggctaaatttcccattcctcttaggtgtgtagaccatctctcttctcaaagcactgaccctggggctgatcagacaatcagttttgagctcatccgtcccagaatccttccttcttcatggcattggcaaatgccaccaacttctcagcctgctcagggtcaagccagctcatgaaaggacaccctctggtgtgctttctggctgtttcaggaccacaagaagaagcagcagctcgcaagaaacatgttgctaaatagacctggcttctatgggaatcccggagttaagcattcccacccctttgggccacctttcacatttgattgattttttttcgattggttgtttgcctgacctgatcagagagtttggacaggagtttctgttgacactttatttcactttgggtaaagtttaaacatgacttatcacaaccctgacacatctggaaggccatattttgcccccctcctgttgtctacctctttcaatgatgagaatatagggcataaaggccttttttgtacacgaggagaaagttcattgccttgggtccttttagaggtaagtcttaggccgtctaggttataatcactgctagatgatccttctcttttttcccattgttaaaaaccttcatacttactttatttcccacaggtgaaaaccatccatttcttggagaagtgccacggtggggttgcaagtcccaggatcaagttttcgatgtgtctctttttcccgtaaagtggctgaaatctgaagctgaatctgcaagtgtcatggagtcattgaatctcacagtctcaactgataaaagttattaaaggtcgtctggttcagccttcta

SEQ ID NO: 9875 - DNA, 20845 bp, Homo sapiens
agcgtcaggtgcagaatggcccctctcctgatgagatggacatccagagaaggtaacccagcacccgcaggggccaggctggtcatctcccaatcaggctgggtggccaggggtgccttcagcgggtgaggatgcaccagcagccaaggccaggactcctagaggcatacactgcgggagggtgcaaggtgcaagccagaccaggaagaaagagggggccgatgcgcagccgctggtcccggacaccaagaccaggaatgactgtgggagtctggcattctacagagagtgctgctgacctccagcgggacggctctcagggtgacccagcagggcccaagtgctgctcccttgttgcctcacttgcccttccccaacgtagcaggaggcagtccaggcatgagggattcagcctgttggggcagtcacgcccatgggatggggctagggaccataggaatgaaccccctcaccccatggagcttctaaagtgttaccacagtggggaagaggaagggccaaggctgttgtcccgaaattacagagtcgtggtgagtccccatggagcagcctcccaaggtcacattgctctgaaatggcagagtcaggacttgaacccaggtctgccctctcagcgatgggtcctctgcctcttctgtgtcgagggaggtagggcctggcccgggccttcctcactcagctttgtcagatagggagtcaagctgcagctctctgtggctacacttatgtccagccctggactaggagtcaggaaagccggcttctgcccccacctacccctctcaccaaatggcatacggacttctcccaagacctcctctcctctggccttttcctaagactgagaaatgaatgccttgcaaccttgggcaagttcctgctccaagcctccgtttcccggtttgaagatggtgttggctttgctccccacctgtctcacccactcaccctcagggcttttcttactgttgtccccatgagccagctgaagccgagaatggaagtgacttgcccagagtaaccagagagtcaggcagaacctagactggcagtcaagtctcactccagctgcagctccctgccgggacccaaggctggtcccacccacaaaagggcgtgaaggagtgagccaccagacgccaggtgtaagcgtacaggcgtggatggctaaatgggtacttcatttctctcgaaactgcttcatcacccgcagtgctgaattctgtaccccagggcccaatccaagctgtgtggggtcactggccgtccgggaatgggcataccgcctggcggtcggggtgtgaacagcaggggacacacacacaagcacatacacttgtcccaaggcaggaccacacacatagctgcccccagacgagaccacgtacggacggacacacacacctgctgcaagacgagaccacacacatgcgcacacacacacacctgccccaagatgagaccacatgtggatagacacacacacacacacctgctccacggtgggaccacacacagacacagacacacacacctgccccaaggcgggaccacacacacacacacacacacacacacacctgccccaaggcaggaatacacacacacacacacacacacacacctgccccaagacgggatcacacacacagacacacacacacctgccccaaggcaggaatacacacacacacacacacacacacacacacacacacacacggcagggagactctcgcttgtcccacgcaactttactggaggtgggcaggggcaagacttactcagtgacgcagagactccaagcatccaaacagtaccataggttcagacctgacttgagtatttttcacacatcctcattttaccatggtgttctaggtgtgtggctcctgctggggaggtttcagcagtttgagcagagacactaatgtagatgctgctgggagcttttcagaccttaatgctaaaaggggcttttccgtaatttttttttttttttgagatggagtcttgctctgtcacccgggctggagtgtagtgacgcaatcttggctaactgcaacctccacttcctgggttcaagagattcttctgcctcagccccttgagtagctgggattacaggcgcgcgccaccacacccagctcatttttgtatttttagtagagatggggtttcaccatgttggtcaggctggtctcaaactcctggcctcgtcatccgcccgcctcaccctcccaaagtgctgtgattacaggcgtgagccaccacgcccagccattccataatgttttagttaaggcatacaccctacaagaaccccatgaaatagatgtttctggcactcccaccaagcccagagctgccttcagaacaatccttagccctgtgtttccacagcacatgttcagtttgcaccacacgagctgagctcttgatgctgtctgtggcctggatgatttcttaaagtgcctcccactccagaactcgatccctggattctggagatgtatctgggcctcagtgtcctcactcagcttgcctttaagagcaccctgaggccaccctgccataaggcactgggatgtgagttcccactgctgtgcacgtagcagtgtgccacggtgcaccaaatggccctctagacgaaggcgggcctatgaccgctcagtggtaaagaaaatgaggagtgtggcctttgtgtccatttctgctggcaaccaaaacacacctgagaactgtcccaggaagcttggccaggtccactaagaacaggcgttcctgaggctgggtctgttgaggccacaggctcccaaaagccaggtgcgcccatctagcccagggaagagcttggtcactctggggagtggaatcacactggccttccataaggagctctgtgttcagtgtgcctgagactcaggagacagccggtgctcccacttgcgggagctggacccagtcacatccccctcctctgttaagtggaggcagccgtggcacacagtggcgcttgtggagcgctggcgaaacctgactctgaagccggggccggcgggtacagcacaggcacagagtgtggtggtctccagagtggaggagtcagactgccctgctgtgattactttccagacaagtgatggagcagcaccagcagcagcgtcaggaatctctagaaagaagaacctcggccacaggtgagagccctcctcccctagggccgactcccatgctgctgccaggtggcagcccctccacgtagatgaggcccagggacacacggggcgctctgtgagcagctatggggagcctaggtctcaaagtgcaaccaccacttcagatggtgagggtagcaagagagcagagcagaggcttggggagtctgctcagctgggtctggccactacctgccaaccttctccggagtggacattcagcaagcacctcctgtgtctcaggcaccgtgctaagggctggggacacaactatgactgcagatgcagttcctgccctcaggaagcccgctgtccactcaaggagacagtgaacccacccttgtcatgtcacgtagtgaacactgtggcaagtgacgtgcaggtgctgaaggcctaccttgggtcaggaagacttcccacaggaggcgctgccacgcgtctgtcttggacgttcggtggagcttagcacgttaaaggagaaggacgagggttttccagaaattgtcatgttcactgataggcaaaggactggataatttaccaagtgctttcatgtcctttgtcttgtttaattttctcaaacaccctatgaagtgagcaggtgactattatcctgttgactgatgagaaacccgagcccccactggttacaggaacgctctgctcgtgagatgctggctgaccccatcacccccacctagctgctgctggcctcctgctccccggccagtctgcatttctgatgcaggtctgacactgtcatcatgtcgtcccttccccatcactcttggaacagcctgtgcctgccctctctccctctagtgcctcgcaagcacttcccatccttttcctccttcctcacacttgcctccccccttcacctaactgaacccctgctctccggtcgtgtcccagctccacagtcacttccgtgaggacgtcatggaggacgtccgtcttccatgaacttctggccaggctggagcccctctttgtatgccaacatggcgccgtgtgcctgcccttggtaacacttgtcagcttgccacagtcctccatctgcgtttacctctgcgattcgttgactgttcctcataggctgtgagcaccctgagcagagagcttgtggctggttttcctcagcaccatacccagcacctagcacagtgcctggcacaaaacaggcttaggcagcactggcggaaggggctggatggatgatgctggagcccagcactcggcattgcgccctgacccatgcccccagtcggccctgggacccacaggacctgccacggcccccaacgacccaagtgtcagtcacagttggatcttggtgaccaacttctgcctagggggtgctaggtgcttagaaggagcagagaagagaagaggcacagactgtaaccagacagcttcctctccccctggaaaaacatgattggagcaagaggaaattgcctgggctcaaggaatgttaagcaaatagaggacacctgtgggtccagccaggccccggagtactgaggacaccagaatagggaataattgtgccagagccaagttcatcccgcggaggcttcctggatgaagcaggcctggagctgtttctcatccctttggggagcagcctgcccctgtccttcctccggggaacctgagctgagagcagcaggcttggcccccagctgggtgctggagctggctgagcctcactgttgtgtttcagggcccatcctcccaccaggacatccttcatctgcagccagcgcccccgtctcatgtagtgggcctccaccgccccccccacccccagtcccacctccacccactggggctaccccacctcccccacccccactgccagccggaggagcccaggggtccagccacgacgagagctccatgtcaggactggccgctgccatagctggggccaagctgagaagagtccaacgggtaagagctcctgtgtgcggggtgggaatgggaccgaggggacccttgtgccatctgcagagcgcttgtgttccttcccgcatctgcgagacacagcaaactgcttccctgcccaaagctagctggcccttggccacttgttctcaaacgagaaatcacatgggacagcactttgaaattatgaagttagcctttgagcctcacgttgaccttcacacgtggggcaagaactatgtccccctttagagatgaggaaattgaagcacaaagagcacgagtaatttgctcaagtcacaccgtttacaaattgcagattttggactcaagcctgggtctcctgaatctatgtccattgccctttccactgtaggaagctgtatgctggcaactaggtccacccggctgtttcttccctaacccttgctcatatgttctagaactgtgcttgtaagaatagctctaatacagacctttggcttacattgtgtttccttcccacaggatagtctcttctcccctccctccctccctccatgtgtcatggctggtcttggcaaagacactaaccatgagtctgcaggcctggggagtgtctgcgacttgtgtgacctgggctggtccttgtccctctctcgattctggttttctcccctgtggggttggagaataatggaccagatggcccctgaggccccttgcagtgctgctgccataggattcacacgcacacagtcccctgcatcccctcacatcgttgctgctcctgttctgccatcagcagcagaatctaaaacgcggcctcctttttcctcagccagaagacgcatctggaggctccagtcccagtgggacctcaaagtccgatgccaaccgggcaagcagcgggggtggcggaggaggcctcatggaggaaatgaacaaactgctggccaagaggtgggtctctacacctcccgagacttggtgtgcctagcaggaagctcctgcccccgcccccagcgctgcacagagaatcctctcttgaccccagaatctttgttccctgggtttagccaagcaggggaaactgttacttaagttttcccttcccaaggggttagtctgaagcgcaagcccacaggagtcctctaaactccagatccttcattttagctcagcaaatatttcctgaagcatctaccatgtaccagccctgtcctgagcagagataaatgtggagacaatttcagagataaatgcgggaaaaagaacagtccttgctcttaagatcctaacagaaataagatgtggccgcagtggtcgagtttgcagaggacactctggtgaatgtgtggtgaaggcaccccattctccagggttctttatggaggactcaggagaaggagttatgaagggtaggagcccagagggcattgccctgagcgacggagagagagtagttccatctacatcccggccgggctcttgggcctgagacctggccatgtgtgtctgctcgctgcagcgggtgtggctgcagcctgccattgtggctctccgctgttccccaaatgaaacccgagcagatggggagatcgtccaggtctttctcaaaagggatgcaaagcttggattttatttttaaatatgacttggcatcaggaatgtgctcaccttggactaccaatatcgtggctcacttaggcaccagagggcacgggagtaggcctcacctgccagaacagaggaagctgcagcgggggccctgctcccttggtaaccccacctccaccccctgccactttgtcgccttctcctggccctcccagctgccttccaattggctgacccaagtgagaactctgtgtgcccagggtcttcacactgcagtcctagttcctctcattaccttcccgtggctccatgaggatgatgcgagatgacagaggcccacagctgcaggcagctggtgtggcgcttcatggcagggccacagcctgggtttcctgccaaggggctctttgcttgcatcacagatggcagggaggggaggctccccgtgtgtcagggagcagcaaggtggatccgcagcacgggcgtctccggagcctctactgggcctgggcgtttgtacatcgccaagacaggaggcaggcttctgagcagtttcctgtgagagtaagtccaggtgtgtggggcttacagtggccacacaaaggcgaatggctccgtgggtgagagagccgggagggctcgcagaacgatgaggacgtcccgtgctgtaagagggacagtgggcagagttaaggtaaggctgggaaggctgacgccccctgtgcctggagagctaggtgtggaggaaatggaccaaaagtcaggctggaagagggagcctcctggtgcagggcatcgggttccacctcagagcactcagaggcgaggatgggccacagagaaatagaaatagttttggaaaagaaaatatgaatgctttccctaagtcctagaccaagctgaggggaagcacctttctgtctgagaacaggaaaaggccagtattgccaggagccagtgagatgccagatgccggtgggagagtcaaggccctcccaagaacaaacatgctttgcatagctcagcagggatcaatcaggtgctctctgaaatccacctcagtgatggctactgggtggagccgacgatgaaagtgcccttgccaggtttcttttcatgtaggttgtctcccgcctctgagggcatgcagttgagtctcccaacagtggagggcaggagggaaatgaacgtggacagaaagctcctgttcagcagcactttcacagacactcatcccgcctacactccccgtgagcaggtggcttggtcagcgttctgtttctaggagatgggacactggctgctggggggtagctggtgaggtgtaagtgatcgtggctaggccagttaggagactctgacagtccaggaagagatgataggggcatgcaggaaggtgttgaaggtgaagacaaaaaagacaggcaggtacccagatttagagaactgaccaggctgacagttataagaagctggtgtcagggatgattccctggtttctgggctgagggacgaggtgggcagacctgtcctgagatgggagctaaagaagggggcccctgctgtagctgaggaggctgccaggtaggcccatcacagacaggtgacagcctggccacggcccattatcacacctcagaccagctccatgcttgatgggcagctcatctcaagttgaaaagccacagaagcgtatctctgggaaacactgagggtctgcctgcctctgtagacctgggaggtcagcagataccactgaggccaaaaaatatgggtgaggttttagagtacatgaaacggggattcatactggggaggtgcacgaaccgactcaagggcgtcacgtggacctattccagggctcctcttctgagcatttccaggctctgagtggcattctagattggggagggcgtggctgggttaactgagttccaagacacaagggccttagagtgacacaagaaagtgtccagtgtcccgacctgtgggacagactgcagcccagagagatgcctctctgtcccgtgtggccaggccttcagtgtcctggggacagagcgtgcccgcctcccctccacgcctcagatgctacagctgctgccagtagagctaaacagacatagaggcatctcgccctctctgcctagaccagttttgtgtcccaggccatgaccacacggagggcctggacatttgcctgggcctggctcctcaccagacggggcctagacaagccgcctccttcacgccatcgttttcccacacaggtttatctgaggaccggggtgagtctggcagggtggaggcagaagagttctgggacagtgagagaacgtgaggagctgatctgtatcttccccttctctgtgcctaggagaaaagcagcctcccagtcagacaagccagccgagaagaaggaagatgaaagccaaatggtgagcaagcagcccgccccaccctcaggctccccactgagatgagcgcatcgccagggaggctctctggtctcaggcgaggcctttgggacatgcgtgggatgggcgcttcatcaggtgattcacaggaggggcggagggtctctgcggtgcttgtccctgcgccaccctggccccagcagcaggcctgccctcactgagcaccccctaccagacactgctccacccttggagctgcagcctgaggcgctggccgctgcaccgcagggctacctcgccttcccaggagccccggggagcacagaccagccagggtctcggcgggactgggactccaggagtacactgcagaggggcacgtctgccagaagcccagagaggtttttattttcaaattatttctgtttctaaagactcctcttccagcaggagcttcaggtgagctgtggcaaaggagccctggacccctggctcttgtccttaccaggcagcccagagccagcctggctgccagagctcccaacatctgcttccagttagggcggctaattctcttttcctccatgttaagcttttcctataaaaagactcctactgacagggctaagtttagccttaactacaaatgccttgaaggttccacctcagtgcagaatcagagaggaaataaaactgccagggaccagagcaggcttcctgccctgtcctcccatcagtcagggtcatgctggtgttaccctgaggctatagccctcccagctgatccacgcctctcagccccgtcctgggcacatatgggtccctttgccccaccagccaactcccattcagcctgcacttccctgcatcacccttacaccttaaaaaacagcctcccggccggctcaacacttcacacttgtagtcccagcactttgggaggccgaggcagacggatcacctgaggtcaggagtttgagaccagcctggccaacatagtgaaacgtcatctctactaaaaatacaaaattagcggggcatggtggcgcatgcctgtaatcccagctactcgggaggctgaggcaggagaattgcttgaacctgggaggcggaggttgtagtgagcagagatcgcaccattgcactccagcctgggcaacaagaacgagactccgtctcaaaaacaaaacaaacaacaacaacaaaaaaacagcctcccgacccccaggcctcacaaagctcctcactacttgatcccagccccggtcttctcccgaggccctctgcacaggcacgactgcttgtggagactcgttgtctcctgccagatcttaggcccttggagggcgaggcctgggcttctcacacgtccaccattcccataccttgcacatgctgtggagtttagccaactgacttgccatgaatttctgaaattgcaggccacgggataatcacagacatcaaaatactgtggcctcgctccagccacagccctggggatctgaagacatcgctggcctttcttagtcaggtgccagtatgttgcagtcccagcccctgaaaactaaaactctcgctcctggagctctaagaagaatggatttcaaagcccaggggcttctggaagaggaacattcttgaaaccttcaaccccaaggatagcactctcctcctcagacccccatcttttctgtcttgtttttcacaggcccctggctacagctggttcttgtttgccatggtcccttctcatacccaggactagcgtctaaagagagcagggccttcagaagatccacacaccacacaagtgcagtgggagggagagaggctgatggccggcactcgttttcttgttcatgcttcctggtatttccccaattctctgcagtgaacatgcactaagtttatcattaacagagaagaaagaaggcttatttgaaagacgaaaagagccccaaatgtggagtccggtgacttgggcaggccctctgccatggcagagctggccctgggccaatggagttactgctccgaggaccagttccaccacctgaaaacctgcacccaggcatggccgcctcacagactgtgcgactgccagaggtggggtgcaagtctctgtgcccagggcctgggagtgctgcggccacctctttcccagcctagagtcaaagcataacttcccttttaagcagggagggttttaaaaaaataacatacaagaaaagatgataattttttagtgactctgatgtcaccctgtatcgctttcatcgtggcccccacatgtgtgtgttgattgacataatctgttattcagctgtctttaaaatgaggaggcctgagaacctcatcccagcacctgcaggctggcacctgcttttgcctctcgaccagagcctcccgggacttactcgttcaccacacagatacgcagggcgttcctgattctcgtgtggggatgtagtgagcagaggagacaaagcaaagacctctgcccacggtgacaagggagaggttctttgcttcagatcagaatgacacatcaggttgggtggccgcctgtcaacagctcaaatgctgtgcattctgcttcatcaagtggaaggattactcttattacttaatcagtggcatgttcctgatgctgaaaaaccatcctgacgcacatgccatgcatgatgagtgttaggtgtccccactgctggatgaacacgtccactgttcgagcactgccacagacctattacacgggcaggtgtgtgtgctgcacagggggagcaggccagtccacggggtgctcatgagaagtcagtgagatgacatacgggaggcatccggcccaaggggggctcagggcttgcgggtgttgagggccagaaggaagttctatatcaccctgctgagagcctgtagctccctgtagccttccccttccccagctttgtccactggctcgattctctccccactgagattttgcgttttcacttttaaatatttaatgttttgctaattataaaagtcatatgtgttcattgggaacatttggaaaactgaggttttatgaagtgtccaatgatgtcctgccctggccccaggtggccttcctaaacagactcccttcttctccattttaggaagatcctagtacctccccctctccggggacccgagcagccagccagccacctaactcctcaggtgagagggcgccccccgctgaccccagtgaggcatgaggtctcagagtgggaggggggacccttcggacaggaccctctgatccagcctctttagtatgcctgagcagagggccaggccacagggaagcccatttcttatgggtcccccagagcctcccccaggagcccatgtgggagcacaggaagtgctagagcagagccactgtgatgggtccccagggtgacctgcgtgtcaccttcccaccaggaccctgagtcccgcacgagagaaggcacttgcctgacggcacatattcagggtgggagtttgtgtccagggctcctgaggcaggctggggccagtgctcttaagaggtatcagtgtcaggactcatgtctcccagtgaaacgccagctgatgaccgacattacagagatggcagtagatctcgctccacccaaaacgcagccccttccctggctcaggtttctctctgtctaagctgtggcagatgggaggtagttaggagagtatgatgaggcttcgcaggggaggaagaccccagggttggttgttcattcgacaaacatctttgcagcacctgctctgtgccaggcctgtgctcatgagcacagcgaggagagacaggggcatcaggctgccctagctgggcagaggaggctcttgccagctgttcgcgtgtgtctctggggcatgctcaggttgggtgtcgcctccctgtgaaactgcacgccatgtcctctcctcctaagatttttgcctggtgtcttgatttgccaggatgcataggttcctggctgatgaacgtgatcaatacccctgccctgtttgcttcttccaacagcccagtgagtgggctacgtggttcccatctgtgtgcaaagtggtttgctcaaggccacacacctgggacatgtctgtagccccaggtctagtgcctgcaggcccagcgcctgtcccagaaggtggctttgaggaaaactgcctcaatcccaccgttggtccgcagggtgccaaggcttagctctgggccaggcagctgccccactaccccctagagattttgtcttctgcctctgcttgtcctgcacagtcaacgaattcaagttaatgcaacaaatcttttggagtagaacaaaatataatccaataccacttaaaaaagacaagccagccagaatgggacagagccaggcgcagcatgggaggcagactaaggagcccctcagtagcaggtgccgggccgaggggcctggccgccacaccacacgtgggagcaaggctgtgctgggatgtccggggaggtcgtgcttgctcgccctgtggctctagtcactgggtcccttaccagcaggctcacattccagagagacctggcacagtgaagggctcagaaccagatcacaggtcagggtcaacctgacctaggccatgggggactgagaacaaggtgccaggttttggcttaactcaatcagaccttcctgccacggggctctgcacccttggcatgggtgagggcttcctgttggggtgtttaggggattggggtggctactgagtcccttcacctgtgaggttcttcatccatgaaatgaactgacagaggctggccggaagccctgggagcggagcaactcggtggagaagcctgtgtcctcgattctgtccaggtgagctgccccaggaaggcctgagcagcgaggctggtggggcagaggcgggcgctggcgccgattcacatgtctgtttcattccattgccgtagaaccccgtctgtggcaaagagccccgaagctaagagcccccttcagtcgcagcctcactctaggtaccgaacaaccctcctgctcacatgtcccccagggtttggggctcctctgtcccccgtcccgtgactaacacccttgcacgctgtctcacgtcctggcatttaacaacttgctctgcgaaggtggtctgttctttcagacccaggacctcggggtcctgtcagtcagctgctccgtcttttccctctgagagagagaccaagggcaaggagggcagtgacctgtccacagaggtagtgcaggggggggccaacatggagtcccagctctggactcactacgtgtgacagtgggcaagttaggggacctctccaagcctctgttttccccccacaaagtgaggtctgttaacccctgctgcacagggtggtggtggggacagctgtgagcaacagctggacatggggtgtggtcactagccagggctgcaccctacagttcaaccagtcctagcactggcgctgagccctacccctttcctccagcccagagtccttcctctgcggccggcacacagaatcagtttccccacagacatactgaccatatttcccaagccaaaagctggcatgacaacatgatagaatatttggaactgagattgcccaaaaaggcagaggcagccagccacatagtatctggaggtacatgtggcctgaattggaaggcctctagaacctgcgtcaagaatgtctccatcgccaccacaaattgaagggaaaccacccttatcacagagcaggaggcattgaaactggccttgcagagctgaacaggtggtgagagcagagcagtgcaggtggacagagatgaggaagtcttagcagtcagctggggtttgtccaaggcttgtggtcagccaggccgtgtgctggggacagtccctgcctgcaaagagcaccgtgtgaacaaggccactgtggtcctgaggggtgctctggacagggtgcagggccacatggtggaagggacagggtgctttgcggagtggggtggggcaagcctctgtcgggagctggcattttcgttgacccggacgaggaggagtctgctctgcggagatcatggggacagcctcccaagctgaaggaagggtaagtgccagggccctgagcctgcagccacccgccaagctcccccgcacctccacctggaagcagacaggccatggggcaggggaacgggaagggtgaggaagagggtgtgggggagcgcggagttagaagtttgcattgtgttcatgcgcagggcccagtcatggaacttgaggcacagggtgccatggtggaggctgggaaggggaaggcaaccagagtgggcaaaacgagggccctggagcagacacggcagcaaggggagcctgcagcgctcccagcggactccgccacgtcctgctggtggagcaaaggcgggctgccatgttgtgagtggccaagggtcgctcactgggcaggaacattgtcaaggccattcatgcttggaatagggtctctcttcagctctgaggcaaatctgttctctaattttcagatgacttcaaggggaacgtgtaccaccacccctctggtgcgtcacattgcttaggaagcctgctgtgtttatcactgggtggctgtcagggctgagatggagagggccagggcctggcgaggtggagcagtcggcccaggtgtcccagcaattgttgctggaacagggtctggaacccacaggagaggcctgaaggacccagggccctctggctggatgcgtttgcctatcaggacccagaattacttacagacctgtttagggctaggcttggcctctttcttgagctcatctggaggggtgtggcaacactcattcttcatccttattctccctggctgtgggcaacactggtcctcagtgtcaccagatggtcctcctctgtgcccatgacccctcagcagccaaggctggccctgccagataaatgtgtgtgcccatgatcacacccaggggcacaggccacatacgtttccctgaaaccttgggctccagcctccatcccgtccatgtgggagggaacttgggtcccagcagtgtgtctttcagcaccaagtcatgtttaaaagaccagagagacaagcattttgccaagatcttccagggaagatgcatgtgtgacacattaacattcaaatcaggccagcgcggtgctcatgcctgtcatcccagcactttgggaggccgaggcgggaggatcacttgagcccaggacttggagaccagtctgggcaacacagtgagaccccatctctacaaaaagttaaaaaagaaaaaaaaaagggcacatgtctgtagtcccagctactcgggaggctcacttgagcctgggaggttgaggctgcagtgaggcatgatacgcctctgtactccagcctggttgacagagtgagaccctgtctcaaataagtaaaaataaaattcaaatcggttaccttagtttggaaacttttcaaagaagtagtccacgagaactaccttgaaagagcaaaaccagccaggtgcaggggctcacgcccataatcccagcactctgggaggcccaggtgggtggatctcgtgaggtcaggagttcaagaccagcttggccaacatggtgaaaccccatctctgctgaaaatacaaaagttagctgaaaatacaaaagtggcacatgcctgtaatgccagctactggggaggctgaggtaggagaattgcttgaacctgggaggcagaggttgcagtgagccaagattgcgccattgcactccaatctggggaacaagagcaaaactctgtctgaaaaaaaaaaagcgacaccacatgggaggatgtttcttgggggaggtgtgctatgcccgagcaggctccagcaccaggggcgctggtgtgtcaggagcgcgcctccaggccggtgtgaactctgcaacttcacattgtgcctcctgccgccgctgctgcttccccgagccccaagctcaacctggagcatgagctcccaccctgaggaggaggctgtcaatactgtgtttctttccagggaggcaacgggtgggtgcgatgttgtcacttaagttgccacctctgcataagagctctctgatcagaaagcagtttctttgttgaccccagccagccttggctctcgggttgggaaatacagtcacggtatccatggagacctcttgaggtggagacgggcgttaaatccttctcaggcagtctgaggtggccagagtctgaagcaagcagcctctatggagcgaggggagcaggtgggcccagcctgagcggggcctctgcacagccagctttcccccacacctgtctccagccagggcacccacaggccctttctctcccaggatgaagcctgctgggagcgtgaatgacatggccctggatgccttcgacttggaccggatgaagcaggtgagcatgccctgtgcccttccctcaagaggctgagggcagccagcaggcgggggaccgtctctgaccagcatggccaggcaggccctgggggcccacatgtagctgccaaaaggccagtcagggagcagccacggcagaaagggggtgcccaagcctgtcctttgtccccagcccctgccatcaccagaactaggatgtccctcaacctttctgggcacctccctcaggcctgcctctggggctttctgccccgaggaagcccttagtttcagtggcgtctacctgagggaggtggcagcaggattttcccaggcctcccatgccgtcccccctcagcgtgggaagggggccacgaggagacaagggtgacagatgcaactctggagaggcccaggagaccccaagccctttggacatggcccagcccaggccggcttttccgtctccactgcctgtcccttcacctggacactcctctcccaacaggagatcctagaggaggtggtgagagagctccacaaggtgaaggaggagatcatcgacggtgagtgcagccccaccggggagggtggcacccaggtgtggccgcaggacaagggtccctgtcacccaggctgggggcctccagttttgagctggagcccatactgcactgggccctgtgagagatttcattcttaccatctctagttgaggaaacaggctcaggaaagctgaaagctaagtggcttgcctaagaatttgtagctccctggtagcatgacacccgaatctgaccttccacatccccggcaccttcctggaagacccacgtgggaagagcatggaggggagaccccagcatcgttccagagccaggtctggaggagccacctgagctgctgtcattccaccccctggcggtttatactgccttcttgatactgccacctccagtcactggtgttgggcttctgaggtgaccactctgccttcctgggggtacaggaagaccaaggtctacagaagcaccttccaggcttgagctcgttcacagcctgcctggccctgggctggggaacaggcagggagcagcctctggctccagagcagggtgggtctcaatgcatcacatccgtccttccggttcccagcagagcctttgaatgctctgcctcagatctgcagccagaggaaaagggggagtgggcagggcagactcagtctagggacgagctatgcagcacagccagtgccagctccccacgtgcctccccaaccagggtgataaaggctgacacctgggtgtgtagctgggtctggcccccagggcatcacagtgaccggggcaaaagggtcccacaagcgcacaggggtggaggctgatggcagagggaagaggcaggtgggagcccaaagacccaggcctcctcccccagccggcccacccttgtttgagcagagagcactcagttcctgtttgtccagttcccccaaaggcctgggctggggagataaggagttaacaaatgaggggaatgaggcagcctgggcgataggcaggcactcagccaactggtcacaccgccttactgctgggtgccgtctggccccaggcatagctgggtcagaaacccagggcccaccacagcctctccacctgctgtgggtgcagccccaggtggaacccaccctggctgagagcccgggggtaggcatgggccataccaggggctctgagaagcagctcccatcccccagcccccacaaccttctcctggctgttggctcttggcccagcaaggtccatccagagagaggcctgagttgacatagaggagggggagtccgggaggggatggataccagaggaaggagggaaaggcccaaatttgggaggccgggggttggagcactagcttggggtgatgaggaagctggggggaggcaagagaggaccctgcctctcctgaggagtgagcagagccagggcagtccctggggtccagggccaagatttcctgctgacccctgcaggagctgggagggcagagcctcagcctccactatgttgggggaagggctcccgggcccccggcacctggacacccacctgtccagagcctacagagaccctgcgtccccacacagcagctcctcacaccagagttctggtgcccagcactcctcagcagcagtgaggccacaggcagggcacaggcctctgtccctacgccaggtcctcccctaaaagggcagtggcagcaggggccgccgcagaaggaatggcagatgagacccaaagcctttggtcatcaccccagaggtctatgccaaagcctgggtggggctcccaggagatggaacagggacacataccaggcaggtccacgccaggggtgcggggccctgatgaggaaccgggctgcactggtcatggctgcacctgagccgccgccacctgtcccgcagccatcaggcaggagctgagtgggatcagcaccacgtaaggggccggcctcgctgcgctgattcgtcgagcccatccggcgacagaggacagccagaagcccagccagccccagactccagtgcaccagagcacgcacaggagcctgggcgcgctgctgtgaaacgtcctgacctgtgatcacacatgacagtgaggaaaccaagtgcaactcctgggtttttttagattctgcctgacacggaacaccaggtctgctcgtcttttttgtgttttatatttgcttatttaaggtacatttctttgggtttctagagacgcccctaagtcacctgcttcattagacggtttccaggttttctcccaggtgacgctgttagcgcctcagctggcggtgacagccggcccagcgtggcgccaccacacaccgcagagctgtccaggcacagctccgtccccagcgctcatggtgttgaaactgtctgtcatgcaccacggtgtctgtgtccacacagtaataaacggtttactgtccgcaccctcgggctcaggccctcgcattggtccatcacgctccgggctggggatgccccttttcagagaagggcccgggaccacggtgaccaggagtcgtaggagcaagatggcggtcttcgacaggaagctgggctcagaacattcccaagccccgggaagg

SEQ ID NO: 9876 - DNA, 188 bp, Homo sapiens
ctacgggatctccaggaagatggtccctcaagtgcaacccacacccccgaacctcagaggactccacgtgcattctgacgggcagggccctgcgagcgtcctgttcaggggagggatggacttggggcttagcaggcaccaggcaaatgcaaggcagctttgccttctcctcggccccacaaagtctc

SEQ ID NO: 9877 - DNA, 779 bp, Homo sapiens
tggtgagatggactttctcagaatatgaggactgcatgcttggcacactttaaatgtgtgtttcatttttaaagaggattaaagccctcatatggttcttttcctttaaaaaattattgaaggcagcacaaattggtaatacaaaaaaatatggacatgaaagctaatacctaaatagattaagcagttaacagcagtacagacaaaacttaatgaacccataaaatagaatgtggcaattcacattgaaatgatggaagttctggatgaaatacacagaaaacataggcaaggaaaatagtcaaaggttttcaaaactggaagtggaaacaaagatctcagccagactgttaagaaagtgtatagagtgcctctcagcataatgttcaaagatagacatccacttgtcaatgtcttaatcacagagtaaaaatttattttagaaaaataaaacgacaactttactcagatgttatagaaaagatgccaggtgcggtggctcacgcctgtaatcccagctctttaggaggccgaggaggatggatcacgaggtcaggaggtcaagaccagcctggccaagatggtgaaaccctgtctctactagaaataaaaaaattagctgggcgtggtggcacatgcctgtagtcccagctactcgggaggctgaggcaggagaattgcttgaacctgggaggcgtaggttgcagtgaactgagatcacgccactgcactgcagcctggcgacagagcgagactccatctcaaaaaaaaaaaaaaaa

SEQ ID NO: 9878 - DNA, 137 bp, Homo sapiens
agagttcatgaatcacgctgtatctgctcagactctagtgacatcaaagtattttaaatgaacaaaatgtctttgggaattctgctttttggcaatctggacccttctgtctgcactgtgtgtctcttgtgcaactt

SEQ ID NO: 9879 - DNA, 252 bp, Homo sapiens
gtcttcagcatcttataaagggaggaatggtaataaatggccacatttattcattcaacccatactgagcactaaccctgtgcctggccttgttctaggcatgaggatatggtggtgaacagtgcccttgtggagctaacattttagttggggaaatggacaataagcagatctgtaacatagtgttaagtcctacaagaatggaaagcaggatgagagacagtggcaggggtgagttcttttacattatga

SEQ ID NO: 9880 - DNA, 1230 bp, Homo sapiens
attttgcccacatgaattattatttctttttcaaagttacaactttggactttgctatctttcaggttttgctcgtaatctgtcagaaggcaataatgctaattacacagagtacgttgccaccagatggtatcggtccccagaactcttacttgggtgagttaccgtcccaaaatagaatgacatttccacatctgctgattctattgtcatttgctttgagttcatctatggaaaataagaacttcagttaattaaatgtgtcagttacatattgcagtataacaaactacctaaaacttaatggtatgaaacaagcacctttttgtttgctcagaattctgggtgtgggggaatcaccagtttgagttcagctggatggttcttctactggtctctcttggagtcactcacgaagttatagtcagctggtaggtcttctgggagctggttagtttaggggtctcagctggatcagaccatctctgatccctggaaacttatcctccagtaagctattccaagtttctaagtgtgatagttggagaattctgtgctattaagagggtaagccccaaagcaacagcagctttcaagcctttttttgtatggcttttgcctcgttggccaaagcatgttacatgaccaacccctgattcatggtatggagaaataaattccatctcttgatggggcaagtggcagagccatattataaaatggtatatgtatggaaatggaagaaattaattgtagccatctttgctaataaacttccacattaagaatgtgaatatccacacagtttgacattctggcttatctatttgttcatttattaattcttcaagtacttatcaagtatctcttatgtccaaccactttgccaggcacatagagtaaatattgaaccagactgagcacagtggctcacgcctgtaatcccagcactttgggaggccaaagccagcagatcgcttgagctcaggagttcaagaccagcccgggcaacatggtgaaaccccgtctctacaaaaaaatacaaaaattagccaggcatggtgatacctgcctgtagtcccatctacttgggaggctaaggcaggagagtcacttgagtccaggaggcagaggtcgcagtgggctgatatcccaccactgcactccaacctgggcgtcagagcaagactccatcacacacacacaaaaaaaccccaaaaaacaaaaaaa

SEQ ID NO: 9881 - DNA, 351 bp, Homo sapiens
gaaccccattcaaaaatacaaatatttcttcaaagcgtgtcttatgaagaaacattgattatctgaagttaggggttttgttttacgctgggattgtttttattttttaccgtttcattttaagaaacagtattttccatgtctcaaaactgacgtacaccttgatttttactcttaattttaatgttctgattctctataactattcacagtgaacctatgttgtgtttggtgagttagatgggtgattaacttatcctcctgccttattttgtggctatgcagtagccctaaaaccttttcaaagggtgggggtaaaagtagtggtagagtctgtaattggtaactaag

SEQ ID NO: 9882 - DNA, 7736 bp, Homo sapiens
  SITE (6435): n equals a,t,g, or c
ccttcatttaaaatcctactaaatctctgttgttccatctgactgccaaagccccacatatgcacctcctactgttgattccagaaaccaatttatgaataaaatagtttttaaaccacaagtatttaaaaggtccatttaagcttgaggtttgaggctctcaagaaaaaaggaaagagagtgtacacattgggtagaggatgctgacgaaagagatagaacaaatcttggtgtctgggtatttcagtttggaaaacagtatataaatttcagtttgaaaaagtctgcttgacaccttctatgtaagcccaaaatactagagtatactgagtaacgattaacaacttgtatttccataggtgtggatgaggtcaccattgtcaacattttgaccaaccgcagcaatgcacagagacaggatattgccttcgcctaccagagaaggaccaaaaaggtacaggcaattccagggatggagggcatttcttgttgaatttttgtttcctcagacattgctttttcttttcatgaattgtggctctcatgcgcaaaagacttgtgggacccttggatatctaagattttcttcttaaatccttgtaagagtcactgcacatgtgtgtgtgcgtgtcgcgcgcgcgtgcacctcaggtcatcaggcattaggttctcataaggagtgtacaacatagatccctcgcgtgtgcagttcacagtagggttcgcgcttctgtgagaatctcatgccaccgttgatctgagaggaggcagagcgcagatggtcacgctcgctttagagtgcttgggagctcctgtgtaaggacagtaccctcccccaacccaggctacctggagggagagcttctgggaatagaaagttaggaatagggaacaacaacaataacaacaacaggcaccatttattgagtgcttactttgggccaggcactgtgctcagttttgtacatgtagcaactcatttcatctttatgacttctgctggttcttgataagatgtttctaatttaattttaggatactagcctccactgagtgttgatcctaacaagctcctctcattttaaaaatatacacttgaattcttaagctttttgcaacgagtgggcttagttgttagttcatttggtctgcaaagctatcttcaacatgccatgctcctactatttaaagggtctttgtgtgctttttccctttgcttgtccactagtggttaagaaacaaccagtgcgtgttcgtcctttattttgtcagttgtaggaaattttatttttaaggacgtgctgctttatttttaacttcttgctattaaaagcttttgatttattcttggacagtgcagtaagtgtggcttcctgcagctcccgtttgacttatggctttcacttgtagccacagtggaggtgagctggaaggattctagaagagatatttctgcccttgggattgacatgaccagcagggtcctgggagttgcaggtcaagccttgctacacttccatcccccgcactctaaatggttggaaaggacataaataggaaagcatctggcttctttcatctcaagtgcattaaaattcttctttcactagaagtgtattaatcttgtgtagtgaggcatagaggggagtgttttatttctgcagcttcccaaaggggtctgtgagctggtagagccaagttcccagtggagcagaaggctcatctctggatagcaagcaaaaaatttgatctttcagctgtcacagagtatggtcttggaatacatttgggtgtgtacacacacacatagaagcctgaaacttttttttttttttttttttttttttttgtgacagggtcttgctctgtcacccaggcttgattgcagtggtgtgattcggcttactgcaacttctgccatgtggactcaaatgattcatctcagcctcccaaactgctgggattacagtcataagccaccacacccaaaacctagatcttggttttagattagatatatgtagaacaaagctcccacataccctctaggagggaagatattaccagaattatgatgaggtcccaagatctcacaggctttgctgtgtgctggggacagctcatcatcctactaattcttgactctcagccttaggccaaggagaattatgtatcttttataaaagatatgtaaactacttgagatagtttcaagtgaaacaatcggctgtttgtgaaataaagaagaaaatttgtgaaataaggaagatttgtgctgcagagttctttagggatacgggctgcagctgcccaggtgatgagcttgaagaacctaggcccggctggcagagtggagaggagctgggagagacagctgcttttacgactctttcatgttctagcagacgccagatgcgaggcttctccttacagggaagggttatgtttgatttatcatacatttctggagtttttgtttagtttttgttaaatgcaaagctctgtgctggacattgtgagaaacaggaagttgaacgcccataaggagtttagaatagaagtggaagaagtcagtaggtgcccaaatgctatttgaggtttgaatagagaatgggtagaggggagtgtcaagggtaggctaagtttggagttacctaacctcaaagttccaaactgggagactggtgttataattgggagctactgcttttacagtcccctcctaagtgccgtgtgttcccgggacattgggaagcaggagaaaatgggtggtgaaagccaggtggcttctaagatccatgtcagttctaacacttttgacatctacgaatgattcagcatggttgtctctgaagcatgctgcaaatcacctctcgtagcctgcaagtacctgtaggggctaagctttgtagatgccacaggtgctcttagaaagcaaggaaagaaagaagagagagaagaaaaaaaaaaaagcgaaaagaagaacattatttcagtaggaggcttcagtcatcagccatgatttgtaggaagtttagctcgaggaagcatcgctaaaagacacattgagttggggtgtctgtctacatacatgggtgctgaccagacctctgacaaatttttgtgttcatggtgacagtggatccaacccttaagaaattacatgcagcagggaattcaagggggccagttcgggggtgttagtttcctatcacttccattaaacaccgtccgagtttggtgtggacaaggagatattttctcagtattagatgaagtgttttgcataggaaagtttcatgacctcacttccaactgtgttgcggcctctggttccttctggtgactttgaggagtgccgctggaatggctgcccccacgtcttttacagtatatcgggaggccacaagatctgcttgccaggaggctgtctgctcaaacatctccttcttagcaggggccttgatctccgaaagcgtcctgccttccacggagtgttactgctttcaagcatattgcaaagtgcctgcactctcacagctttcttaggaatcacatacgactccagtttccttttattgaccggggaagacggcaaaattaacttggattttaaggaatttcgttgaagcaaagcctgatgtttatgtttctgagatgtgggtctgttgaagggaatgcagttgagggcgtttgacccaagactccggagtggtcaaagactcacaacctgcttcacaaaaagatccctcttacttttgttttactcactagttttaaagtaaaataaatattttccttatgattgcctgttatcttgaaggaacttgcatcagcactgaagtcagccttatctggccacctggagacggtgattttgggcctattgaagacacctgctcagtatgacgcttctgagctaaaagcttccatgaaggtaaatgcatgtgagatgtcatctctgtcaaatctgctattaattttgtgaattacagctttctgagtgtaatttggtgattttcagttttgttgaattctcatttggaaccattttttaaaaatgaactgaagttatatgtctcaggatttgtaccaaaaatatttcaattacttgttttaagactgtaaagaaatttcatgatgctgagaagtcagttaccagctgctactactcagcacctgggcaattggaataccatttgggaaaactacttccttgattacacttcctcctttaaaaagatatgttgtgatattaaggcaagaaaaaaaaactcatagcttttgttaagtgaagcttgcaaattctgcccatcctttcgtgggtgtttcttcctcccatactctctctgtcagtaccatttgtttcaaattcaggcagaatcagaacatcatagtgcatataaggggtaattctggatgaagaatcgtacctgaatcgtacctgtgagaaagtaactgtgaagtctcaatgcacgttatcttttatgtttttcttttgtaaagttcttttgaacctggaattttaggttaaattaagtaaaaactgtagattggaaacctcctgaactttgtgcatacttaaaatatcaagttttttgttttgttttgttttgttttttgagatggatttcgctcttgttgcccaggctggagtgcaatggcgcgatctcagttcactgcaacctctgcctcccgggttcaagagattctcctgcctcagcatcccgagtagctgggattacaggcatgcgccactacgcccagctaattttgtatttttagtagagacgggatttctccatgttggtcaggctggtctcaaactcccgacctcaggtgatctgcccaccttggcctcccaaagtgctaggattacaggcgtgagccaccgcgcctggccaacatcaagttttatataaatgcaatagatgcacacacattaatgtatgttgtactgcaacacatttggacccttttcttagtgtgggtctgcagcatttgaacagtccgacactgccctctgctgatatacatgggtaaagtctgcgctgtagatgagggaaaccattggtcttgattttttattccgagtctgttttctctgatgccactgttcctgaattatgaacagtctgagctgtaagcctgtcaccagagctaatgtcacagttcagttgtcatccttttcccagagaacacaagagtgagggtgcttcggacactgggcatctccaaagcctggaatttgatagctcagggctgctgtaagatttgttgttaagtctctttcttcctttagttcttcagcttagcccaagctgtgctcagtttattttagcggacttgtctgagtttcctaagtagactgtactgcagaaaagacgtcattaagaatgataaaatgtcgacaacatttcatgatcctggttgataaaaatagcgctcctgaaaaccgagtctgtggacctttggaggcagggatgagtcagcctctcctaggtttcttctgaccatcaacacttcagatcagtttgtcttattttcatcaagaatctatttagttgtgattcgagtggctttactggtatctattactaggtattagggacttgaaacagacctttttgagctgtcagtcactgttgtaatctatgtaattgggcccaatggaaggtgctttaactgctgaagctttgaccctgtgccagctcttccattagctatcacagttgaatacccgtccaaaatccataaagcttgaagtgacattaactgaactatgcttaaaaaaaaatctgttttgacttctggcagtaccggtggcagtatctgccatatgttacagtagaatttgcccttgtgataggaattgtggacagtctgtggagagtttgggccgggctttggaaattgccaaggtcacctttgaatgtagacataaaaacactattggaattctcagatattaccactggtatatcagtgatggaaggaaacacatcttacattattctgcctgtcttgcaattctacaatgtcaggatataacatttctcccactgtgtgttatttttagactatatttctatcatccttgagattgaacaactgcctctcaaaatattcaaagatactcggtagtcatttaataacatttgtgtagaatgctgtatggaccttttgctaacaaggggagaatttttggctttgctggaacctctacaaatcatgattccaaaaaacaaaaagaagagccattggctcaaaggttagatgaagaataaaattcaaaattaaccattaacctgaggcttagcttatattatacaaactactttttcggggcatataaacgctaataagtttaattaatagctgacacgcttttcatgtggcgaagtttcttaaagtattaacaccaattaattgatntacatattaaacagttgtaattctacttagctcaaagtgatagccccatattcggaaagacatgtataaaagaatcctgattattaaatctggactttgatcatgacgccagctttgaaatacatgtttcattgagtccttacaagctatctgacatgctcaaaagtgtatatattaaatttgaatacatcacccatcaaattcttattccttaataaagtgttggtgtctaggtttatttggcacttcattatctctttttgcttccctaaagtgcctgaagagtgcataattatcaagcaaaaatggaaggacaagaatgaaatttttaacattaacccaattttacatttcaaagagtgcagctaaaaattttttcttaactatacctttgcctggtaaaaagacttactctaacaatgctggctgcaagtgacaacataaaatttctgtattcctttattttagcgagaattgtttaacaaagaaatttctaatctgttaaaatagtgagtggttattgtagaaagtgaaaaataataataagaaaaagttactttatctacccacagcaaaaggcaattgccagttttagtattttggcatattctattgctgcctcttcctattcactacttttttttttttttgagatggggtcttactctgtcgtccaggctggagtgcagtggcgcgatctcggctcactgcaagctccacctcccaggttcacgccattctcctgcctcagcctcccagggtagctgggactacaggcgcccgctaccatgcccagctaattttttgtatttttagtagagatggggtttcactgtgttagccagaatggtcttgatctcttgacctcgtgatctgcctgccttggcctcccaaagtgctgggattacaggcgtgagccactgtgcccagcccctattcactacttaaaaaaaaaaaccatattaacagttgaactccaacatgccagttccaccatcttgtgctctggtgaagcattttttaaaggaatagaaaatgccattactttgtgctaaggggtaggagtatagattcttcagaaggaatgtagaaagcaggatgctaacagacccaatccatgtttgcaatttacttgatggagatcagagaagtaggctaatggtggggaagcatttccctgctgatgttcgtgcttcctggttcacaggggctgggaaccgacgaggactctctcattgagatcatctgctccagaaccaaccaggagctgcaggaaattaacagagtctacaaggaaagtg

SEQ ID NO: 9883 - DNA, 680 bp, Homo sapiens
gggagagggagactcagcagcaattggatttctatgtttaccttggctactctaaaaatgagagctaaagttatagatgctacagttaagatagcaagcatattggtatggacttgctttgaaatgagcatatacattttaaaaagttatttatttttatacccagaaattctaactttatactttttgatctaacacacttgagaattcaaaatacttcctctgtcaatctgctgtttgtctttgtctcaagcgttacagttttgacctttctgtttcttcaggactcctctgattttcttcaggccaagccatttgtagtttgcaagtgactttgtaggtttagcaactctactctctcacccaagagttacctatccagttatggcaaagactgtttctttcattaaacaaagttattaatcagtcaggagagagacttttcacattctgaatttacaaactgtgctttcttaagttaaatggcatgttaggagtatttctgatatgaaattggaaacttgcagacaccagaaggcattgcttatctttgtaaatacacatgttccaattaaaataggtactaaaatattttggtggcacctcaaaactcccaatttagatttaatttagattaaaacacttactctttttaataaagttataaaattaattattaa

SEQ ID NO: 9884 - DNA, 31304 bp, Homo sapiens
agaaaattagacggttttgggtgagccagcaaggaggcaggagtgagtcagcgtgcgtctgttaacacgctgggcttagtggttctagggacctacagaggctccagggtgggcggcagtgggacctggcgcctgtgctttctgttatttacacatggctgtggtgacacccaaggggcttgcagtactcggcagggcactgagggcgaagctgtcttctcccctggtgacacccctcgggggtcttttgtggtctgggtagctgtgtggagctgaaccggtctgcattcctggaaccagagggattatccaagaccaggaagtcggtgtttattactaggaagctgacggtgtcagtcggggaaattgtgaacggagggccattgccccccgtccctcgtcatacccctgtgtgcagcttcaactcccagaacaagtacatcggggagagcctggccgcggagctgcccgtcagcacccagagacccggctccgacacagtgggtgagtgaagctgcagtcgtagtgaggggactagctgcattttcccaccagaacgcctcccaggagcctgggcatctgcattttctcgccaggacgcctcccaggagcctgagcacctgtcttgtcttggggcccaggggtgtggctcttcctcatgctcagatggttctcactgggagtggactgagggctttgaagccctcctcctggctccctgacatcctggggcttgtttttcatgcaaagcgtatgttgtcccacgtagctggtctcctggagggcaggccagtcctcagggtcactgtgggtggcctggggctgtccctgcacagacctcggtccccgtggtgccaggcaccctgtgtctgcagctatgttttgtcctgtatgtttccttccaggcggagggagaggagaggagtgtggtgtagagccggatgcacccctgtccagtctcccacagtctctaccagcccctgcgccctcaccagtgcctctgcctcctgtcctggcactgaccccgtctgtggcgcccagcctcttccagctgtctgtgcagcctgaaccaccgcctccagagcccgtgcccatgtactctgacgaggtagggactctttttttctaggtctggactctgggaagcccattgtgcgcaaacgtccttagtcatcaccccatgaggtggggctgtggcgcctggtctctcaggagagtccagagaggggtcctgcctagagtcactcagcctcaggtagggcccacctattcaggctcattctggagtccgtcttcatctcaggagcttcctgtcacagcaccggcctgagcccgtgtgtctgaactcaacacccgtctattcctgacgggatcattggcagcattgtgcgccccctgatgggtgtgacctggggtggcgtgtccgcctggtgggtgtggcctgggtgggtgtgtccccttgggtgtggcctggagtgggcatgtccccctgatgggaccccaatatgcatggactgagtgtgggtgtgtcccctgaagggcatgtcctggggttgggtgtccccactgatgggtgtgacctgggatgggcgtgtcccctggcgggtgtgccccctgatgggcatggctggggtggctgtgccccctgataggcgtggcctcggggtggtcgtgtcccctctggtgtgtgtggtctctggctgtgcaccctgatgggcatggcctgggggtgggtgagccccttgaccagcctggcctgggggtggatgtgccccttgatggttgtggcctcagggtgggcatggtcccgacaggtgccttgatattgagtagagcctgtcgactccatggttgtgagactggattgtgccactctggctgcttcggggcaggcactgggcaccagcccatctggggatcagggagtgcttagggggagcatagagtggtcacagaaacagaggctgcttgacgtagactggagatggctaggccagggcgctgtgtggccatccgcagggcgccttcctctccagatggcacctttccattcgctaggggacacctttcctgcaacagcctagccgaccccgtgtcaggggttgtgcttctgtcacgagacgcctgcagactgtccggtgacaacatgttacccagcatttctgccctgggtgggacgttccattacaccccatgctggtctctccacaggacctggcgcaggtggtggacgagctcatccaggaggccctgcagagggactgtgaggaagttggctctgcgggtgctgcctacgcagctgccgccctggggtgagtggcatctcgtgctcccctcctgctacgtgctgcggggagctgcacccagtcctccagaagtttcctctcataaagttgcctgcgtttttggagtcataatccaataagttattgccagatacagtgtcaggaagattttcccctacattcttctttttcaagatggttttgctatttggggtctcctgagataccatgcgaattttaggatgagtttttctgtttctgcagaaagtgctgttgggattttgatagggattgcgttgaatctgtagattgttctgggtggtactgtcatctttttttttttttttttttttttttttttttgagatggagtcttgctctgttgctcaggctggagtgcagtggctccatctcagcctcactgtaacctccacctcctgggttcaagcaattcttctgcctcagcttcccgagtagctgagattacaggtgggcaccagcctggctaatttttttattttttgtggagatgcttttcgccatgttgtccagggatggtctcgaactcctggcctcaagtgatccacctgcctcagcctcctaaagtactgggattacaggcatgagccactgcacctggccagtattgtcatcttaacaatattaaatcttctaatctgagaatgtgggatgtctttccatttatttaggtcattcttaatttctttcgacaatgctttgtagttttcaacgtataaagtttttgcctcctaggttaaattgtttttttgtttgtttgttttgttttgtttttgagacggagtctcgctctgtcgcccaggctggagtgcagtggcacaatcttggctcactgcaacccccacctcccggattcaagcgattcccctgcctcagcctcccgagtagctgggattacaggcacctgtcaccaagcctggctaattttttgtatttttagtagagacagggtttcaccattattagccaggatggtctcgatctcctgacctcgtgatccgcccgccttggcctcctaaactgctgggattacaggtgtgagccaccgcacctggccttgttgaggatttttatatccatattcatgagggatattggtctgtagttttccatttctttttttttttttttttttttttgagacggagtctccctgtcgcccaggctggagtgcagtggcgtgatctcggctcactgcaggctccgccccccggggttcacgccattctcctgcctcagcctcccgagtagctgggactacaggtgcccgctacctcgcccggctaattttttgtatttttagtagagacagggtttcactgtgttagccaggatggtctcaatctcctgacctcctgatccacccgcctcggcctcccaaagtgctgggattacaggcgtgagccaccgcgcccggcctcctttttatttctttattccttttttttttcttttttgagacagggtcttactttgtcacctagacccgagtgcagaagcacaatcacagctaaccacagccttgatcttctaggctcaagccatcctctcacctcagcctcccaagtagctaggaccacaggcgcatgctaccatacccggctaattttttaattttttgtagagatggggtctctctatgttgcccaggttagtcttgaactcctgggctcaagcagtgctcccacctcagcctcctgaaatgctgggatgacaggcatgagccactgtgcctgctcagtctgtagttttcctatagtgtctttggtctgtctttggtattagagcaatgctagcctcataaaatgagttagtaaatattccctcctcttcagttttttgaaaggatttgaaaaagattggtggttagtttttcgttagtgtttaatagaatttaccagtgaaaccttctggtctcatacctttctttgtttggaagtctccttactagttataggtctactcacatttttctgtttcttcatgagtcagttttggtagatggtgtgtttctaacagtgggcttaatttttctgctggcagccaaacaagtacaggttgcatatcccttcttcaaaacgcttggaaccacaagggttttagatgacagatatttttggattttggaatatttgtattatatgtaccagttgagtatctcttacctaaaaatctgaaaatctgaattctaaaatgctccaatgagcatttcctttgaaaagcatgacatgttgtgctcaaaaagtttgagattttggagcattttggatttcagatttttggattagggacactcaacctgtgtgttttttttcccttgtcaatgacttggcttttttctgatatttttctttctttttttttttttttttgagacagagtctcgctgtgtcgcccaggctggagtacagtgacgcaatcttggctcactgcagtctcccgctcccaggtccgagcaattcttctgcctcagcctcctgagtagctggggctacaggcgtgtgctgccgcgcctggctaatttttgtatttttagtagagatggggtttcactgtgttggccagaatggtcttgatcttctgaccttgtgatccgcccacctcagcctcccaaagtgctgggattacaggcgtgagccaccgcacccggccttgactctgattttgaatgctatcccctttgctccgtttagtgtttctaatgctgctatggaggatttgttaacagctgcaaccacgggcattttgaggcacattgcagctgaagaagtgtctaaggaaagagagcgaagggagcaggagaggcagcgggctgaagaggaaaggtaagtgtgtcttgtccatgcagccgaataaggagctcagtgtggacacaggcaagaactgaccctagccacgatgctcctgctattgtccactgtgctaccattccacccctgctgacccactcatgccctcctatgcttcagcccagggggtggatggagctcctcaggccacacctacccgtgagcagtggcccttcccagccaggaaaggcaggggaagggaggtggtgtcaggggagctggagtaggggtggcctaccgactcaggcagcacacctcaatccctgtctgcgtggccagggagtaaaacaaacagcacttatttttattcttaaacattacccttgtgtattttttctcttccctgtaggttgaaacaagagagagagctggtgttaagtgagctgagccagggcctggccgtggagctgatggaacgcgtgatgatggagtttgtgagggaaacctgctcccaggagttgaagtaagtgaaacgctggtgtcttgctgtgccaggagagtgagctttggctctgccctaggctgtgtcttgcaccactgaggatgggctattggaaatggatcttgcctgtctaagctactttgattttgtgaccaaatgtatttgatgcagtcctctgtgctcccttggctaatagaattttattataaaaaattctcttttatatgagggctgccaccacatgatcatagtcagccatccttattagccactggcatttatcatatatttgagacacttccaattgattgcacaagtcagatgttgctgatgagaagattttgtggttgtctgcatggtaatttacaaattctacgccaggcacctgtagtcccagcaactcaagagactgaggtgcaaagatcacttaagctcagaagttccaggtagtgtgctatgactgcacctgtggtggccactgtactccagcctgggcaacatagtgagaccctgtctctaaaataattaaaaattctgactattttattaagataaaggtttatttcttaactgttacgagggcccctatggacctataatttggcaccctgttccacttaattctttttaccctgtctttctaggtgtctgtagtttaagtattaaagcttcttttacaatgaagatagaattacattttaatactgaggatgcagactcttgcactttttttttttaaagacggagtcttgctctgtcgcccacactggagtgcagtggcgtgatctgggttcactgcaacctctgcctcctgggttcaagcgattctcctagctcagcctcccaagtagctggaattacaggcatgcaccgccatgcccagctaattttttttttttttttttttttgaaatggagttttactctgttacccaagctggagtgcagtggtgccatctcggctcactgcaagctccgcctcccgggttcacgccattctcagcctcctgagtagctgggactacaggagcctgccaatatgcctggctaatttttcatatttttagtagagacggggtttcaccgtgttagccaggatagtctcgatctcctgacctcgtgatccgcctgccctggcctcccaaagtgctgggattacaggcatgagccaccgtgcctggccgccagctaattttttgtatttttagtagagacggggttctaccatgatggccaagctggtttcgaactcctgacctgaagtgatttgcctgctttggcctcgcaaagagctaggattacaggtgtaagccactgtgcctggccgactcttgcacttttcttttttttttttttttgagacggagtctcgctctgtcgtccaggctggagtgcagtggcgcgatctctgctcactgcaagctctgcctcccggcttcacgtcattctcctgcttcagcctcccgagtagctgggactacaggcgcccgccaccacaccaggctaatttttttgtatttttagtagagacagggtttcaccatgttagccaggatggtctggatctcttgacctcatgatccacccgcttcggccttccaaagtgctgggattacaggcgtgagccaccgcgcctgactgactcttgcacttttcaagcaagccctcagtgtctgtgggccccaagtgcagtgtcttccatgctgattgccctgtttctaggaatgcagtagagacagaccagagggtccgtgtggcccgttgctgtgaggatgtctgtgcccacttagtggacttgtttctcgtggaggaaatcttccagactgcaaaggagaccctccaggagcttcagtgcttctgcaagtatctacagcggtgagtcctgtgttcctacaggcaaaatccacacacacggggaagagtcttttaacaaattcaaaatatatgagctattagtttctgtattcagtggtaaaaggatgagggaaaatgttatagcaatgaatacctaaaatagactaattggattatactgcatttcagaaatacttgattacacacacacacacacacacatacaatataaggggaaaagtcaggagttagattgggacgtggtggctactctgtatgtcaactgatatttatagggtgcctgccatttgcccactgcactaggtgctgggagacagctatgaacaagccagattatggctgcatgcaccaataagggtgaattctcaaaatataagtagtggagaaaaagcaattaatagggaatatacaaatagtgtatattcaaactaaataggttgtttcagatttatatatagtggtataaccctaaagaaaagaaggaaaataatgatcataatctcagcatagtggttacttttgggaatgggaggtggtgcctctcatggccacaacttctcaactgggtgtaagtgcacaggtgcttgatgatttattaatcttataactgggcatatatgtgttacgtatgttgtatgattcatttcataataaaatttaaaatcagtaatagtgtccttggtagttggaacagtataaaagggagtatggggagaagtgagtcttccttctacaacagacccctgtccattgtgcgagcagcagctgcttgcgaaaccatccagagactttctgtcctttcttgtggctcttggcacagatgggctcatgatccctgctttgctctgagccttcctttgctccatctgatatgaggtggaggcttggctgtagcagcatgctgagctgtccccgttgccagtggtcttgaggtcagtgcgataatgtaccataaatgaccttcctggtcttctgttgatggactttcatgtggctctttttttttttttttttgagatggagtctcactctgtcgcccaggctggagtgcagtggcgcaatcacagctcactgcaacctccacctcccaggttcaagtgattcttctgcctcagcctcctgagtagctgggactacaggcgtgcgccaccatgctcggctaattttgttttttttatttttagtagagatggggtttcaccatattggccaggctgctctcgaactcctgacctcgtgatccgcccgcctcggcctcccaaagtgctgggattacaggcgtgagccaccgagcctggacgtagctctttttagctctggtaaagactgttgcagtgactgttgttgtacagacagacatctcacccgtttgcacacaggcacgtgtgtggagataaattcctatcagtggtggctgtgggtcaagggatatatgtatctttttttttttttttttttttttttgagacggagccttgctggtacacacagcctggagtgcagtggtgtgatctcggctcactgcaacctccacctcctgggttcaagggattctcctgcctcagcctcccaagtagctgggaccacagtcgcccaccaccatgcccggctaattttttgtattttagtagagattgggtttcactgtgttgcgcaggctggtcttgaactcttgagctcaggcagtccgcccgccttggcctcccaaagtgctgggattacaggcgtgagccactgcacccagctgggtatatgtatcttaaatctgtatccatattgccaagtcagcctccaaagctcattcagtattaactgttaacgttcggtagtttcattgctcaccacactcatttgatgtccttccttccccatgcctgagttctgactgcaatgtgtttctcagtttgaagaccctgaaaacactctgtgatgatacattttcatgtccccaggtggagggaagctgtcacagcccgcaagaaactgaggcgccaaatgcgggctttccctgctgcgccctgctgcgtggacgtgagcgaccggctgagggcgctggcgcccagcgcagagtgccccattgctgaagagaacctggccaggggcctcctggacctgggccatgcagggagattgggcatctcctgcaccaggtcagcatcagctgtcgcctgcctcgtcagggctcccctgcccccacttggttttaccaggagcggaattaatgtgtgtgtttggagggtgaagataggtgaagcctggaggcgaagataggtgaagcctggaggcgaggacaggcacagggttgcattttgaaggttgtctcccacagttgtggacatgtgacttgttccactggcaaagcagagctctgagttcaccttgaaagactcagcgtcctggtgcctgagtctgactctgcatcacgtgttcttttcctgctcgtcccagtttaagtacctgccacttccatccttgttggaggagccggaggtccacgctggcctgtgtcttccgatcccatccccgccccatccctctgttcctcccgccgtctccttcacacactgccccctttctgtggcagcatcttccagactccacctccaccctccattatttccctcttgaggccccttggtgtggccctggtcctccctgccactcctcctggttaccccgagcagaaccggctcctcagggccatgccaggacccccctcagcctgcattcctggccatgctgggcttggcctttatttagaacccatgtaggtgccacctcttgcctggcctcagggctccctggcctcccagtgggtggggactggggaggcagcctggagggcctagcaggcacaccgctggggcctcatgtcatgtcttgtcctcctcctggtcatcactggatgttccctctgaaaactgtcttgtgggtttcatttagccccatcaggttctgcgccggcagtggggtggcagtcccagcctgttggaggcatgctgtgaggccagggctgggcctggctcctctgacccatggctgccttcacatagtgacctggccttctcctggagtcatggcttcttgtgtcccccctccgtagctgcccttgtcagcctcagtctccttgtctgagccctccaccctgccccctcagcccagacctctgccctctgcccttctgcgcaccccctggtgatagccctgtcacccctgtctgtcactgacagcccccatcatgcatctccaactgaggcctcttccctgagttccagacttggtttccagttggcagttcaacctctaaacctgatttttccccaccctgccccttcctgctcataggatgccgtcctgtcctcctgcgcttagggcacaaacctgggcttgcatctctctcagacccagcaccgagggcatggcagttctctccacctcactggaatgttgctgcagcacctgtctgccagcttccaccctgggccccaatcgtgtcctcagcaccacaacagagggatcctccaacagctcagccaggtggcgttgcctctcggcggcgtccctagcgctccccgagtctctgcattgtggacccaacccctccctcgctgccctcactgctctccccaaacacaccaggtccagctatggcctggcatagccatgccctctgctgtttccagaagttgtcacgctggctccccctgtttccttcaggtctttgctcacatatcacctgaccaccctgagtgagactgcaacacgcaccctgcctggctccagccccacctggcagcatttgcccacagtgccgacacctcacacatgccaggccagccacttagagatgctgttctctccccattagagcctatgttctcaaagggcaggattttgtctgtttattgctgaatctcccatagccagcacacagtggatacttaacatgatatttgtggaatgaaggaatcctctaacccgtttcattggcagaaaatgtgtttttcagtctcctgagtattccccaggggacactagccagtacttctcactaagctcctgcggggacactgtcattctgctttcctttgcaggttaaggcggctcagaaacaagacagctcaccagatgaaggttcagcacttctaccagcagctgctgaggtctgtcatgctgcacccttctgcgcaccccctggtgatccccgttccccaatctgtcacactggcagcccccttcatgcatctccaactgaggtctcttcgatgagctccagacttggtttctagtttgcagttcaatctctgaacctgattttcctccaacctgccccttcctgctcataggatgtgtgtgctgctcctgcaagggtctcacacactggctaatccacggtggtctgttcctcccagtgatgtggcatgggcgtctctggacctgccatccctcgtggctgagcacctccctgggaggcaggagcatgtgttttggaagctggtgctggtgttgccggatgtagaggagcagtccccagagagttgtggcaggtcaggaagggttttcccctgtggggtttccaagaggtggagtgggcagggcagggttgtgggccagggccgggtattcctcttatgtgtgatgggaactcggaagtgtaggtttatgttttaatgcttggatttacagtctgttttgctcatgattttaagttgaaactttagatttgattatttcaatttttattccataaacttggtgtattagtccgttctcacactgctttaaagaaatatctgagactgggtactttataaagaggtttaattggctcggctgtacaggaagcatggctggggaggcctcaggaaacccacaatcatggtggaaggctaaggggagggaggcatgtcttacatggccaaagcaggaggaagagagagagaagggggagatgccacatgcttaaccagatctcgtgagagctcactatcatgagaacagcaaagtgggaggtgccacacacttctaaacaaccagatctcgtgacagctcactgtaatgagaacagcaagggggaggtgctgcacacttaaccaggtctcgcgaggctcactttcatgagaacagcaagggggagtttccacacacttaaccagatctcctgagagctcactatcatgagaacagcgagggtgagttgccacacacttaaccagatcttgttgagagctcactatcatgagaacagtgagggggagttgtcacacaaccacatctcgtgagagctcactatcatgacaacagcgaaggggagttgtcacacacttaaccagatctcgtgagagctcactatcatgagaacagtgagggggagttgtcacacacttaaccagatctcgtgagagctcactatcatgagaacagccagggggattccacccccatgatacaatcacttcccaccaggcccctcctccaacattggggattacagttcaacatgagatttgggtagggacacaaatccaaaccatattacttggcaacagtcttagaccaaaagcatttaagagttgattgttatttcaagctgtgttaaggtacattgatagacctgcttcattttagactcttcagtaagatagtttatagtctgtttactatagttccatttttttccccttaaagaaacttttggcattttaaaaaagaaaaaattgacatgatcttattttctgtaaccacatagcatacagaagtcatatttttaaagcaactacagtctctgtgtttttttgagacagggtcttgctttgttgtcacccaggctagagggcagtggtgtgataacagctcaccgcagccttgacctcctgggctcaactgatcttctcacctcagcctcctgagtagctggaactacaggcgtgtgccaccatgcctggttaatgttttttttttaaagatggggtttcactatgttgcccaagctggtcttgaactcctgggctcaagcaatctgcatgcttcagtctaccaaagttttgggattacaggcgtgagccaccacacccggcttacagtttatttttaaaatagctttattgaaatgttattcacataccataaacttcacccatttaaagtgtacatttcagtgatttttagatatattcacagggttttgcaaccatcactgttaataattccagaacaccttttcacttagaaagcctgtattcttttttttttttttagatggagtctcactctgtcgcccaggctggcgtgtggtacactttgttcactgcaacctccacctctcaggttcaagcaattttcctgcctcagcctcccaagtagctgggattacaggcgcacaccaccacgcccagcttagttttgtatatattttgtagagacagggttttgtgatgttgcccaggctggtctcaaactgggctcaagcgatccacctgccttggcctcccaaggtgctgggattacaggcgtgagccactacgcccagctggtgagtcatttcttaaaatagctgtcttctcatttgctaagttcgtatgtcacttaagaattcttaaggtctcaggtatgagaaatttgatctgtaaaaaacatgtatttcaaactctagggatgttttctattgctgaaaatcttaatgcttcagaattttaagtcacattagaatgagccagttccattctaatggaatggagtgccccctcctcctgcccaattaagaacaagtagaagccgggagcagtggctcatgcctgtaatcccagcaactggggaggctgtggagggaggattgcttgagcccaggagtttgaggccagcatgagcaacatagtgagaccctttgagtgacactctacaaaaaaaatggaaagattagctgggcatggtggcccgtgcctgtagtctcagctactgaggcaggtttgcttgctgcggtgagccaagtttgtgccattgcactctagcttgggcgacagagcgagaccctggctcaaaaaaaaaaaaaaaaaaaaaagaacgagtacagatcgttgctccattttaaaacaacagcctgttttgtgcagatcagcttcatagtaagatgtggtatttgtggacctaggtctgtgtgatatttttctttcttcttttcctgaaagtctttataattcaaatatagaattagattcttcaagtgttttttttgttttttgttttttttaaatctgtagaattctagcaaattggttaaaagtcaagttcatgggagatgaaggctcagtggatgacacatccagcgatgctggtgggattcagacgctttcgcttttcaactcacttagcagcaaaggggatcagatgatttctgttaacgtgtgtataaaggtgaactataattactttgtgtttacttctgtgttttcattactttcacttactcccagatatcactggaaccatgcaaatactgcttattccctaatgtggttttgaaagactgggaggctcagaagcaagtattatgtctgtccgtacatgtcgtttaaaaaatttttttaagccagtcaaattgagtagtgggcaccaagcccagcctgcttctttactttttctgttttaatactatatattggatttcctaaatgtaatatgtacacaaaacttttaaaaaatgaggaaatgtaaaagaagtataaagatgatgataagagccatccatgctcttgccattctgaggtaacagtaacttcttggtgcaaattcttcccttttcctgggattacaaagtcacatttcatctactggaaattagtttactgctgctgttaccttcattttcatttaagaaagtaacacttccgtgtacttaaaaagaagtcaaataatgccacccacgtgatttaaaatgagacatagtagctcctccttcctctcttaactcctttcttcagggctgcatttttctcctgtttccagatcacacacttacacagccatttctcagtttatccatttaaatgttctctgctgacttcccattaatataaatgtattagttaccttattcctaaataactaattactcctaacatagcagcttaaaataatgtctgttatcatggtatctgtgggtcaggaatccaggtgtagcttagcttgggtcttctggctcaaggtttctcatgggtggaaatgaaaatgttggctaggattgtggcctcatctgaaagcttgactgaagggtatctacttcccagctcactctagtgagcttgtgtcaggattcacttccttgcaggctgtggccaaagacttcctcagttcctgccacatgggcctctccccagctgacagcatggcagctggctttcatcagagtgagcaagaggtgagcctagatggaagtctgagtgtgtttataacctaaacttagaagtgacatcctgttgcttttgttggcttctgtctgtcagaagtgagtggctaggcccagctcacggggcaggagatcacacgtgggcatgaacactaggtggaatcaggggggtcctcttggccactgcataccatactaggtacagcgtggcctcttgtgccatggtccttgctcggccttccacgtcttcccgggatagctacactagcactttgtattacttcagtgagtggggtcatattttgatggctctgtgactgctattcacctcagaaccagtagtgttctataaccacaattatttttttcctgcaagaaatagagttgccttattgtctcacttaatgtagttctctttatctctttaattttactggggggccgtatatatctcggtagagttttccaaatgttctgtcacttcacttgatccatccatgttccctctgtcctggaactctcatctgtgggctggtctccatccaggcaacatgtgccttagtgccatcattgtgagcatatgtgtccctgctcctccacttggaagctctgtgaccttgggcaagttccctagcgtctctgccacctgtgtatgggtactgttacttattatccctattttactcagagacggtaaaataaactgcccaagcctctgcaggtgctgtctggtggagatgctcatctggctcttgaggataaaatgagtgcaaacacagactgcacaggacagtgcctggcacaggccaggtgcttgctcagtgttgccattagcagcagctgcagtattttttcttggttcagccccttgttggatgttatatgtcatgcgaggggaattttctgagtcttttccattatgaaaatgattttattaacaaaataccttaagctgggggaaagaaaaagaaaatgcatttatttcattctgacatttgcttcatagtttagctacgtttgtaaaattataggtagaaaattattttcctggccgcgcatagtggcttatgcctgtaatcccagcactttgggaggccgaagtgagcggattgttttgagtgcaggagttcgagaccagcctgggcaacgcggtgaaaccctgtctctataaaaaatacaaaaattagctgggcatggtggtgtgtgcctgtagttctagtagcttgggaagctgaggtgggaagattgcttgaacctgggagttcgaggctgcagtgagccgtgatcgcaccactgcactccggtgttgacagaggaagaccccgtctcaaaagaaagaaaattatttgccttccagttttgctccactgtcacctagcatccattgttgctgtaccattcctgttcctttctgtgtggcctggttttctctgtggaagccttttctctctgttcatggcgtcctaaaaattcactttgttacactggcactggactagcttcactcactgtgcagggcttagcaggtcctttcaggctagagactcctatttcacttctgggacattttcatgtctttatgacactctgtcttttttctgttctctcttgaacttctattagatagatgttaggcctcatcaattgatcctctgagtttcttatcctattttctatcctattttcaatctcatctcttcctactgtgttctgaaagagttccttgactttattttccaattgtcctactgaattttttattccatatatattacttatttcctctttctttttatcatgactttttcatagcatcttattttttggatgcatcatcttatctttccaaggaaattagggtttttggggtctaagttttctttggttcacgtattatctggttcctcttttttttttttttcctctctgttactccagtttatctcttttatgttggaggccctcctcagatgccttacccaaggctatctgtctatatctgagtgaggccctaaaaggctagccaagaagttctgtgtttggggtggggtggatggtagctaaatggcaagccaggctttttggagggactcccaaatgtctggatctggatggctgttccctagactgttcagtttttctggaaaggacttgtgccatctgctttctggggagctgctggtattctcagggtagggttgggagtggtttggcgctgagtcccttccactgtgcctgaccatggccctgcatctggatcctctcaggactcctgttcaggggcccagggggactggttttgcatagaggttgcctgcagtggtgggtgccgccaatagggtcaggctctgaacttcacctttggctcctggtgtctgcagcgcctgggtatacagggcttttgcaggctcagtcaacctgactccttacacacccacatctgcagcctttaggtatggcatcctctgcttccctaacccagggattggtcacacctatttgctgctttctagaaatgtatcagaatccctcatctgctgctggcttgccttccctctttctattattatgggcttatatttttgtttatttttgtagagatggggtcttgctatgttgcccaggctggtcttgaattcctggctcctggcctcaaacagttctcctgccttggcctccccaagtgctgggattacagtcatgagccactgtgcctagctttaacttttttatacctgtttaaggttaattaaagttatagtaatatggtcaaacacaattctagctggaggctaaattacctgttgacctggctgtttcttgcactaattctgttgcatttattctcatttttgtttctataaatttaaaatatgaacatgggtgggcgcggtggctcacacctgtaatcccagcactttgggaggccgaggcaggctgatcacttgaggtcaggagttcgagaccagcctggccaacatggtgaaaccctgtctccattaaaaatacaaaaattagctgggtgtggtggtgggcacctgtaatcccagctactatccaggaggcagaaattgcagggagctgagatcgtgccactgcaatccagcctgggcgacagagtgagactccatctcaaaaaataaataaataaaaataaaataaaatatgaacatgccttatatctgaagggcagatatagaaattatttttctagggtgattgtcctctgaatatatgaagaaacaatgttatttgacgttttctttaaaaaggaagtctgaagctaggcatggtggctcctcgaacctgtaatctcagctactcaggaggctgaaccaggaggactgctcgagcccagcaattcaagaccagcctgggcaacataataagacccccttctcaaaaaaaaaaaaaggttgaggggagtctttgctaacaattggatttagggaaagaggggccaggaattaaaataactacaggaagtaagataactacagggtatgcccagctgtgcccttggaggcctgtctggagtacagtcagtatttagtgcacggagagctttggctgcacttgctctggggcagatcagtcactgctgatgcgtcccatggtgcatctctcctgatgatcttgatgctgttgcaggtggcccatggcgccctcagtgatggtgccattgatgctgtggagacacagaaggacctcctgggagccagtgggctcatgctgctgcttccccccaaaatgaagagtgaggacatggcagaggaggacgtgtactggctgtcggccttgctgcagctcaagcagctcctgcaggctaagcccttccagcctgcgcttcctctggtggttcttgtgcctagcccaggaggggacgccgttgagaaggaagtagaagatggtttgtgaaggaagtctcgtttatgaagcagcattgtttaataaatgggtggaggccctgggtctgaggatggtccagtagtgttggggtcaggaatcactgagacagcaacccctgtggtgactgtccactgcaggactgggtggggtcagcacagtgagatatgttagcaggtgtgctgacagcagaatgcaagtgaccttcatctatgtctgtcttaaaggtctgatgctacaggacttggtttcagctaagctgatttcagattacactgttaccgagatccctgataccattaatgatctacaaggttcaactaaggtaaggtttcatcatttttaatggtctgtcaagatattttgttttttccccttttgctgtatcttgaattgagtgtatattagcgtttgcattgtctttttcttaagagacagggttttattgtcacccagtatagtggcatgatgatagctccctgcaacctcaaactacagggctcatgcaatcttcccacttcagtctcccaagtatatgggactactgtggtgtgccactgcgcctggcagcagttgtatgttttatacagataactttctaaaaacataagcagaaatcaaaataaaagataaaatttgcccacagtcctgctatctgcaaattaaattgttcatgtaaaattttttagtgtttttgtttctatgaatttaaaatatgaacatgtcttatatctgaaggtcagatacagaagttatttttctagggtaattgtcctctgaatatatgaagaaataatgttatttgatgtttcctttaaaaaggaagtctgaagctgggcgtggtggctcctcgcacctgtagtctctgctactcggaggctgaagcaggaggactgcttgagctcaggagtttgagaccagcctggccaacatagcaagacccccttctcaaaaacaaaaaaaatagggcagggggagtctttgctaacaatttagagaaagaggtgccaggaattaaaataactataggaagtaagataaccatagggtgtgaaggcaccttggcacatagtgaagctgttagtccttccaaaaaggagaagactccatttctgtgcatggtgaaggggatgttcagggctggtttcctgagggcctgggcctttccatggggcaaccatgcaggtcacactcctcctcaggccaggtgggatctgggggctctctttagtgcccctactggacatgtctccagagccctagaaggctaaactcaactgcataggacacttctgttccccttcctaccacagttgagagcccagtactctggtattacctgctgtgggcaaccttgggggatcaagccctttcagaaagctgtttttgaaaaacagtgtgaattgttcaaccaagtctcttctttcttctcaggttttgcaagcagtgcagtggctggtttcccactgcccccattcccttgacctctgctgccagactctcattcagtacgtcgaagacgggattggccatgagtttagtggccgctttttccatgacagaagagagaggcgtctgggcggtcttgcttctcaggagcctggcgccatcattgagctgtttaacagtgtgctgcagttcctggcttctgtggtgtcctctgaacagctgtgtgacctgtcctggcctgtcactgagtttgctgaggcagggggcagccggctgcttcctcacctgcactggaatgccccagagcacctggcctggctgaagcaggctgtgctcgggttccagcttccgcagatggaccttccacccctggggggtacgtgcttgacctggggaggtctggtgggtggctgcagccaagtctcaggcttccttctcactgtagtaaccgtctggcaggtgttgggcaccagtgtgagggctgcacgtccacctccgtgtgtctccatgctgtgctcgcctgcaccttcctttggtcctttgggttcatgagccagaacaagctgggttttgtggagtgggggctgttagcctttcctgaccagcaaggcagtccatgggagttcactcagcttcaggagaaaagtgacaagtggtactgggaggaacaccaaccctgatcctgtcctgcctgcccacagggtccctgttttcagaacagacaaggggcaaagagcatggggaccatgtagccctgtccccaagccgcagccatggcactcagtgctgatttaacattctttctttgtcaaagaggccttcttctatggctctggctgtgcccctgttcctggctgaggtctttgggctgttttgacacagatccgacaggccatctggctggctcaagcccagtatggcatggggctgctccttcctatgcactcagaagggaatgagctgcttatctggcagaagttgtggcattagcacagacactcccctttgggcctcaggcgcccttctaaattgtggtgtgtggtctgtagtaggtctaactcatgctcattattgaaggaacccaaagggaagcaaaccactcagcacaagccctcggtgctctggttaggttggggttccccaaaataagctaagactgcttataccagactcatctgggtgcttgttaaaatacagatttcctaggcacaaccacaggcctgtacagtcagaacttctgggtagaacttggctagcaacactgttaagggggactgtctgcatccctcacctagaccctgggagcaagctgctcttccccctcaacaactgtggttctgctgtgtttagaaagcagacttctcaacttcacagttgccttctcctgagaaaatgttttcatgtacattttcacctgtattttggccaaacctgtaactaatgaggcactttctccccagccccctggctccccgtgtgctccatggttgtccagtacgcctcccagatccccagctcacgccagacacagcctgtcctccagtcccaggtggagaacctgctccacagaacctactgtaggtggaagagcaagagtccctccccagtccatggggcaggcccctcggtcatggagatcccatgggatgatcttatcgccttgtgtatcaaccacaagctgagagactggacgcccccccggcttcctgttacatcaggtaattagagcttgatgcaatgggatcagctcctcacgagactttcctggtccagtttctgcaaaggaagatgtttagttgatgttgctgcttttcttttgggtctctatccttcctttccttaggacttccctcttcaagtgagtgacttaaaaacattgagacaggctaggaagtttctggtagagcctgaactcacctccctgaaacaggccccctaggatggctcttagagaggattttgtggcttttgagtagtcattactggccctgccagtctcgatgtaagcttgtctggactttgagtgatgcatggaccctgggagcctatttaacccaagtgtggaagtcacataattgtgtgactttaatcaaaggtcttgcacttaaatcagtgaatttaagcacatgccacctgtcgctgtttaaatattatttgtacctgtttttgtttttttgtgtgtgttttttttttttttgagacagggttggccaggctggcctctttatctgtttttgtattgttttctcagaggcgctgagtgaagatggtcagatatgtgtgtatttttttaaaaacgatttgaaaaaatatgatgttcctttgtcgtgggaacaagccaggttgcagacgcagaaggagctacagctgagagagggacggtgaggttcatgttcagtatgtttctgttgcttgctaaactgtatttttcttgcaaagtaaatagaaattaacatcctacatgccaaatccagtccactgtgggcagactgtgacaaatcctcaaggaacagatcattcccatgcagtagaaactattctagaacaaagttaaagcatctcacttcatttatcaggcatacctgaccctgaaatcatacctaaccaggagagtacagctgacatttcatctcacttccaaatttggttccaaagcacagtacctaaaaaagttcacaagtatgctttctcccaggataaacaataacagtgaaaatctattaatgtaatttgttgccataatagaaaaataagtggtaattttagcaggcgttgaaatacgtttcttaaaatttatacctgttcctgataaaatttctttattttgggtactttctttagcttgggttaaaaaaaaaaaaagtcctaacttgataaggctacctaacataaaactaccaaaatagaaaaaaaacatgcttcttggtagaatgttaggaacagtggaatcagaaccagcctgttgtcccgactattattcactattgtcctggaaatcctgaccagtacagggatgtgggatagacaggcacaaatactgaaaggaaggagaaactgtcatttccagacagtacagttgtcagtccaagaaaagtcaagtccatagaaccattctcagttcaataaggtgatcagatagatagatccacaacatgttaaaaaaaaaaaaattctcattcacaacaataaacctgaacagaaagggcacaggatggtggaactttgctgttccttcttgttccccatagagatccttgaagtaccttctccaactccatgatactctaaaaactgttcatcttcataataggagtggagcctaatccttggtctcctcacctcctggtttcccggaatgtctttctcattaacatatgagttctcagggcctgtatgtgcaaaggaaacctgaaccattgaggttcagactaggttgttgacaggatacaatgctgtgaagatgtcagtactggtaagttctaaaattcatcaggataaacaaatatgcatcaattgctgagaaagttttaaataagactaacatggtttgcttggcctgataccaagacatacagtaaagctccagtacttaaaaccatgtggggatgccagagtagataaatggatcagaataaagagtcagaatatgtgacaaaagtgttaggccaaattattgaaattagtggggaaaagacaaacattggcatgtgtttagaaaaaaatgtcagatgccttctctctcaccatttgtaaacattacttccaaatgtatccaagagctatctataaaaaaccttgccaatactagggaagaacagaatctggaaccctagggtgggaagcaagacatgaagcagagaagctccaaaaacctagctgcctcttgagagcagaagcttccaagaggaacaggcagtctcaatgcctctgtgcataagggtccctacagtgcaggggctgccttccctctttgctccactccctgacttgatggaagcttggaagcaggcatggggccagcatgagctgttccaggagggcacatgtgtctgaggcacatgttcttacatgttaatgcacatgtgcaaatgtatctacatgctttacatgatgctgtagaaatattttctcttgaccataaacatttcaaatcatgtacttacagtttggcaataaagccttttcatccttctgcaaacaattttcccataccattgcttcacatgcaccgtaactggaagaggagcacagagtgtgctcaagaggggaggattcccagcacagaggatctgatgcgaggagcttctgctgaggagctcttggcgcagtgtttgtcgagcagtctgctgctggagaaagaagagaacaagaggtgaagcccacttccttctaattcatgtgtgtttagtctgctttatgctgtgaggggagactggttattgcttgattaatataagacagccaggatggagaagggcaggtggattattagcaacagttttagtgatgtaactatttaaaagctctttgaagacagaagcagtgccctagatagtatgtttctaactgtttatattgaagtgaatttcatttattatttattattgaaagtcagtgttaagtttttctgggaaattcatgtggttaagtctgctcagaagatggtgagtgctgaacactatggctggccacaggcaccctgcccttgggagcctgaggcattggtggatcatcccatgctgtgaatggacaggagctggggctgcccctcctctacattgcccacttccctccctcccatgcatacctttcctttgctttcatttgatggccatgtttaccattttactgagtagaatcaggaataagggaccttccacaggttgtcctctgccttccctgccctcccagccacatccagcatcctccctatatccccttcctgacgcctcttgttgctggaaacgaaccatgcagctcgtagtcagtcagcccttccctgggctgggatctcatctcccacctacccaaggacattcattcaatgagtatctctctcgtgctaccacccctccccatattaggtggtgcccatcagcagcacacagacatgaaacatgcctccctgtcttggtcccacttccctctttagccaccacttcatgtttctgccctcttaatggtaaaactcctcaaaaacgcttgtgatactcacttcttcagccttctttcccatggggatgaaggcccagggttgaacatgaccgtgaatcccagtccttggtagcatcccatacttgatcctcccctccttgctcctaggatgtccgtggtccccctcctgccctgctggttcctcctcatcccccagctgccccctggattcattctctcaacctctcctctgcatcgtctgtacctactcctcagaaatttcatccagtttcatggatttttaagtaacatcactattctgacagctccaaatttgtatctcaaacctctgaactccacacttgaacatgctactgcttccttgaaatcttcattagacacctattggatgtctggtagccactgcaaagttaacatatcccaaatccagttcccggctttcttccaaccaaccccttcctttggtggtcatctctgttgatggcggctccatccttccagctgcctagatcaggtgccttggaatcatcccctcacatcagcccattcacatatcctattggctctattgaaaatacattcagaattggaccacttgttatgacttccatggccaccacgtggctcaagccactatcatcttccttctggattattacagtaggctgcagtttagtcttggtagacctggtgggtgcctttcaagtgagttaagatggaggtcgtgtcacttgcttgcttacagcctctcagtggtttccctctttcacctgcaatcaaaggcaaactttgcaggggtggccagggccctgagtgatctgccccccatttcctctctgacctccgctccttccttgagcatggtaggcagttcacagttgggcctctgagtttgctgttccttttgcctaggactgtccagcccctccattctccccagcatccccatggctgatcttgtactcacttcagatctctactcaaatgtctgcttctgttaggccctgcttgcccatctccgaccttcttgtttccatggctctgctttgtctttctcatcttcaaaccatgtttctcttgttatgtgttccttgtctgtctctcctcactaaagtataaattgcttagggcagggcctctgttttgtttcagtgcaatattccttgtacctagaatgatgcctagcatctggaggaggcttaatgaatatgttttggaagggtgaatgaatgtgtccgattactaaaatcagtctctataatttaagtggtttgggatgagatttttttttcctttttattagatagagtctcgctctgttgcccaggctagagtgcagtggcacaatctcgactcactgcaacctccacctcccaggttcaagcagttctcctgccccagcctcccaagtagctgggactacaggtacccatcaccatgcctggctgatttttgtatttttagtagagacgcagtttcaccatgttggccaggctggtcttgaactcctgacctcaggtgatccacctgccttggcctcccaaagtgctgggattacaggcatgagccactgcacctggccaagattgtttttcttgaaaagaccggtatatggaagtagacagctctagagtatgttaggtggcagtgggatattattttgagttaattttaagctataagcagcaatccactcatttggaaaatgtcagaagaattaattatagatgcataaaaccaaagtaaattaaataagataagccaaacaagacaattacaagtaatgttaagtaacacatcgaagcagttgtttttggattaataccacctttttcattaaatataaattggaattggatttataaattaaagggaagtggtttctctaatttttttttttttttttttgagatggagttttgctcttgttgccctggctggagtgcaatggcgtgatctggctcactgcaacctccgcctcccgggttcaggcagttctcctgcctcagcctcccaagtagctgggattacaggcacgtgtcaccatgcctggctaatttttgtatttttagtagagacggggtttcaccatgttgatcaggctgatcttgaactcctgacctcaggtgatctgcccgcctcggcctcccaaagtgttgggattacaggcatgagccaccgagcccagcctagtttttttttttaaattaagctttatcataggaagttgttaaatttttaataagtacatttctgcttctcagttgatgtcataacttagttatattcttagtaaaaagcaaaggcttaaggctgggtgtggtgactcatgcctataatcccagcactttgggaggctgaggtgtgcacatcacttgagttcaggagttgtagactagcctgacaatacagcaaaatcccgtttctacaaaaaaatacaaaaattagctgggtggcatgcgcctctagtcccaggtatttgggaggctgaggtgagatcatttgagcttgggaggtcaaggttgcagtgagccaagattgtaacactgcactccggcctggccaacagagcgagaccttgtcaaaaaaaaataataataaaattggccaagcacagtggctcactcctgtaatcccagcactttgggaggccgaggtgggtggatcacctgaggtcaggagttcaagaccagcttgggcaatatggtgaaaccccatctctactaaaagtacaaaaaattagctgggcacagtggcacttgcctataatcccagctactcaggaggctgacgcaggagaatcacttgaacctgggaggcagaggttgcactgacccgagattatgccactgcactccagcctgggcaacagagtgagactctgtctcaaaaaaaaaaaaaaaaaaattatataaaattttaaaaaagcaaaggcttaaaaagtttttaagtatatatagaagattaatgaacaatagttaacttcctaatgctcaaatatttttgaatttattacatattgtttcaggtttgaagatcagcttcagcaatggttgtctgaagactcaggagcatttacggatttaacttcccttcccctctatcttcctcagactctagtgtctctttctcacactattgaacctgtgatgaaaacatctgtaactactagcccacaggtgagaagaacgtatacatttggcatttacataagaattaaagattgagagaatggctggggaaaaaagtaatatcacgatttatcctatgatgttttgatgaccgacaaattattagctcaaattagaccttttcttaaactttatccatatcattgttaaagagacccaactgattttgagtttctgcctacgaaataaatgaagaatagaattgaaatattcttaagaactgaataagacctgtaactgtgtgctgatgtgtaattaagggcattaaggtgatgacagcagcttctgttggagcacatattgtctgagctttggcattacccagacctctcttctgggattaatttttcctgaggaaaactaatgaatgaggaaggtaagctcccagaagtcaagagcctcacccaagagtgttcaagtagtgagtggtcaggttgcttttcaaagccagatccaactggctccaaagcctaaggtctttttaccttaccattcttccttcagtggttaaagatgcaaaaacagagtttcaatcacagatatgtgccactgaacaggtaaaaactgtgctcctggactggctttaggaagtccttcaatagaggagaaaagcaaattaaaatgatgtactgtttccattcatcagtttggcaaatactttaaaaatattcataccctttgaattaccaattctaacctaaagaattctgacctaccagatattccccaaaaattaatgtataaaaatgtttactgtagcattattgtatgaaagtcgaaacagaataaatatccgaagatgggagtctgattaaacaattataacacattcatgtgatagaataattcacagcccttgacgatgatattttctaaaaatgactggctgggcgtggtggctcatgcctgtaatcccagcactttgggaggctgatgagggaggatcgcttaagtccaggagcttgagtccagcctgggcaacataaagagatctcatctctacagtacataattagccaggcatggtgctacatgcctgttgtcccagctactcaggaggctgagctggtaggatcacttgagcccaggagtttgaggctgcagtaagctccgatcataccactgcgttccagcctgggtgaaaaatgactgacactggaaattgttcatgatagaatacaaaggcaaacagtctatatacagataccagctgaatgtacgagctaaatgaggctggaaggatatacaaaggataatttttttccctctgtaaaaataaatgactactcagatgaggtttctaacatgatccagatctagtaccttcccagagataggtcgtggtttattgacatcccaaaactgttcagtttcttttttattcaaatagagtgacatgatgagggagcaactgcagctgtcagaggcgacaggaacgtgtctaggcgaacgactaaagcacctggaaaggctgatccggagttcaagggaagaggaagttgcctctgagctccatctctctgcgctgctagacatggtggacatttgagcagcctgacctgtggggagggggtctctcccgaagagtttctgtttttactcaaaataatgttattctcagatgcttgatgcactgttggaaatgtgattaatttaatcatgcagataaaccatttaaatgtcagtctccca

SEQ ID NO: 9885 - DNA, 465 bp, Homo sapiens
ggatggaacagggtctggttgggtagaggagaaacagaattcccggagaggagtgcaggggtgtagctggagacagtgtacttgagaggacatgatgaaagcgtggaggtaccagcttggttgtgtggccaggtgaggggaacaggccagcagggtgaggtcagagattcttgtcaccttcttctgagagctgtgagaacccgttgttgaagattaggcagagaagtgatctggtcacattttcttttaagaatggcatgtagggcaggaatcttgagaggtgggtgctgcagccatccaggtgaaattcaaagggaataagcgtgagtttgttagcaattggtgtgaagagaggggataaaatttgagccatatacagaaagaggtattaatagacttggtgatgttgcgtatgaccaccaatcttaaactggcactcagcatctcctgactgtaatcctacat

SEQ ID NO: 9886 - DNA, 470 bp, Homo sapiens
gaatggaactgtggggcccctgtctccttttttcttgttaattctgatgaagggctgtgaagggctggctgcttgcctgacttgaagaaggtgcattccctctgccatgcaggtgaacacacgagactcagaatggctgggggtgttcccaaggtcacatcctggctgtcagcacattgagggctcagaccaagttctttgtgactccaaaatcagtccttttcatgacttgctgacaaacctaaagataaaagttagggccttctttattctttcccttgactgcctttgccagccaatgacggacaacctctgacggctgggatggaggcacccgcaggccagccggagtcttctccggtacttaccagtcagagtggtgagactcacagacgctctctcagaaactggcagcttacactcaacacccggtgcctagttccccaccctgtctcctctaactcctcacc

SEQ ID NO: 9887 - DNA, 391 bp, Homo sapiens
ttttttttttaattaattgccaacactttaaacactggagagttcatataaaaatctggatgtctagcacctcttgagaactcggcatatgtggccacagtgggtccacaatttctgcacagcagcaaatgaggagacgcagtgcatgtggcactctccaggtggccaccctcagccactcacatgcatattcgtttctgtggcccactgctgaagaaaggccactgcggggcatggtgccatgtacctgtaatcccagctacttgggaggctgaagtgggaggatcacttgaacctgggaggccaaagttaaagtgagccatgatcgtatcaccacactgcagcctgggtgacagagaccctgtttccagaaaaaaagaaaaaagaaaaa

SEQ ID NO: 9888 - DNA, 1585 bp, Homo sapiens
cccgcttcaggagaaactgtatgtgccatcccttttctcagagcattatgcacagataattgtgtaactgcatgaaacatatattaaaattaggtcagaagtaaagtatggttggaatttgggtatgcgtctgccacttgtctgtgtctcaagcacttaaaaacatatcctattcctggcacagttcagtgcatttcgggaagtgaccaatagtcagggaaataatcaaggtttctggaacaaaatgcaagagttggcctgagatcactgctctacctagagaggagtagggcaaggccagtctgggccatgattcagagtaaggatgactgacccagccacaggggaggacagtgcccaggacctgtgtactcctatgttcccaatgcctaagagtgcccagcccatggaaagtgttcagtgaatttaatgaataaatgattctacagaaatgggcacggggaaggagaaagggcctgcagtcttttatttttattttattatttttaaaattgagatggagtctcgcactgtcgcccgggctggagtgcagtggccacaatcttggctcactgcaacctccaccttccaggttaaagcgattctcctgcctcagcctcccaagtagctgggattacaggcgcccgccaaccacgcccggctaattttttgtatttttagtagagatggggtttcactatgttggccaggctggtctcgaatgcctgacctcatgatccgcctgtcttggcctcccaaagtgctgggattacaggcgtgacgactcgcccggccggtcttttattcttcatacaagtgtccttcctgcacatcccagagctatctaagacccattctgatcatcactaatgccagttccctcttctgtaaggggcagtaacacccctggtgctgcctacctcacaggattgtcctgagagaccagcgagattctgcatgtgaagggtctttctctgaatagtgaagttctacaatgtgactcatctttgcggaccctgtcctccacgtgagggtgggagacctctgctcattgccatttcttttcagattctgcagtgttaagttggaaggtttccacggaagccacattattattacataggaagtgacatcactttccagcttgttttggggggccaaaatcttgctatgttcttggccagcacctcagtttccatcctccttccaacccattgtctttctttgtaactctgcctaacaggtctgggaggtccaactttgactgaggatgttaccttcccctccccagtgctgacctcctccctcctagttacttggcataccgggaaccacatcatcaactcctgtgggtaaaaggtgacacatgagccataacactgcttgctttcccagagatgcctgggtttccaggagctgccacatcactcttcctcttttgcatcttaatgttggcagtgggaaagagttagaggtggattcctggacccagtctggcctgcattatttcagcatgtggaatagaggtcactaaccggtgtgccacaggctagtctcagcttgcaaatgtattttgtccacataa

SEQ ID NO: 9889 - DNA, 2872 bp, Homo sapiens
agtcactgcttcaaccacctgtgagaaattagaaaaagccaggaatgagttacaaacagtgtatgaagcattcgtccagcagcaccaggctgaaaaaacagaacgagagaatcggcttaaagagttttacaccagggagtatgaaaagcttcgggacacttacattgaagaagcagagaagtacaaaatgcaattgcaagagcaggtctgtgcttttgcagccagagcttgtctgaggcctctgctgcttacttgaatcctggttgctcttcacatcttgatgagcttctcttttttagtctaataggtataaaaagcatgttgttgttgtttatttaagacagagtcccactctgtctcccaggctggaggctggagtacagtggcttgatcttggctcactgcagcctctgcctcccgggttcaagtgattctccttcctcaacctcctgagtagctgggactataggcacccatcaccatgcccagctaatttttgtatttttagtagagacggggtttcaccatgttggccaggctggtctcaaactcccaacctcaggtgatccgcctgccttggaaacagtatctttttaattgaatagttttcttatgaccaaaggaatgtattatgttaagtgaaagaagggaagaaaaggaggaggaaaagataaaattgaaaaaacaaccctttctttctacccagaaataatcccttgtaaacatcctggtggtgtgttgccaaactattgttttgcatttctttctttttttttttttttagtggcatctgtttaaatatcccatttttttttttcactgaataaaatatcaaacctttttaattttgtagctccctttttaactcagtttttcatttagtaaatatctacagagtgcctactccaggccaggcacatgctagggcctgagtggtcaagtgacaggcgcagagcatgtggccctgtcactgtgaaacatatcctcgttcctggtcattccttgtgactgatgcagccatttccatctgtcaccctggagagcctctgtgtctgtgttcctgagggtagggaaggagacagaggagagttgagcggtgaatcccagttgcgttgctcttcatgcattcttcgtgtgtgcacatgtggggacagagtctcgcgacattgcccaggctggacttgaactgctgggctccaagtgatcctccacctctgcctcccagagtgctgaggttacaagtgtgaaccactgccctgacctttgtatgtgttgaggagcctttaaactagagcccacgcttacctgtgaagctgtgacgtctcctaatgtggttgctttgcgtattcaacttaggacatttggttttactgttaaaccacggttttgtttgttgcttacagtttgacaacttaaatgctgcgcatgaaacctctaagttggaaattgaagctagccactcagagaaacttgaattgctaaagaaggcctatgaagcctccctttcaggcaaggatgctttttttcctctttaaacagaataaaatctgaaggaaccacatgatgttttaagatggaaatgattcataacttcctgcttcagcgaatgccctgtggccttcaggctggggtgttcttggttcctttttgcgttgtttattgttaacagatgccttttcccactaaggatgcaaataatagttacaaatgccagccttgtgttaaataggatgggctttggaagactgtaaaggccattttggcggtggtggttgccagcttaggtccctgggaagtggcaagtacaagtttctatcttgtaatccacagtaaaggatccaccccaagtgctcctgcacagcagtgttgctgtgaaatgtcgatgccacttattgaatagaaaaatagtcttttctatttttcatctgtcatcagtgggagggtgtaagccattgctttcagaacagaatcggcagtgtcgctcacagtctttctactaaaccagttgcatcttacagagcagcgtggatgagtgctaagaaccggctgtgtgaccttcagcaaggactttctcaccacaaaaatagagttgcccaaagtcaggcagaggtgataatgtgtaaaagtgactggctccaggcagacttgtagtgaacattgtttttcttccttcctgctagaaatgagtataattttagacttatgtttaggttatgaagagcaaattgaaaagagcacagggtttccagaccaggagtctggagtggcatttatgggagcctgccctgaaatggcactcagtgttgtcctaaggtcgcatggcctctgtgggccatggtgggcttcagtgggcctcagggctctcagtcataaaatgggaatgtctaccctaaccacctctcaaggccattttgagaacagatggccaatttacataaaagcatactatagatgtaaagtaacgtcatacggcttcatcatcaacccctacatctatatgctttaactgttttagagtacattgatctcatagaatgttattgcctcaaaaatatccgtttattttcccagaaattaagaaaggccatgaaatagaaaagaaatcgcttgaagatttactttctgagaagcaggaatcgctagaggtgggtgaatgtcaatatcccagtatcccccacaaaaaaaaatatcatttttgattttgtttggttttaatgtttctgtgtacgtatgctgagtttctggggttttcttgttaacttaagttccacatttcattgtgttttagaagcaaatcaatgatctgaagagtgaaaatgatgctttaaatgaaaaattgaaatcagaagaacaaaaaagaagagcaagagaa

SEQ ID NO: 9890 - DNA, 12284 bp, Homo sapiens
agtcactgcttcaaccacctgtgagaaattagaaaaagccaggaatgagttacaaacagtgtatgaagcattcgtccagcagcaccaggctgaaaaaacagaacgagagaatcggcttaaagagttttacaccagggagtatgaaaagcttcgggacacttacattgaagaagcagagaagtacaaaatgcaattgcaagagcaggtctgtgcttttgcagccagagcttgtctgaggcctctgctgcttacttgaatcctggttgctcttcacatcttgatgagcttctcttttttagtctaataggtataaaaagcatgttgttgttgtttatttaagacagagtcccactctgtctcccaggctggaggctggagtacagtggcttgatcttggctcactgcagcctctgcctcccgggttcaagtgattctccttcctcaacctcctgagtagctgggactataggcacccatcaccatgcccagctaatttttgtatttttagtagagacggggtttcaccatgttggccaggctggtctcaaactcccaacctcaggtgatccgcctgccttggaaacagtatctttttaattgaatagttttcttatgaccaaaggaatgtattatgttaagtgaaagaagggaagaaaaggaggaggaaaagataaaattgaaaaaacaaccctttctttctacccagaaataatcccttgtaaacatcctggtggtgtgttgccaaactattgttttgcatttctttctttttttttttttttagtggcatctgtttaaatatcccatttttttttttcactgaataaaatatcaaacctttttaattttgtagctccctttttaactcagtttttcatttagtaaatatctacagagtgcctactccaggccaggcacatgctagggcctgagtggtcaagtgacaggcgcagagcatgtggccctgtcactgtgaaacatatcctcgttcctggtcattccttgtgactgatgcagccatttccatctgtcaccctggagagcctctgtgtctgtgttcctgagggtagggaaggagacagaggagagttgagcggtgaatcccagttgcgttgctcttcatgcattcttcgtgtgtgcacatgtggggacagagtctcgcgacattgcccaggctggacttgaactgctgggctccaagtgatcctccacctctgcctcccagagtgctgaggttacaagtgtgaaccactgccctgacctttgtatgtgttgaggagcctttaaactagagcccacgcttacctgtgaagctgtgacgtctcctaatgtggttgctttgcgtattcaacttaggacatttggttttactgttaaaccacggttttgtttgttgcttacagtttgacaacttaaatgctgcgcatgaaacctctaagttggaaattgaagctagccactcagagaaacttgaattgctaaagaaggcctatgaagcctccctttcaggcaaggatgctttttttcctctttaaacagaataaaatctgaaggaaccacatgatgttttaagatggaaatgattcataacttcctgcttcagcgaatgccctgtggccttcaggctggggtgttcttggttcctttttgcgttgtttattgttaacagatgccttttcccactaaggatgcaaataatagttacaaatgccagccttgtgttaaataggatgggctttggaagactgtaaaggccattttggcggtggtggttgccagcttaggtccctgggaagtggcaagtacaagtttctatcttgtaatccacagtaaaggatccaccccaagtgctcctgcacagcagtgttgctgtgaaatgtcgatgccacttattgaatagaaaaatagtcttttctatttttcatctgtcatcagtgggagggtgtaagccattgctttcagaacagaatcggcagtgtcgctcacagtctttctactaaaccagttgcatcttacagagcagcgtggatgagtgctaagaaccggctgtgtgaccttcagcaaggactttctcaccacaaaaatagagttgcccaaagtcaggcagaggtgataatgtgtaaaagtgactggctccaggcagacttgtagtgaacattgtttttcttccttcctgctagaaatgagtataattttagacttatgtttaggttatgaagagcaaattgaaaagagcacagggtttccagaccaggagtctggagtggcatttatgggagcctgccctgaaatggcactcagtgttgtcctaaggtcgcatggcctctgtgggccatggtgggcttcagtgggcctcagggctctcagtcataaaatgggaatgtctaccctaaccacctctcaaggccattttgagaacagatggccaatttacataaaagcatactatagatgtaaagtaacgtcatacggcttcatcatcaacccctacatctatatgctttaactgttttagagtacattgatctcatagaatgttattgcctcaaaaatatccgtttattttcccagaaattaagaaaggccatgaaatagaaaagaaatcgcttgaagatttactttctgagaagcaggaatcgctagaggtgggtgaatgtcaatatcccagtatcccccacaaaaaaaaatatcatttttgattttgtttggttttaatgtttctgtgtacgtatgctgagtttctggggttttcttgttaacttaagttccacatttcattgtgttttagaagcaaatcaatgatctgaagagtgaaaatgatgctttaaatgaaaaattgaaatcagaagaacaaaaaagaagagcaagagaaaaagcaaatttggtaagttgtgtgtgctcctttatcagtatggaatttttcttctcagttgccttttagagtcattcaagtactcagcagccagagaaataacacaggttgggaatccttctcatgtctggcaatgtgctttctaaggtgtgtaaaacaactgctttgcttactggcgtcttgttttaccatcctaaaatctgacatacggatgaagtccaggatgtttctggtggtctaagctaaaaagaaggaaactaccaattaggattagagttttatgtgaagactttatttaaaaaaaaaatcactgtattgagataaaacaaactacaaagttcactctttctttttttttttttgagagggagtctcactctgtcactcaggctggagtgtagtggcgtgatctcggctcactgcaacgtccacctcctgggttcaagcgagtctcctgcctcaccctcccgagtagctgggattacaggcacgcatcaccatggccagctaatttttgtatttttagtagagatgggattttaccatgttgcccaggaaaagttcactcttttaacatgtaaaattcagtggcttttagtatattcataaagttgtccattggtcaccagtacctctttctagaacatttttatcacccccaaaaggaaccctggacccattagcagtcactccccattcccccaaattccccagcaccaggctctcccccgtctactttctatctctatggatttacttattctgaggaatgaatagaaaaggttgattgtagaacatgtggtccttttaagactggcgtcgtttacttagtataaagtttccaaggttcatccgtggtgtagcctatgttagtatttcatttctttttatggatgaataatatttcgccgtatggataaatgtcaattctgaaaagtacaaatctcttggaagctgaaatttcttgtggcacatttgtcctttctccccagccttaccccaacctttgtctttttgaaaaaaatttgtttccttgctgcttctgcctttagtaccactgttttcatttcatgtttatactctgagactgcagaagcaaagcttttctccacttcaaatctctggccagctctagaaagtacatgtgtggatctctcagtgagaccttctgcaaataatgtcattgggagaccctctagctatttgataacattagatgagcttatattcaaagaaacttcaaagctatttattctagaagattcttaggaagagtcagtgatttcaaaagaaatctagacttacatgcagggatatgcagggtataaactttattgatggctcaggaaacaggtttgaaagagcttccggtacacaaaggggattcttctactgcagccgcttttgaaaagctaaggcagagtcagagtgaggaacacagaagcatccaaccgcttctgtcacgtaagcatgctgaggctgcggaaaaagagtgcgtctgactgtagtccgggagaaagggatgggctggcagaggaggaggagaaaatgcagagggtacaagtcttgtaaatgctctaattttaaaactgacggtaagttatgccatttccctctaacaaaaatgaggtaggattcgctattttcaaggtaaaaaaaaaaaaaaaaatcctgcgtacaagggtaacactgtataaaatgtatgaaatttaaaaattgatacttagtatttgcatgtacttatggggtacgtgtgatgtgttgagacaatcatagactgtgtaatgcccaagtcagggtatttagggtatccgtcatcattatcatttctttgtgtttggaacattttatatcttctcttgtagctattttgaagtacgcaatatattattattaactatagtcaccctactatgttcttgaacactagaacctattccttctgtctaactgtatgtttgtatgcattaaccaacctctcctcatcccaccccaccccacctcccaccatacacacgcatacctctcctagcctcagggaactatctaaagaacctagaattaaagatgtattagtccctgccctgaccctttccagctctggaagctttcctgatctttcctgagtaggtcgcttaacccgtggaacacgtttcctctttctgtgtgaagtaaggggtttggattaagtaatccccgaggccccttcctggattctccctaaggattggtccagagcagaaaccaatgccccggaagataagcttgatgaccacaccaccgactcttacctaagacgttgcttcattaaacatatctgatcagtggaccatatgctgttcttctgtagcataaattttgaatggtttagttgaatttccgaataaagcaaggagtgggtgggcggtggtgggaaatccacactgatggtgtgctctcagaggacgcctcccctgatgtagcatttattttggagagttttgtgtttttgagacaggatcttgttctgccaccaggttagaatgcagtggtgcattcacagttcactgcagccttgacctcctggctcagttgatcctcccgcctcagcctcctgagtagctgggactgtaggcatatgccactatgcctggcaaacttgtaatttttggagagaaatttaaataggctgtgtactccatgccgtgtaggtactggggtgtcacaatagaaaatgatagtattatgtctgccctagaagtacggcccagtcaacgtagccccatcataacaaaaatccaaacactcaggacattgttatccctgttgttttccagagagccgtataatgcactgctttttctttcctgatcagtttgtttggtaggagagaactgttgttccctgttctcccagaaaatgccaataactgactcacagattgcctcatctccagccaagattctgttttgtatgtaagcaaagtttttctcttgatacaataacatgtttgatgcaactcacatttttgcatattaagttactgataaataagtgaaatgtttgctttcagtattaggaccagtcttcgacattaaggtgctcttgtttttcacctctttctttgaaattgctctaagatgatgaacatctgtcgcttgctacttgtctaatgtctcaatctaatcaaagattctttctgttaagaatttgaactatgtggaataagagcagtatcttgctgtgtcctttccagaaaaatcctcagatcatgtatctagaacaggagttagaaagcctgaaagctgtgttagagatcaagaatgagaaactgcatcaacaggacatcaagttaatgaaaatggagaaactggtatgtttccttcagaatgaaagaggatcttacaaatggggtaatatgtgtgaaattgagccctgcattttagaactgtggagttgggttaactgctcctaaagatatttagaaattatacaaaagataaagttcacattttctttccaagtttgttccatatttattcattgctgcctcctagaatgttttctttttcaaggaacatgtaaaacagcacccagtccttggaaaaactacaaacaaatcaggcttatatttcagtggtattttggatcttcacctgcataagaaaaatgtttaaatatctatgtaaaatcagtactttaatataccagccaccctggacaggtttcttagatccaaaacagttggatacgtttaatagaaatgaatagaaatgaatttaatagaaatgaatagcaatactatttatcaaaattcttcatcttgcttcttgtgaattagcatgtgataaaagaatcgtgggctgggcgcagtggctcattcctctaatgccagcagtttagggaggttgagatgggtgggtcacttgaggtcaggagttcgagaccagcctggccaacatggtgaaaccctgtctctactaaaaatataaaacttagccgggtgtggtggtgggtgcctgtaatcccaagtactgggaaggtggaggttccattgaggtgagatggcaccagtgcattccagcctgggcgacatagcaagactccatctcaaaaaaaaaaattgtgctataataagattaatccatttggacaagtagcaggtgttaccaaaaatatgaattaacattcactttgcagtgtctagaacagagaacgatgttagtgtgagtggcatgttcagtgttcagcgtcagtcttggcccggccctgaaatacagctgctgccagccaggactctaaccaagttggcagagtttggcaaggcagcttaagtgatccccgccctcgcggtgccttgctgttgactgtccagctgccgcatgctactggcctcttctccccacagtgatgagtgactcaggcttctacaagtgcctcattcaaacccaaaccagccctggacagtaggggacatgggggacctctctgctgcttggtttgtgttggtttggcgtttggttttcttctggagactatgactcctgttgagggagataacggccaagcccctgtgtggatataccagcattttgaattatcaggaaatttttgtaaaggaaggaaaggaactcatggttgttaatgggccaacctagtatacataccagttcctgccaaaggtcgtcctgttcgactgagtctggtatcttctaatctggtagtcagggatgactcagatgatcctgttaataggactgctccatatgccattcatgcatcaaaactttcaaaaaatcatgtgcaataaatcagactttgctgtaaacttaccaacacatttaatttctgatgatctactatttgtttcttgccatgccccagaggtatcctgataatatccttcagccttgcattgtgtatgtgtgcaagaatgagttgatacaatgagagggagacccactgttcccttcatatttgtaaattacaggcctcggatgaaattaagagacttagaagcacaggaagttttctaagaaagacagctttcccatgaaaccggcactgcccataatcagctctgtgacattattaggactagtttccctaggatgagatatttaaaggacaatacctcccaatctcaaattccaggtttttttccacgttgttttatctgggaatccttcataattactgaacgtagactccttttctggaaagtgatttaacctgaacaggttgtcctgagctgcttctggataacaggatgtcttaagaacaatcaggttccaaactaagcaacatactcaaagcgcgttagtcctgctacaaggacaaggacttagacttaatcctgacggagctataatattgcctcttcataaagccttacctttagaaagtgagtgggggatggaatcaggtcttcatcatgttaagtgattaaatgtcctcaggcatcttatcctttcatctctccgctgatcagtttgtttgccttgaaagttcagcctgcacagggcagcaagagaacagacctatctatcttcagctgacctgaggagactcgtggcatgttacttctttgatgggatgctctaagagctctatcgaattgaagctttgtatggccactcagacgcaaatgctgaaaacttaccatgaaactgagttcaagtccatagtaaacgttgccagggactgtgaattgctggcctgtgagttttcatcagatgtgggaatctttttttttttttttccagcaaaattcaccgtaagaagatagataagctttgataagtgtgggcagtgtgtctgcagggtttatttcacattgaaacagaaagaggcaccaattcttagagaattccaaaacaacatgacctggaacaaatctgttacccactcgtatcaatatttaagtgtcctggcatacatgttttaaaaatacccagccgctctgttttgctgttttaaaatctttttcagtatgtttgttagtgtataaatattttaatatggaattgcattttccttaattaaatctccaaagtgtgcttgtgtcgtgaggtgccttaagaaatgaggggttttttttttaatattgtataaatgttggaattcttgtttatgccaaggtggacaacaacacagcattggttgacaaattgaagcgtttccagcaggagaatgaagaattgaaagctcggatggacaagcacatggcaatctcaaggtaaaaataaaacagtgctgtttctcccgagctccccgctcccttggacatccagtgtactttctggacacgctctacccctgcacctcctggaaatatgatggaagcagatggttaaaagggcattgatttctctgtggaaaatatgattgtagtagttcatgcttttaccaaagcggcctgaaaactgtacactgagacccaggccagcaagcctgctcccacggcctctggctgcctctgagaatgctttcagacaaagagcaacacaaaaccaaatagaaaacagcctgcaacataagatagtcataaaacatgtcgaatatttgcaaaagtggctctcagcctactatgaaattgcccaaaaagtacagttattattatatatttttttgagatgaggtctcactcttctgcccaggctggagtacagtggtgtgatcttagcttactgcagcctccacctcctaggctcgagcagtcctcccacctcagcctcctgagtagctgggactacaggcacatgtcaccatgcgtggctaatttttgtatttttaatagagacagagtttcgccatgttgcccaagttgatcttgaactcctggcctcaagttatccacccaccttggcctcccaaggtgccaggattatgagcttgagccaccacgcccggcctgtgtttgggttttcttagccagccaaatacctgtgaccttgtgcaggattctgttttatcccaaaggaataattttggactttaaagtttcaaacgctaagaaaaatttttcaagttttttttttttttacataaatctcatggtttctggcctttttcttcaaggcagctttccacggagcaggctgttctgcaagagtcgctggagaaggagtcgaaagtcaacaagcgactctctatggaaaacgaggagcttctgtggaaactgcacaatggggacctgtgtagccccaaaagatcccccacatcctccgccatccctttgcagtcaccaaggaattcgggctccttccctagccccagcatttcacccagatgacacgtccccaaagtccacagactctctgaaagcattttgatgcaggtctgcaggactgaccccaaggaggaacgtgggcacaagaggtatatcagcacacgtgtgatcaccgtagggtaactggagcgtcaccaccggcggaatcgcagcttctgagactggaagtctggaggaagacttttgcctccgtccaaaagattcctccaaaaaaagatttaaaaaaagatttcggcatcgacacggacgttgttgcacaaagcacttaaagaacgagagcatcttgttcattgcctttttcacctaagcataaggggaaaaactctcagggccctattaagatttataacctttgtaatgttcttcaccacagacaccttcttgtgagttttcagtctgactgtgggggtggggggtgtgaatgaaatggatgtcacagagtgtcatgtgtctgatgcagcctcctctgctgtgtattaaatgtcaaaatctgaatatatctggatatgtactaatcaaataataatcaatcaatcagcatatacatttcagccaaagccatagaagaaaaagcaatagttgcttgaattatgatcatctaccaccaactctgctcagccctgtaacagggtagggagagggtataacaggaagagctttgacttgtccctgtctatacattctctgtatcttttgggggtaacttcttggcagtttttcagtgttcagccatgtcagttgaaactagatttttctgtagattttttacttacccatgtgagcctaacactatcctgtaattcattttctcaggctatgtgtaaatgtagaaccctaatttttctataaaaaaacaaactaactaactgtgtaaagaaagaaaaagggaagtaccaatgggtttttccaccttatttttacctttgatctacccttgcagatttaacctgtcttcttccctcccattattctcattttccttttacctttctccaccatccagagccacaaaagcaaaccttctacctcctacctacttttctctgggacaaggataaaggaatatgattttccagagccccagagccagctcatcttccaggtgctgaaaccactttccaaataaactaaagcctggatttgatattacaaattttgggaaatcttagaataaagaacgagaacaaggaagtcattggctagtataattaagaaaggtaggattcagtgcttaccgatgatgcagtacttgatagaagaaaacagtctgggaggatagcgctcatttttcagttaccctttaaggagtccctttgtctttgggaaagtagcagaatggtccgcttctttcccatgagtggaaaatgtggcttgtccaactctcctccaggttgcatttcagtttctttccaaaacttattacctcccctaatcctgagactttggaaaaggtggaaggaagaactgttgctttatctccccctccctgcatgtgtcaacattgtgatgtcagtatttactaatctgcattcagtggctgtacaaataacagctgtagtaagaagagattcaggatgctagaggtgaatatttgggtcatttacatgtacactacatagcaagttgatactcatgttgcatgttcttttaaattagtgattttgtgtcttaagtctttaacttccaatacttcatcatgtatgtaaccttccatgtttgcttctgataaatggaaatgtaggttcactgccacttcatgagatatctctgctcacgcttccaagttgttctcaatgacattagccaaagttgggtttgccattcatcccctaggcatggtaaatcttgtgttgttccctgctgtcctccgtattacgtgaccggcaaataaatctcatagcagttaatataaaacatctttggaggatgggagagaacaggagggaagatgggaaacaaaatagagaattcttaagattttgtttaaaccaaatgtttcatgtagaatgcaaaatgttggcacgtcaaaaatatgaatgtgtagacaactgtagttgtgctcagtttgtagtgatgggaagtgtattttactctgatcaaataaataatgctggaatactcaagaattgcatcctctgacct

SEQ ID NO: 9891 - DNA, 301 bp, Homo sapiens
ccacttgtttctttttttttttttttttttttttgagacagaatctcactctgtcgcccaggctggagtgcagtggcgcaatctcggctcactggaagctccgcctcctgggttcacgccattctcctgcctcaacttcccgagtagctgggactacaggcgcccaccaccacacccggctaattttttgtatttttagtagagacagggtttcaccgtggtctcgatctcctgacctcatgatccacctgcctcggcctcccaaagtgctgggattacaggcgtgagccaccgcgcccgg

SEQ ID NO: 9892 - DNA, 1034 bp, Homo sapiens
caccagtacctctttctagaacatttttatcacccccaaaaggaaccctggacccattagcagtcactccccattcccccaaattccccagcaccaggctctcccccgtctactttctatctctatggatttacttattctgaggaatgaatagaaaaggttgattgtagaacatgtggtccttttaagactggcgtcgtttacttagtataaagtttccaaggttcatccgtggtgtagcctatgttagtatttcatttctttttatggatgaataatatttcgccgtatggataaatgtcaattctgaaaagtacaaatctcttggaagctgaaatttcttgtggcacatttgtcctttctccccagccttaccccaacctttgtctttttgaaaaaaatttgtttccttgctgcttctgcctttagtaccactgttttcatttcatgtttatactctgagactgcagaagcaaagcttttctccacttcaaatctctggccagctctagaaagtacatgtgtggatctctcagtgagaccttctgcaaataatgtcattgggagaccctctagctatttgataacattagatgagcttatattcaaagaaacttcaaagctatttattctagaagattcttaggaagagtcagtgatttcaaaagaaatctagacttacatgcagggatatgcagggtataaactttattgatggctcaggaaacaggtttgaaagagcttccggtacacaaaggggattcttctactgcagccgcttttgaaaagctaaggcagagtcagagtgaggaacacagaagcatccaaccgcttctgtcacgtaagcatgctgaggctgcggaaaaagagtgcgtctgactgtagtccgggagaaagggatgggctggcagaggaggaggagaaaatgcagagggtacaagtcttgtaaatgctctaattttaaaactgacggtaagttatgccatttccctctaacaaaaatgaggtaggattcgctattttcaaggtaaaaa

SEQ ID NO: 9893 - DNA, 278 bp, Homo sapiens
tttttttttttttttttttttttgagacagaatctcactctgtcgcccaggctggagtgcagtggcgcaatctcggctcactggaagctccgcctcctgggttcacgccattctcctgcctcaacttcccgagtagctgggactacaggcgcccaccaccacacccggctaattttttgtatttttagtagagacagggtttcaccgtggtctcgatctcctgacctcatgatccacctgcctcggcctcccaaagtgctgggattacaggcgtgagc

SEQ ID NO: 9894 - DNA, 1268 bp, Homo sapiens
cagtaaaggtcgtatctcctcttagtttatatttcccaggaatttccactgcaacagcagagttggtcatgggctcacagagctagagtgagaggtaagctcttcttctctaaattcaaagctatctatgtttgacaaataaattttggctggctgtaacaatttctgctgtataagaaaattggacaaacttggtaaatatttttgaatatcgtaaaaaatgtctaaacaaagttgaatgttcttaatctatgcatctatttcatattgaaagctaaacttctaaaaacttgttctagttattgaatagactaatctacaattacacctttgagtgcagcagtttaaaaaaatgaagtgtccttgaattttttcagtaccttcataaattaactcacatttgttaaagttgctactaagacaaaatgacatttctaagcatttgagtctggagttgttgcttgtgggtaagtagttgaactgtatctagtacattttaaaattctaatatattgtggtgatataaaagagaatacttggtattgacccacgtatcaccaccaccaagtctttctggatgtattttaagtcaacttaacttaaaaaacacttatcccactttttattttttacaaaaacgtgctcatttaatagaaatgattgattatataaaattgtttacacatgtataaaaactaggaacacgtatgtaggtaagcaatcaaaatcatgctttctgttagaaaagttaacacttctgtgaatagactggatgacttccttttagtttggatgtctgggtcggactcacgagacgctggggttggggtgtggtgcttgacatcagcctctggcaaagcactaataaaaggaaccccaaagctgactgtgtacacaaatgggctttccataagttcattacatttccttttccaagtcaggaaaactcaacagtggtagctactgtggtctgtccttgaagattctgagcagtgcaaatgtaatatcctgcatcaatcgtctcgaagtcttccactgtaatgacactctgggagattctcgtggtgtgtcccagtcctctgtggatcaacctccaagtgtcttggatcgtcacaggcctttcatcctgtttaacgacacccacaaagactgaagcaagagggacaagctgctataaagagctcccactcacccaacactgttgagcgttcctttcagagagcaaagcacatgcttataaaagactgtttagtatgcgtagctcataa

SEQ ID NO: 9895 - DNA, 21632 bp, Homo sapiens
ggacgatggcctggagcacagggagctgggccatgggcagcctgaggccagaggccccgctcctctccagcagcaccctcaggtatggcagtccccacctgcccctcagaaagtgtcctcagaagactctggggcctggcataagatggggaagggagggagatacgacatcagtgcaacaggcagctctaggacccatggttgccctataagatcctgggtgctggatccacactaaggtgtaggcacacacacacatgcacactcacacacccatacacacacatacacacaacagcttgccagtctcaggtgaagcatgtcccttttccaggaaggagtctgtcctttcctggagccacacatagtcctgccctggtatgtctcccctctatccagaaaggtggctagggccagaggtgggatggagccaggctccagcgtgtccagcagaatgctctcactgtgggaatcaagacccagtgcattagcttgccggagctgttgggatacaggctgggcgccttaaacagcaggcatttaccatctcacagttctggaggctggaagtcaaaatcgaggtgttggtggagttggttccttctgggggctgtgagtgtgagggcaggggctgttcccggtctctctccttggcttgtggatggtcatcttcttcctgtggcttcatgtggtttccctctgtgaatgcctgttcagatttcctcttcctataaggacaatagtcatactgggttaaggcccaccctaacgacctcattttaatttgattacttctgtttgtaaagaccctatctctgaataaggtcatgtttagaggtactgggggttgggacttcaacatataaatttgagggtggggaacataatttactccataacacatgatgacaggccacacacatgttcttgaacagttacatagtccaggacaggaggacatcctggtcagcacaagatccagcgcccctcccctggttcctggctttggagccccaagggcccggggagctggtggaatgggtggtcagtctggggtgcaaacctgtcagggggctgcaggggacagggggcttagagagtcaaaggccagagccccactggacagcaggtctaggtttatcctggaatctctctaggaaaggggcctgcttggcagttcccaagacctcaggcagaagtagagggagcaggaccctgaaacactggagaccaaggccccatctttcccctaggtgttgctctgggaacagcagcgactggctgggcggctcccccggggcagcaccggggacactgtgctgcttcctctggcccagggtgggcaccggcctctgtcccgggctcagtcttccccagccgcacctgcctcactgtcagccccagagcctgccagccaggcccgagtcctctccagctcagagacccctgccaggaccctgcccttcaccacaggtgagaccgggaggagggtggcgggtggagggaggggctcggctgcacgagtccatgtgggtgtcttggtgtcacttgggacatttttagaggccacagagtgcttagccttgttaggcccacgtagtacccatggagcacatggaacagctggttattgcatttggccgatgaggaccaaggctcacgaaatctaaggtgacaagcctgtggtcaaatagcaagtggtagtcaagccaggataagaattccagtctcctgccaatgcactcagcccttttaaaaaatgatatttattactgttgctctgcttgtaaaaagagctcagaagtattttagacattttgaagagtacagaaaaacctaagaagaaaagaaaaatcaccaaccagtatcccaccacccagaagtaaaccctctgaaattctgctgtatttcagtccaggctttgttctggccatatgtacatgtacagatgccatgaacacatgaactacgttttgtatcctgctttacttagttaacatattatgaatccttcttggcataattagtctttaaaactgagagtctcatagtatttcattaatgtatttcatttttactgagggatcccttatcagttagacatttagattatagcttatttgaatttccttatgcataaatctttcctcatgcttgggattatttcccaaggttcactctaaagaagtagcattcctgggtcacatggtgtgagcattttgagagtcgttggtgtcctagacgcacagaaattgaccctcccacccgcaatgagcaggaccctcctctgaagacttcccacgggtcagactgaaatagtcacttctccaaagctggatttgtctatcacatggtccagtgtcatcgtgggcttcttagctcccggtttgggggtttcctaggaattcttttccctcctgctgccccttggtagcctctctgggttcatgacacgtgtgtgagatgctgtacgttaggcctcatgctttgctctgagcacttgagggcctggtgctgggccctcgagtcctgggccacccagcagtcgtgtccgcatgtgggaaggccgtggctctgtggcagccatgttggctggagctgtgttgatgtgttggctgctgccacctggggaagtgtctgggcgtgtgtggacaggtgtgaggggctggggctggggtaggggcaggatgaaatgcaggcctgtgtgggtgtgaggggtgtgtacccgcccggctccatgtgggtgcctgctgtggcggtgctggcgtgttctctgcagccaaggccatggggcgtgaggactccctgggtccccgctctgacccttgctcctgcagggctgatctatgactcggtcatgctgaagcaccagtgctcctgcggtgacaacagcaggcacccggagcacgccggccgcatccagagcatctggtcccggctgcaggagcgggggctccggagccagtgtgaggtgaggaggcgcgggtggggcccgaggaatgggtggagggaggagtcatgggaggggaggggtggggggccctggggcccatgagagatgaggggcacatggggtggtggtgatgggagggaaggggcgagcatgagctcagagctctgtggtccccttttcagtgtctccgaggccggaaggcctccctggaagagctgcagtcggtccactctgagcggcacgtgctcctctacggcaccaacccgctcagccgcctcaaactggacaacgggaagctggcaggtaatggcctagtggccctgtctccccatgccagcttacctcacccagctcccatgcactcctgtctcggctctgcccgcccagccagcctcctcctgcaccctggacgtccctactccagcttgctgccaagcccctcctcagcccacctccacctctcccttccatatttctctcccccaatactcacccggccctgctctctgggctccctgctccctgttgggccaaaggctgagagtattcacgctgacgtgggctgggcctctccccgcagggctcctggcacagcggatgtttgtgatgctgccctgtggtggggttggggtaagtgtgcccaggggtctcaggggggcgttgccagggctctcagctctcctccctgtggttctcccaggcccagcccctgcagaacctctgcttgttgtggttctgccagacagggtgagccagggacttcctgaggtgccccctgcagcaggaagctccttttggacaggcgtgtctcggacccacagtctcccccgaatgcggagtccagcctaagccttcccctagaaggtgtctggtagatgttgagtgaggtttcaggagcagggccaaggctggggcttaggatcatctctcccttcaaagacccccatgactgggcattggccgccaggctgctctgtctgctcttaagtggcaagttggggtacctcagcctggtccccagaccttgggctgcctggtgtgacatcacggtggtgcttccggtgtccttggcgatcccagcactccccactccgggacatagccccaaactccgctcgcgagctttgcttcctaagtcctcacccctttgtgaagggagcttcccgctccctccggctcagctctcctcgcctaacactatccctgcagtagtttctcaagcaaggtgtgtagaggcaggggatggaggcctcattccggagggaaagtgggagctgtagctggtgggggactttgggagccagtcagtgccctattcacaacttcccatttcttgccactttctggtttttccaactgttgttgcttctgttttctcctccctcctctccctctctgtctttctctctctctctctttctccagcctcttgcgactctctctgccttcctcgcctctcttggtctgcctcgccctccccatctccccatcatgccccccggcccctccctagccttgaggcccagggactgggtttggggggcctcccagcctgggctaggggccctgagtggaagacagtggtgcagacggcccctccagctccgaccgtcccgcagggcctgagcagagtcagctggggcttaaaaccccctcccggcccaaaccccaagtcccgcccaggtaacgccatgccccctcccctgaccggggaggcaggcgtgatgctgccagcagagtgctggccagataatgggctggtgctgggacttaagctgggaaaaagtcatgctgggattgggggacacaggaggccttgcctttgggcggtggggcactggggaggcagcactgtctgcccagctccctgcccctggggtcctggccgtggggtggggaccacccccttgggccctggctcctgtgtgaagccttggatgatgcgggccctgactctggctcccgcaggtggacactgacaccatctggaatgagcttcattcctccaatgcagcccgctgggccgctggcagtgtcactgacctcgccttcaaagtggcttctcgtgagctaaaggtaggaggtttgggttgaaggtggacacaccacaaaggaggaagcagagtggggtagtggggaatccaggcccagaaccccaggcatcgcattcctcttagagattgctacagggttttggaggggaaattgagggctctgggaaccaggttgagattggaactcttggggtacgttcatgcagctgtgggtcagagctgtctgttgattgacaagcattctttctttttccagaatggtttcgctgtggtgcggcccccaggacaccatgcagatcattcaacagccatgtaaggctaagggaagacctgggtgggatgaggtggggggcaagcccccaggaacttccttcagggacattctctcttcttccctgagctttctcaggctgggccaacccaggggcctggggaggtgagggcatgtggagagaatgggctggcaggacctgtctctccttccaggggcttctgcttcttcaactcagtggccatcgcctgccggcagctgcaacagcagagcaaggccagcaagatcctcattgtagactgggtaggtgcctgtccgtagcaccctccaattcgagagccctgggggaaaagccctgagcctgatgttagagatgcggcttcatgtcttagttctgcagtagcctctctgagcctcagtttccccttgtgtaaaatttgggtgaagataacacccacatcacagttgggaggcctagaggggatggcgtgtgggaacgcattcagccatcgcaaacccctgcaacgagtaggagctgtcatttgagtgttgtcttttgacctctattggcttcttttggcagatctagtaatttctgcatttcctgtacaggtagtgatgataagaataatagcagataacatcagtacaccactaatcacatccagacactgatggttttacacatgatggatttaatcctgactataacccactttacagatgaaagtgagcacagagagattaagtaactcacacacagtcattcgtaagtcatgagatggatttgaacccaggcgggttagctctagagtgcttgcgtttaactgctaagctatgtcccttctgcactgacagctgtgtaagagacatttctaagcagaagttgagagcggtggaggacctttgcacacttgagttcccgcatggtcctgtgagtcgagtgtagggcccagctctccctacgagggatggggctgggcctcgtgtacctgcccctctgtaaccgagcttggtttctgatctcctcataacttcatgactttatgcaagacagagtggttcctgatatgtgtaaccctgaacccttccctctccttgccactaaccccatgtccacacagttactctctcaggtgggctggcctgagattgggacacctcctctccttcaggatctcatattacagccagccctgtccagcacagagaggccgaggttcagagccgggcagtggattacgtggggccactcgaccgtgtggctttaggaaccccaggttcctgatcccagtctagggtcctgacctcagaatggccactgaccttgaaacccttctaacctgtcctggcccccatctctctgccttccctaatcgctgcccgtctccctacacaggacgtgcaccatggcaacggcacccagcaaaccttctaccaagaccccagtgtgctctacatctccctgcatcgccatgacgacggcaacttcttcccggggagtggggctgtggatgaggtaaccgcatgtcagggccacatcttccagcctcattgacctcctcctgacacttactctgcctctgtcatgacgagctgtgtgatcctgggcagactgctgagcctctctgatcctaaacttccccacctggaaatggggaggctggatgagctgggctggcagctctaacaaactggtgttccccttctgggactctgctgtcctcatgtctctcttgcctcctgttttccaggtaggggctggcagcggtgagggcttcaatgtcaatgtggcctgggctggaggtctggacccccccatgggggatcctgagtacctggctgctttcaggtacgtgctctgggggcccagaggggcaagtccaccctctcctgtcccttctcccaagagcaccaggggggaggtgatcagttggattgtcagcctgtccccaccagttcctagacattgtaggtgaacgccagtgagaataggacaaacagagagaagaatgcaaaagtcaaagggtgctttgcaaaggcatacattaccgagagccaatgtcaaactgattgctggcaggtgggtggtggagtgagcagagctggcacatttagtcagagaaggctgccactctatttgggaaaagagaattctggaaatggatcttcaaacacttttctggagttatctccatgacagctaattctacgagagccctgggctggagttcctggagtcttctcagagcccagggctatgaagaacacccaagcaggccccagagttggatcaggggtagaggaaggcagctgggggggggcctggaagagggagaggatgagagaatgtagccaggtggcgcagaacctcagaggacctagttgtcccctactcagctctcaagtagtgagtagctgggtgtggtcaactcagtccaaaggactgagcacttgtagtccctgaagctttgtgaccagagtccatctccgcaaggctgtgagattaccctttccctgtggctccggccactgcaccccacagatgcttgcatgcacacacacacatgcacacacacatggtcacacacactcctctttcattccctctggtgctccatccttggctcctttctgcctcttgctagttaagtcccctagggggctgagtccttaggctgtgtgtgccagggacatgggtggccagccaaggtcaaggaggtcagagaaatctgccagttgtgctggggcactgggagccttggagtcctaagaacagggtgccccaccgcaaagttggcaggaccgcccctggcaaccctgcacagtacgatgatcgccacttcttgtgacctcacaggatagtcgtgatgcccatcgcccgagagttctctccagacctagtcctggtgtctgctggatttgatgctgctgagggtcacccggccccactgggtggctaccatgtttctgccaaatgtaagggagcctcagctgagggggacgttagggacagagagccaggcggtgcggggagttgggaggcactcccaagtcagaaagggaaggtggcagtggccagcccagggctttcagcctgaggactggagtatggcagctggtcctgaaattccccgggatctcctagccgagcacagcccaagccctttctcaggaccaggccggttcaccacggagggcttgaccaggtcatacccatggggacttaagtccagtaggcaggaagctcagccgtgggactccccaccacagctgggttgattccaggtgggctggcagctcctccagaggaaggggagagagaagcagcactctcagaatagagggtggccacagggcccagagtacagaaagaagagagggtgtagctcagtgaaaaagacacaggctagagtcaatgacccaagttcaggtcctaccttgctgccacttactagctgtggggcctttcccaaggcccttaacctccctgagccttgagtgaagcatactagtaggttttgtacgacattcaatgtgaaagcactttggaaatagtgattgatacatgtgagtcattctttattagggaggaagcaagcagggaagccacaggggtagagaacagggtcacctctccactcccgcccctcccatttctcccctcccaacctctaggttttggatacatgacgcagcaactgatgaacctggcaggaggcgcagtggtgctggccttggagggtggccatgacctcacagccatctgtgacgcctctgaggcctgtgtggctgctcttctgggtaacagggtgagccgtctccctcccccatccatgcttctgtcaggcaggtaagcccggctctcaggactacccaaggagcaggcagatgggatgggacagggtgggagtggccaagcctgaaacaaggtaggcgaagcggaagcctctgttccaagttaggtccaggcagcatctcctggcctaggtagagtgtgcttgtggctagaaggctggggcccctggggtgggagtgagctgggcctgtgggtccctgagagactggtggctgatgtactgttttctataggtggatcccctttcagaagaaggctggaaacagaaacccaacctcaatgccatccgctctctggaggccgtgatccgggtgcacagtaagtgtggagatgggacactcgctgagctcagactgaaggatcttggtggtaccctgccccaccgtggccagatcctagggcttccggtgccagccaggtgacctgctgttggtctggagtaagattcctgtgagtgacccaggcagcaatggtgagcaccccccagtgaggggttatcctctgagcccccccgatggagccagcagggcctaccagacagtggcccctcaaggtagggactggcctccatctctagcgacagccctagaccagggccaggtcaagagcaacactcaggccttgtttgccaaaaggcctggttcccatccctcccctcagtcctggccacaggcgtctcaggagctctgctggcttgggggctgcgtcttgggataacccccacatttgtaaagtactttaaattttcaacttcaactcaacatctattgagcatcttatgtcaagacccataatctatactagggataaaaatgagtaaaatagattcccatatcaagggctgggtaggggagccgtgatgtctttacataatggtaaagacatggctgattcctcttacggtgggtgccctcacactgagccagattccaggacatggttcctcacagcagcaggcaggaggagcattctcctggcctgggcacccatgcagagcggccgtggtgatggtcagttctcccatgttgtgttcgtcccacctcccaggccctcctttcctgagtgctgggctgagcactggtgggggctgtgtttaagtgggaggcccgagcttggggctctgggaggtcactgtgacacagaccctgtctgcaggcaagcaggctctcctgatgctctcaggagccccgcacctgtggggaatgagtcaaaggtggccttgcagccacaggggatgagagaaaggctgggcacctgctaggactccctcacagccatgttgaacccactctgtgtaccctgtcaggctgtgcgggagtgggagcgaagtgaggagaggggcaggtgggagagccgaccctaagtggaggacaggcccgctcctccggggccctgggcctgagacaccaacctcaatatccggtctaggacgcagtgtggaggggcttgctttctccaaccctttctgacctggcatcttaccccaggtaaatactggggctgcatgcagcgcctggcctcctgtccagactcctgggtgcctagagtgccaggggctgacaaagaagaagtggaggcagtgaccgcactggcgtccctctctgtgggcatcctggctgaagataggtaatgccagacccctggccctgggcccacagcctctccaccgcttcattcctccctgcttgaagaccccgggtccgctatgcagccaccccaaccctcccaggcttcctgaccagggttgagaggaagcttagctaaggcccttgctgcagccctggtgctccagcatcccacccttgtccctccccacaggccctcggagcagctggtggaggaggaagaacctatgaatctctaaggctctggaaccatctgcccgcccaccatgcccttgggacctggttctcttctaacccctggcaatagcccccattcctgggtctttagagatcctgtgggcaagtagttggaaccagagaacagcctgcctgctttgacagttatcccagggagcgtgagaaaatccctgggtctagaatgggaactggagaggaccctgagaggagacgggctgggcggcgacccccacagggctctcgagaacagattctcccctccagtatgggccctggctgtggcccccattcctcaggactgcacagaggaggactggctccggctccgtcgggctcacccttaaccactattcctggctctgcaaaccccagactttgcacacagcctcaggctccacacagaaatgtgaacttggcctcagacaggctggcccttcctaggctctaggggctaggggggagtggggagccaagaggtcccatattcctgagtgcaggggtagtccctctcacctgcttcctcagacgactctggaagcttccctctaccactgggcactgagacgaagctccctgacagccgagactggcagccctccatctggtccgtaccctcgccagaggcccccctacatcaacctcctggcgatgccctggtggagcagatgggtgctctgggagtcctgtgcttcctgatccaatggtgccaaacccttcatctccccaagaagcgcagcatacccctgggacccctcggccactgcccactcggggagccttctctgtttctggggcctcccccaccatagctctgattcccaccccacataggagtagcctgactgagggggaaggggtgggagagaagatacagacatggaggaggggaggctgctctggcaaagtcttcaaggcttttgggggtccaggcctggggtcaagaaggaaaatgtgtgtgagcatgtgtgtgagtgaggcgtgtgtgtgagcgtgtgtgtgagtgaggcgtgtgtgtgtgtctttcctaggacccaccataccctgtgtatgtatgcatgtttttgtaaaaaggaagaaaatggaaaaaaatctgaacaataaatgttttatttgctttaaaagtgcctctgaaagggccccccagaagtgagcagtgcgccgtcaagcgggtgtgcagggcacacagctgcacggcacagtgtgggtctgagtcactgccggaggagggaccagggtggtctgggccgcagcccctttaacaatctgcccttcctgccctgcaggaagaacccattctgaacacaccctggctgtccctggctgccccactttggggtgacaaagaggaggcagccctgggctgagtccacagagaccagccctgatatggcaggagtgggggtggggtgggggagtgggaatacaggagctcagccccagctcaccacggcatccccgaagagttgtgactcagacacacctgggtttaagtcccagctgggagctcaggtaagtcaaatcgtcttctggggcctctgtttatcagtagaaggctccagaagtatacactgttgatggctccttcccgctctgatgcaccatgcctgattaagcatacactgagcctagaagagagaaggggtgaggcacaggcctggacaagctcacccagcctaagcagagaggaaggcgccaggctggcagcacctgcctttgtggttctgagtctgtccggtttttccagcaggaagaggagcacctcattaccttagacctggcccaagctcctggcagcctggcagagtgtgagggaagaggcgctaatccctttcccatctggcctggcctctcgggtgtggacaccaaatcccgcaggggttgctgtagctatgcccgtgggcatccttgccctggctggggtgtgctagagagaggaaagctggaggaggagagctgagctggtggttaccccatgccaggagggccaaggcaagagggcctgcagccccagagatactgactctgtcccctgccctccagggcacaactgaactagcggaatggcttaatcagatagctcgagaactgccactaccactccctccctgcccactcctcccaaagtccacctgttcccgcaagagtcccacctcacaagcaaccaccagaggctgatacaaatggccgctgtatttttgctaaagtgacagtgacacagataaggcaaagagctgaggggcaggacacatcagatgggaagggggagaccgtgcaaaatggcagtctaacagaaaatcatccttgtaccaacagccccttccctcccaagttaggtgagcccttgggccagtgtatgggcagaaaagcagatttgtgtccttcagaagggaaatgtaaaaaggtgaaagctctagttgaagggcagtgagaggggctggagtgggagagaaggtctctcctggccggtggtctgggtgcagcaagggcactctgagaaggcagaatggaaacgcagggctggaggggcatgggtacaggtttgggggctctttccagcctctactatgttgcccccttccccaaagcccttacaggggcagaagcacattccccgtgaccctgagtctggcctcatttgggaagtcttctggggtgtatggatgcctgtgtgtgtgagtgagatgggtggggggccacggctatctggctctagcacactcatgggagaccagctctgggaacaacaggatggggtgctgggatgggggtttaagaggtctctgctagatatttctgaactgacctccccaggtgcccaacctggccttgggaagagagtgcctagggcagcggggatggaaacccttgcctgcagcataggtccaggcctcatggccctacaccttgacctcttgactttgttgccctggccttaagtacaaagattcctcactgcgtgctaagaaaacagatccaggccgggcacggtggctcacacctataatcccagcactttggaaggctgaggcgggtgaatcacctgagatcaggagttcgagaccagcctggccaacatggcaaaaccctgtctctactaaaaacacaaaaatttgccgggcatggtggcagatgcctgtaatcccagctacttgagaggccaaggcaggagaattgcttgaacctgggaggcggaggttgcagtgagctgagatcgcactactgcactccagcctgggtgacagagtaagactccatctcaaaaaaaaaaaaaaaagaaaaaaaaaagaaagaaaagaaaacagattcatttgaaaaggtctaaagctgccctctggccaggctgatgaggagcaacatggcaggatcccctctctaccacactcaggtttcctcgaaaggggacgggcaggacagcttcctgggagaccacactcgtcctgctgtgtattttctgccacagttctggggtcaccagggggtgggagtagcctctcccaacatctcagaggctgagtccaggtcctaaggcccccccagggtgcagagacctcaccccctgggtcagaaatcgctgaggatgctgatgtcagcaaagtcagcccggtagcggtgggcatagaggctgagcaggaaggcccacttgaaggaaatgaagctccagacgctggagaggtagtagctggtggggtctgtgaggcctgcagggagagaagtaccgacagtgactttggcaggccctgccctcggcctctgcaccggccacaaggccagggccaccctccccactcaacatccctgcaacgtcctggcagctgaaccaacccttcagaaagacactgtgatggaggttttagagccatggtccccaacctttttggcaccagggactggttttgtggaagacaatttttccacaaaaaccttgggatggtttggggatgaaactgttccacctcagatcgtcaaacattagatcatcaggggcacgcaaccctcgcatgcgcctcacaacagggtttgcgcttctaatgcccgccgctgacctgacaggaggcagagctcaggcggtaaggctcgcttgcccctcacctgctgtgtggcctggttcctaacaggccacggaccactactgttccacagcctggaacagtagaacggagctggggaccgttttagagtattccagggttttcaggcaggaggccgtggggattagggaagggcagggctggccaatcacaggtctgtatcatccactccgcttttgtgacaaataccctaggccacctccaacctgctttagttagcatcagactcccggaagaaggacctctggttatttccagccacagccaccagagggcgctcccatcccagagctgagcacagactaatgggtcccaatatcaggagtgcttgtatgggctatgcactgctcaagacttcacatcagtttcatagaatccacccaacttgcgaggtggggacttgttttctccacatgaaccataacaaaacccgtgtccggggaggttaagtaattcacccagtctctttggaggtaacctgtggaaccaggatgggaatgctgctaaaatccccgctgctgtccctcccatgccctctttccctgggacccgccctcactctgatgccgggtgatggccagcacgaggaaggtgcagaaggcagcgatggagacggccgagaagaggacgcccacgaagaagaagccgcgcagccccttgagccaggtcctccaataatcttgcatgtacatcacgtgcgtcaccaggacccacagtgccagcacccctgcaggagagacacatcagggcccatccccagggtgctccagagccctgcagatccactagaccaggcctatttgcataagaataccaagaatatggtcttgtctctcattccctcatagaatggagttttccttttcggaggctgtgatatcagaagcaggtaagagactgagctgcctgctagtaagcccaacattagagaaacctgcagaaatacaaaaccctaccattctctctgattttattttgttttggaaaacatgaatatctctcacaaaaatgttatgttaattcatgttatttttagtattactttaaaatgctaaaaaatgttctaacttctaatatagtatatatcaatagctaaaactcacatacataaaatttgcatggagtttcactacttttcaagaggataaaaggatcctgaaaaccagaaagtctgtgcctcagcagcccagcctgctttctggggacttgccactgtctaccctgagggccacagagcagggaagccatgctcctgccccatgctcctcctccacccagccctcagaggccacagtctcaaagtcacaaggcctgcagggctcttcccaaactgcctgagttggttttgcaggatgaggaggtccagccatgaagactccagggccacccaacccctgagtggccttattgttcttggccagacctcatgccactccctccattttgcggcaaagggcaggccatcaccacctgcaccgctccccacccccactgcccccagcttttcctgggcctggcctctgcgcctgggtggacacttcctctaggatgccagctgccacccagccaatacaatacaaaacaaccctctgtgccaggcagtgcctgctggtgcagcccaaagagtggaacaaatatcaactccattggcaagggtccgggcagggcggtggatcccggcaagggacaaatgaggaaggaggcagagccagctgcaggctctcagctggttgggttgcaaggtgtgggccactcaggccgctgcatcctaggagtcaggaggcctttccaaaaggcagctgcacacatgccactcagagtagttaccaaatgtgcacaggaaggataagcatctggttggggaaagtggttatctctggcaatggagacaaggaagggaagttgatggggcggtgggggtggggaagtgctttgaatctatgggaatctatgctattttgtttcttaggctgggtgggaaatctatgctattttatctacgctgttttctcaggctgggttataagggtgtttgttaaatcatctatccttttttgtgtgcctaaaatatttcataatttgtttaagggggaaaaaggcaggaggaagcttgtcactgtggagctatgctctggttaccagctcagaggctgtcccagtttggctgtccccagacagtccagtgaggaacaaaaacccatgagactccaagccaagaaaccaggagcctggcactgctgtgtcccaaagccttggtgtttccacatctaaaaatgggtgggcccaggggtcctgccagtttaggtaactgggcccagggttctaccctagtgagggtgaaggcctaccaagcctacagcttccctcagcccctgccaccgtttgaccccctgaacactctcccagctttgcccctgcccacctccactcttcctcagggggtgggggcctggaatgtgggtccccctcctactgagatcagggtgggccaggacaagcatctgttcctccccacctagtctggatgctggagtgggccagaggtggacaggacaatcatcctgcagcttcctcttacctcctacaagatctggatttttataccagccacctttcacagaagtccctcccactcctcacatgtgtcccatgttttcatttgagggagctgtttggtttataaagggccctgggaacaaggggtgttgtcactgagcacactcaaggagcagtctgatgggcacctgtctggaacaggtcccctcgccctctgtctcctcgtgccacagaggggttggggaagttgagctctaagatcctttcccactcaaagattctagaagccagcttgggagaaaaataaggtcagaacaattcctctgtgactcagcagtttctgggttaggaaatgctgaaataggggcctgtgaagatgccatctcttagtccactggccacgatccagtggttccccaaaactcccacccccatgtacatgcacataccaaagagggctgagggcaggagggagaggaagacagccatttgggggcgttttgggccctgttctttgttaacaacaggcatggtttacccacctctcaccttccctcaaccttgctccaggccctgcacagaggcctcccctccagataaacacacatcaagtgtggaggcaggcctgctgcccacgccctggctcccaccaccctcctgggaagggagctctccaccagccctacccaagggggtcactgaaggagatggagcccctcactggtcccctcccacacatcaggcaggaggcaatgtatctccctaatacccttccctggcacacttggggactctaggaagcctggtttataaaactcggggtggaatggacaggtccccaatcccacctggctgcaagcccacaccagaccacaccgttgctccatcctacctgtttcaaggagcagagcccctgcttagccatgtgagcttattggctcacagccgataagctaagggtaaggaaggcatagggtagggcggtgaaagcatccccagtggctgggctggaggtgaggagacaggagacacccgggggatcccacagggtaaatgcagacaagaaggacactgggcctaggtcaggcccctctattccttcctaggaggaagacagtcctggagccccagggctcttgctcacagctcacctgggaaaaacatagagctgtttagacttcaggagcaacttttctttttctctttccttggtctactaaacccagagcaagagtttgtgttttcccccaggactcccacagcaaagccagaccaggtagatccaacccacacctgcccgcctccccaggaaagccagtcttgcttctgccactgcctttctccaaagccacttcttcgaaggtacccatcaggatgggagagggtatccccacccgtgaacactctgcccaccagacccaggggctccatgactctgctccagaaactggcacatccaatcagtccttgcctggtccaacacaggagaaggagcatgctggggctacccttgggtgactcagcagattctgagctataaaacgctgagtcagaagtagggtgctcacacgttagttaatctgctgacactttacccccaaaagaggaagaaggttgactggccacagaccctctgagaactcactcatggtggggaaggtcggaggcccaggcttggcaacccctctccctgccaccatccaccaccaccactaccaagcagttttggctcttccacagccactgtcaaagatcagaccatcagggagataccaggaccctactccagctggctgctgccctagcgagctgctgccctagcgagctgctgccctagcgcctctctctgaaggcagctccacagctggcctgcctcataggccaagggaagcctgtggggagggagagagggcagagttgggtcggaagaaaaccccaggcaactccctagagtataagaaagaaggccttttccacagccctctaggaggcagctggagactcagggagtgggcagcactgcaagatttcagatctggagggaagtcagatgtcttttggggacatctcctcccactcctaatagatgaggaaactgtggcccaggatagggtcaaacggccaggtagggttcacctccacttgtaccaggccagactcaacacaaccagctgagatcccaggctggccctccctgctcatccttctcttgccttcggtcttcgcaatgcaatcatagggctctgacgccgccttccagaggggaaagcaacagggccaataggaaacaaaaaagtggcagggagaagtgaaccttgacaaacatggagggtggcggggtgcagtggggaaaggaactagggctctgtagataacgcgcagagatgggccagttgtcctcaggatcccacaggtggtgaggcagctgggcaggcagagaacaccctagccagggtgcccatccccccttcttggtgacccagtgctttgttggcattgtgtagggtggggccctgtatgcccctcttctaaggcattaaccccacctcatgctgcgactctacccagggatggcactcagcactccctgtggcagtgagtaaattagttatttttagttattccatttagggttcttttggccgaggattttagtaatggaatataatcatcatatgtaaaagtattatacgtattttcttcccaaagtcctttcccacacatattatttcatgtagctgtgtaatcccgggtaagcaatttatttaacttcaggcctcagtttccttatctgtaaaatggacataatcgtaaggcctacttcatgagactaatgtaaggattaaatgaaataagggaagcaggttgcttaacatagtgcctgacacatagaaagcattttttaaaatgttagaaagtagagataatatttttcatcttcataccaattctatggcgcagagaggttaaactgcgagcccaaatgtgcacaacaaggagcactggtcagcccagagcccccatcagcgcaccgatgcttccccttccctcccagaagcacagaaagggcggctggcctgcaggatttggcagagcttggctgaggagccacagcagacgggtagcaaaaaggcaccaacatgggtggaaagagaatgtccagtttctatgagatccctaacgccgtcctccctgtgggtctcagcagagggctctgcgggggagccctctggaaggagggagatgggcttccccagccacccctagccctcttcctttcccacttcttccctctctgccctcacccagcacccagggaaggggcgcctggggggcaggggatccctcagaacaaccgtgtgtgtgtgcgtgtgtgtgtgtgtgtgtgtttggggataggaggcgaccagcgccgcgggcgcgcggaggggacactgtcgtggggcaactgggcggagggcgacaggcagtgtgccgtgacagataacccgggcggcgcggcaggtctgtgcagccggcagtggcgggccgtcggcacccccaggtggcgcccgggcgggcatcgggtctcagaggcacccaggaatgcccaggagcccgggcccgcgtggggcctgccgccgccaaccgctgttttcgagtaaacactccacccgctccgcggggaagcgccgctcgcggggagcgtcctggagcagctgacggcgcccgccccgcagccgcgcacccgccccgcgccgcccagcgtcccggggtacctgcgagccctcccatggccgcggtccccggctgtcggtagaccaccgtccagacgaggaagatggagaagccggccacggagctgatgccggagtaggcggcgcggaggccgagctgcagcctggacggggccatggggctgcggcgccgggcgggccgagggcgagcgcggccgagagtcacaggtgcagggcccgaagccgccagccggagccgcgggagccgccaga

SEQ ID NO: 9896 - DNA, 375 bp, Homo sapiens
aggctgacagtgaccgcaggacccatccgactctgggccctcgggggccaatcctggggagcccccacactcccctcttcctgccccatggcttggagcccgaggctgggggcaccttgccctctcgcctgcagcccattctcctcctggacccctcaggctctcatgccccgctgctgactggtgagtctgctgcttcttcagggaaggggctgggtccctgcaccctgctaagagccaagcttgggatggacccatccttcctccccatctctgtccccctgtcctgcgcattgccctgctgcaccctggccccccaccctataccctcgcttccttccattgctccctgtggttccctccttattccacccc

SEQ ID NO: 9897 - DNA, 924 bp, Homo sapiens
cttaaaagccatgtagttaagtcatataaattccaaaatgtatcagtttcttctgtgtaggtaagtgactagtaatagaaactaaattattaatatgtactagtgggacatagggaagatgtaagtaattaccatggtgcctgtgtacaggtctccattgttttggggcaatgaatatcgaatgctttctcattcttttcctcttttcccaccaaattgtgatttgtcactcctctccacttctttttgttctgcattttttgttgattgtttagagctggtgaacagcaactatatttaaaaaaaattgaggccaatttggtaaagaaatgagaatctgaattccagtttgctataattttaagctatttattaaatataaagaagtggtatttaaaattctcaggtattggaaatcttactgtatgttttaaggaacagtttcttaaagtcctaatcattgaattagggagacatagagtctcaaatataatgtgtcatttgtatgtattttctttcaacgataatgtttggcatttggatttgattttattaacttaaaagtttttaggcagtatgttaaactggctcaatgcttcgtactagttcttttacacaacttgccattattgagttattttctgttgcagaaaaggcaatctctttcacctctggatgactcaaatcaggaaatataagcaaaagaagataaacaattctttctgtgtctttacttctcagtctttcccaatctggctgaggcacataaagcagacttgaggaaattctttacttaggacactatcttaacctgctcagggtatttagaattttttgaaataagcagtcatgtacttctataagtgctaaggaaagtaaattagtgtattattaaatattagatcttaaaaaaagaattaaaaa

SEQ ID NO: 9898 - DNA, 2884 bp, Homo sapiens
cagaaaatatgcctcatacaacatgagagatgtcatacaggaaagactccctttgtatgtaccgagtgcggaaaatcctattcacacaaatatggcctcattacccatcagagaattcacacaggagagaaaccttatgagtgcaatgaatgtggaaaagccttcaccacaaagtcagtactcaatgtacatcaaagaacgcatacaggagagaggccgtatggatgcagtgattgtgagaaagccttctcccacttatcaaaccttgtcaaacataagaaaatgcacacaagagaaatgggtagaatcagtcaagttgaaaactcctgtaatggagagtcacagctccttccttataagtgaactcatgcagaagaaaaccctactagtgccgtgactatggaaatgccttttgtggcaactcagacttcattaaacatcagtgtgtttctagccaattggaacataaacatggtgctgcctgttgacagatgtgtgtctgtcctcaggaggtgaaataatttgccctagagatcaatttgatgaatacagtaaataaggtagtgcctttagtggtcttttacctcatattttctgtcaatgaaaatacgttgaataaactatattaatgtggagatgttttgagcaataatttctgctcatatgtctgaaaagtatacagagataaattctgtgaatacaaagactaagaaaagtcttctgtggaaagatagactttattatcaggtttcatcatagatttcaacgtaagtgagcttattgttgatagaaacatgatgaccatgacaaagtctttactcagaaatatgacctcagtgagtgtcaaagtttacactggaaaataactttaaggtgacagtattgatggcaggatttcagcgacgcactctgcttcatcatttgtcaggagatcacatagaaagtaaaattgttccgaacatgctatcaaataaatgtggaacacctttagcaaactatcaacagctcatgaaggcatgaaatgtggtgaaaatgatgaatatttgagtgctttttcttaataagtataaccttaaacatcagctaatacacctggtgtgcattttcagtcaggataccttaatcctcatttctagttgccttgccaatgattccataatatactgtctcattactgtttatttttactgttgtgtaaaattgtggtataatgagaaatacatttggtctttgttcctggttcctggcatagagctcctaaaacgcttagaatttcatgagtgataagagttttttggttttgttttgtttttgctgttgttgttattcatagcactgcccttttaattacacctgattatactactgaagtgacttatggttgctcccctagacagcctcagaatggggctgttctctaggaagatcaagtaactagaggatggagactttgtgccccatttctcccacctcctggaaggggaggggtgctggagattagattagacaatgagattaagagaactccaaatagcccaagagggtggtgcacccccaacttcataggggtagaggctcctgagattaggagaaccctttttaggctttactctatgtacctcttcatttgagtgttcatttgcgtcctttataaccagtaaaacaaagtacgctgttttcttgagttttgtgagccctgtagcaaattatcaaacctgagtagggcagtgggaactcggaatttatcaccattcagaactgcaggttgtccttgtgagtggcatctgatgtgggggaagtcttggactgagccccttaacttgtggagtctgcactaatttagactgcactaactaacttgcactgcactaacttggactgcactaacttgtggagtctgcactaacttggagaagttagtgtcagaattgaattatagaacacccagttgttcagaattgaattgtagaacacccaattggtgtgggagaattagagaatttatttgtgtcagaaaatactccagaacaaccaccccatattatgattagctcttttcctttctttggctctgagcttaattgtacattaagcaaacttaagtagaaaagaaactgaatatgttaaatatattaacaacatatttggacttgcttaactaagattatagagatgatcagtttataaaaccaccttcaacttaaataaatttgaactcgaaattgcaaaagcagtctagaggctttgctagtatccttcaaccaatttctagtaaaaatatcctatataaccataattatcaaaaccagaaaaacaacattggtaggatactataaagtactaatcttattttggatttgacgaatttttacatgtttttttcttttttagtttgtactctaagaagttgtattacatgtacagattcgtgtaaccactgcaaccacataaaactaatgaacacaaagtccctcatgctacctttttatgcttacactccatccaaacctaactctgccaaccacttttctcctatcagtataatttcatcatttcatgaatatgataaaaataaaattgtttttgtaaatggtttttataaattttatataaataagttatatgaatttttattgatagagagtatgtaagcttttggcatttttgtcactcagcaaattactcctaaggtttatatgagttgatgaatagttgttttattatttttttttaccaccatgtatctaaccagatgaaagttgtttatatttgagagtagtatacatatttgatgtagtagtttatccattcacctatgagatatatttgcactgttttcctggttttaagtgctataaataaagatgctgtgaaatctacatac

SEQ ID NO: 9899 - DNA, 96 bp, Homo sapiens
ctatctcttttgcctaataaatatggagggctgtgtaaagctcagggcccttgtccactagaggcaaggtgtcccctgatcccttcttccaaatat

SEQ ID NO: 9900 - DNA, 912 bp, Homo sapiens
gtaactatttgtggcaagccaggtcgaggtcactctctttgagggcatttactcactgcctagtgccccctttccactgggacagacccagagacaaaccctagcagcttacttagctctcatgaactaagggctgtcccttagttctcccaaagtaacccacaatgcaaccctgatgggctgcatcttccaaaattgaaaggcctttgtctatcattccatgaaacaaaaaaagattatcttactttttaacatggcttaaccttaatacccactggatttcggagaacagtggccactgcatggttctcatgcttacagtacgatcctgtagctagatttgttttgtaagaaggaagaggaatgagatgaaataccctatgtataatgttttatgttgctttggaaaagtacaacaatgtagaaaaaggtaaaatcatgataaagtaagaaattaaagactgtttggactgatttacaagaaaaagatgatgctatgatggttcagttaaaggaacctatgactcacccccctccactttatgggggagctgcagcagcactactggcgcctctccagagtccccaccaccaaaaagtcacaaatccggggcaacaggtatgatctctacttcttataacccaacaggggactccatttaggcagggtgtcacttcttatacccaacagggaactccatttagccggggagtcactctggttctgagaggcagtttccccataacaactgcttacaggaggtgttgctgccacaggccagcctataggatttatcttggtttattctctgttctccacttccaacctacttaattagaaaaataatatgcctatttattgagaagatctaaagtttatggaaggaacaggattgaaaaaaaaaaaaaaaa

SEQ ID NO: 9901 - DNA, 911 bp, Homo sapiens
gtaactatttgtggcaagccaggtcgaggtcactctctttgagggcatttactcactgcctagtgccccctttccactgggacagacccagagacaaaccctagcagcttacttagctctcatgaactaagggctgtcccttagttctcccaaagtaacccacaatgcaaccctgatgggctgcatcttccaaaattgaaaggcctttgtctatcattccatgaaacaaaaaaagattatcttactttttaacatggcttaaccttaatacccactggatttcggagaacagtggccactgcatggttctcatgcttacagtacgatcctgtagctagatttgttttgtaagaaggaagaggaatgagatgaaataccctatgtataatgttttatgttgctttggaaaagtacaacaatgtagaaaaaggtaaaatcatgataaagtaagaaattaaagactgtttggactgatttacaagaaaaagatgatgctatgatggttcagttaaaggaacctatgactcacccccctccactttatgggggagctgcagcagcactactggcgcctctccagagtccccaccaccaaaaagtcacaaatccggggcaacaggtatgatctctacttcttataacccaacaggggactccatttaggcagggtgtcacttcttatacccaacagggaactccatttagccggggagtcactctggttctgagaggcagtttccccataacaactgcttacaggaggtgttgctgccacaggccagcctataggatttatcttggtttattctctgttctccacttccaacctacttaattagaaaaataatatgcctatttattgagaagatctaaagtttatggaaggaacaggattgaaaaaaaaaaaaaaa

SEQ ID NO: 9902 - DNA, 911 bp, Homo sapiens; identical to SEQ ID NO: 9901

SEQ ID NO: 9903 - DNA, 318 bp, Homo sapiens
aaagcctgatgttaaacagtcagccttctgcccaccaaatgcctgggatagctggggagcttgagagagatactaaagaaaaagaccagaaatggtagcacccaggggcttctcctgacccagacaacaccctccatatttcccacatggggcttgagatcctgatgatggtgagaaatcagcttctggactttctagtagacatggtgccatctatttggtgttaaatatctggtggtctaaactttcctcagaaataatgaaggtgactgaaatctcagaaaaaatgctgatgagatcattcctccaaattttgga

SEQ ID NO: 9904 - DNA, 195 bp, Homo sapiens
gatcaaagatgacaagggccaatggaaccaagtttgagtcttgccaggtcaatacttgggtcctgagtatggtgactagtatctgttttgttatgtgtgtattattccagccagaatgggaaatgctaattcagctcctccaggcagcccaatggggctggtggctttgagattattaaactctttctctgctgc

SEQ ID NO: 9905 - DNA, 318 bp, Homo sapiens; identical to SEQ ID NO: 9903

SEQ ID NO: 9906 - DNA, 195 bp, Homo sapiens; identical to SEQ ID NO: 9904

SEQ ID NO: 9907 - DNA, 318 bp, Homo sapiens; identical to SEQ ID NO: 9903

SEQ ID NO: 9908 - DNA, 195 bp, Homo sapiens; identical to SEQ ID NO: 9904

SEQ ID NO: 9909 - DNA, 2849 bp, Homo sapiens
caagtaacaaaaaaagcagtgtcatgttttattgtgtttttcttaatggaacataaaataatggtgattcttataactgatggcacttcagatttggtaaaactacaattttgaacatttaatgaatgacaaagacataacatcctctgaaaaatctgcaagtaaatcaatcatttttaaacaatagctaccatatatttgtatcttctccttgggaaaaactttggaaaaaaaaacacgcacataagtatcataactgagggttgtggacaagttacttcttgtttaccaatttttatattgacataaagtagcacagactagttatttcatttaaaaaaacacactgacaaatcttttctctattacacttataagacttttcacttatatgcttataccaatatagaaacacataacttgagattctagccaatttttattttcttgaaactgtttatcacctgtgtattatctcagtttttccattttcctgcctgcttcttgatgtctgcatttgggccaattattgtttctcagcatcaccagcatgtggacaaaaaataagatgaaaactaaagtcagttcatctggtaatttaagttttgttagaaggactgataggagataatgcaagtaatgtctatagtgaaattatatgattattgatgaatctcaattattactaccactttccccacagataactgagttttgtgtgcatatgtgtgttttcctatggaatggaacataaaggaaaattttaaagatatacaaacacatgttcaagtgtataatacatatgtacttttagtttcattttgataaaattaatgagatacaaattttatcatcaatttcagaggtctttgtatctagttctttatcaacgaaaataatcacaatatattgggcactgagtgaatttgtcagctatggattcgtttctgaaaaagtatttctacagtattcctacactactctgaagaccctacagtatgccatttttattattaaaaatagaattacagttgaggagagaagtgccagtgaatacttagaacttcactggaccaaaagcctcaaaaaagatggaaaaattccaaaggtatgcttagaaaattacctttaaaactaattatgtgaaaaaacaatgctccacaaatcaatcattattaaaaacaaaaatactgatacacatccaaaatagtatctcttttctcaacttagtcttggaatatttttcatcaaaatgacttatatgtacttttgcactattaatattatgctacaacaattatgttaatacagttttcattaactgagttcagtgaaacagcctacaaaaaatacctatctctggaatgttactcaaaaaggcaaagtgtacaatatttaaaatacctctacatcaaactgctttttaaactgatttctagaaaaatttgttccctgtaagttatcatatcttctacatctttgtagataagcatttcttcaatggacagcaacttatagctattcaggctgaatgctgacttgttcttaacagcatttaacatctttagggatgttataactgagtcactcaaagaagaacaaactgggaaaatgcgtgcagtccacaaactcagacatgtcttgttaccagagaacagttcctctgtaactttaagattccaaacatctaagcatgacaggaaacagactccaaagaattgaagtaactttatatctgacaatgttttcacactctttttcaagttgtcttgcactccaaatgccatagttgcatactttaagcatctattcatctttaagcttaaggaacatacaaaagaatgtgcggggagggcagcttttgttaggatgtaagaaccactaataatgcagttttccccaactgaaacatcaggccccaatctggaatactccacaactgagccaggtgccacagaacatcttgaatccagtatgctttgaatgatacaggatgttttgccagagcattctggtatatctggaaagatactaaaagttatggactgtaagccgagctctgactttaaactgttatctgaggtaaagtaaaacaaatattcttcggttgttccaatgtgataaaatttggagttattaagaacaacaacatttagtgatgttcctttaagaagatgaaatattctctgcctcatttctaccaactctgactcttctttaatgacatttgatgtgtttctggtgtactccacagttgctccaggtcccaaagcctgcagaaagtcaccataggcatctatttcacagctcagtgtgcctattttttcataaaaagcaagtaacatttttgctgatttatgatccatataaaataggctatctgtgtagacatagtcagagtctaatttaagatcggcaatgtcacccccagcaaagtcctgttgacaaaaatttccaggtctacacacagcattaaactgatacatcttttctatgctgggcttatgaaggaaacgatggcaagacctgtattcaaggtctctatgttttaaatcatcaaaaggatctaagacaaatactccatgtgtggtacctatcgtcaaactagaaggatgagctaaagcagtaaagccaggtttgtcaaacctaataaactcaaattctccaatactataaagttcaatatcatctgcacaggtaaccagaattccaggattcatatttaaggggaaatcaatgtacatggctagttttaattctagcatctgataaatggggttaccaagaggtaaagcagtgaaaatttttcccagagcacttgcatttggaagtcgttgactgtagccacc

SEQ ID NO: 9910 - DNA, 2113 bp, Homo sapiens
caagtaacaaaaaaagcagtgtcatgttttattgtgtttttcttaatggaacataaaataatggtgattcttataactgatggcacttcagatttggtaaaactacaattttgaacatttaatgaatgacaaagacataacatcctctgaaaaatctgcaagtaaatcaatcatttttaaacaatagctaccatatatttgtatcttctccttgggaaaaactttggaaaaaaaaacacgcacataagtatcataactgagggttgtggacaagttacttctagtttaccaatttttatattgacataaagtagcacagactagttatttcatttaaaaaaacacactgacaaatcttttctctattacacttataagacttttcacttatatgcttataccaatatagaaacacataacttgagattctagccaatttttattttctcgaaactgtttatcacctgtgtattatctcagtttttccattttcctgcctgcttcttgatgtctgcatttgggccaattattgtttctcagcatcaccagcatgtggacaaaaaataagatgaaaactaaagtcagttcatctggtaattgaagttttgttagaaggactgataggagataatgcaagtaatgtctatagtgaaattatatgattattgatgaatctcaattattactaccactttccccacagataactgagttttgtgtgcatatgtgtgttttcctatggaatggaacataaaggaaaattttaaagatatacaaacacatgttcaagtgtataatacatatgtacttttagtttcattttgataaaattaatgagatacaaattttatcatcaatttcagaggtctttgtatctagttctttatcaacgaaaataatcacaatatattgggcactgagtgaatttgtcagctatggattcgtttctgaaaaagtatttctacagtattcctacactactctgaagaccctacagtatgccatttttattattaaaaatagaattacagttgaggagagaagtgccagtgaatacttagaacttcactggaccaaaagcctcaaaaaagatggaaaaattccaaaggtatgcttagaaaattacctttaaaactaattatgtgaaaaaacaatgctccacaaatcaatcattattaaaaacaaaaatactgatacacatccaaaatagtatctcttttctcaacttagtcttggaatatttttcatcaaaatgacttatatgtacttttgcactattaatattatgctacaacaattatgttaatacagttttcattaactgagttcagtgaaacagcctacaaaaaatacctatctctggaatgttactcaaaaaggcaaagtgtacaatatttaaaatatctctacatcaaactgctttttaaactgatttctagaaaaatttgttccctgtaagttatcatatcttctacatctttgtagataagcatttcttcaatggacagcaacttatagctattcaggctgaatgctgacttgttcttaacagcatttaacatctttagggatgttataactgagtcactcaaagaagaacaaactgggaaaatgcgtgcagtccacaaactcagacatgtcttgttaccagagaacagttcctctgtaactttaagattccaaacatctaagcatgacaggaaacagactccaaagaattgaagtaactttatatctgacaatgttttcacactctttttcaagttgtcttgcactccaaatgccatagttgcatactttaagcatctattcatctttaagcttaaggaacatacaaaagaatgtgcggggagggcagcttttgttaggatgtaagaaccactaataatgcagttttccccaactgaaacatcaggccccaatctggaatactccacaactgagccaggtgccacagaacatcttgaatccagtatgctttgaatgatacaggatgttttgccagagcattctggtatatctggaaagatactaaaagttatggactgtaagccgagctctgactttaaactgttatctgaggtaaagtaaaacaaatattcttcggttgttc

SEQ ID NO: 9911 - DNA, 1562 bp, Homo sapiens
gcagttttgattttggctttattgctgaatttggtaatcttaacattaggagtactatgtagctacagaagatgactagatcatcacaggttatgggaattaatcctggattcatgccattaaacttttgacaatttcagagtatcacttggatttttaaagctttatttcaatcagtatacactgatacatatcctttatttctgctttgcttagagaataaatgcctaaggtaaaagattattatcaaatgttgaatttttcccatgcccttgttgatagttattaaatcatcaataagtttatggattatagttacaaatagcaggcttttacacacctgagtatatgatgtaagcgccatgatttcataaaaataaaaattataaaatgagacaaaatgtttaatttcaaacttatccatgtaggtcttatttttctactgctgataaaactcagaaaaaaattatctttattggaagactaaatgaaaagcctaaaaaattaagattgtcacaaaatttagtcacttcttatcaaaaacacacttctcctctatcatcatgtacactgcattattcagggattaaatttaggagtgacttactttttttttttttgcctagatccttttattaaaacacatacttaggttagaatcattcctaattcatctttttttatccacatttcgacaccccagaaaacagaatgtgccttacaaatgatagtatagtagctattagccaggcagcaacagtcatggagttgttacttgctcacatgtgaacttggtcatatctgcgtatatgactgtcacttcagttgaattaggtacattattggtggtacgtttgtgctactacacaccaagcaatacatctcaaagcaagagacattgataagtcctttgaacagaaccatttcaaagcaaccagaatccatgcattgtgcaggattatgattaaaattcagattaggttaaaatacagtattgagcacttaataaacatataacatcctctgaacgctctgtaagtagataaatgttaaacaacagctaccatatattttctttaaaaagaatcttgaaaaagaaaaaacaaacacacaaataccacaattgagggcttcagacaggtcacttctggtttaccaaacaataattttcatattgacatgttaatatgacatcaatttgtgagaaatctctttctgactttgaatagaatcacaggtccgatcttctaaggacctgtgattaaactgaaagaaaagtgaaactgagttttgccaaatagaagggtatcaaatcttgcaggagtgtgggtctgtagctgggtaaaaaaaatccagacataagtgtggtagagcactcaggaaatgcagccttaccaataattctgaaagcacacaagatggtactaggtggacatatgcatatcaatagctctgaaagtgctgaagagtttgaatgtgaagctgtagaaatttcttgatgatatctcaatattttatttttttgttattttatatgtatatgcaagagggttaaataaaaa

SEQ ID NO: 9912 - DNA, 1563 bp, Homo sapiens
gcagttttgattttggctttattgctgaatttggtaatcttaacattaggagtactatgtagctacagaagatgactagatcatcacaggttatgggaattaatcctggattcatgccattaaacttttgacaatttcagagtatcacttggatttttaaagctttatttcaatcagtatacactgatacatatcctttatttctgctttgcttagagaataaatgcctaaggtaaaagattattatcaaatgttgaatttttcccatgcccttgttgatagttattaaatcatcaataagtttatggattatagttacaaatagcaggcttttacacacctgagtatatgatgtaagtgccatgatttcataaaaataaaaattataaaatgagacaaaatgtttaatttcaaacttatccatgtaggtcttatttttctactgctgataaaactcagaaaaaaattatctttattggaagactaaatgaaaagcctaaaaaattaagattgtcacaaaatttagtcacttcttatcaaaaacacacttctcctctatcatcatgtacactgcattattcagggattaaatttaggagtgacttactttttttttttttgcctagatccttttattaaaacacatacttaggttagaatcattcctaattcatctttttttatccacatttcgacaccccagaaaacagaatgtgccttacaaatgatagtataatagctattagccaggcagcaatagtcatggagttgttacttgctcacatgtgaacttggtcatatctgcgtatatgactgtcacttcagttgaattaggtacattattggtggtacgtttgtgctactacacaccaagcaatacatctcaaagcaagagacattgataagtcctttgaacagaaccatttcaaagcaaccagaatccatgcattgtacaggattatgattaaaattcagattaggttaaaatacagtattgagcacttaataaacatataacatcctctgaacgctctgtaagtagataaatgttaaacaacagctaccatatattttctttaaaaagaatcttgaaaaagaaaaaacaaacacacaaataccacaattgagggcttcagacaggtcacttctggtttaccaaacaattaattttcatattgacatgttaatatgacgtcaatttgtgagaaatctctttctgactttgaatagaatcacaggtccgatcttctaaggacctgtgattaaactgaaagaaaagtgaaactgagttttgccaaatagaagggtatcaaatcttgcaggagtgtgggtctgtagctgggtaaaaaaaatccagacataagtgtggtagagcactcaggaaatgcagccttaccaataattctgaaagcagagaagatggtactaggtggacatatgcatatcaatagctctgaaagtgctgaagagtttgaatgtgaagctgtagaaatttcttgatgatatctcaatattttatttttttgttattttatatgtatatgcaagagggttaaataaaaa

SEQ ID NO: 9913 - DNA, 807 bp, Homo sapiens
gataaatgagcatttaggaggccagccccataaacatctagccatatagaccccttaacattaaatgagttgctctcaaaactgaatgtctagactttaacagaaaagagatacttaacctcagggaaaccatctatctgtccaaattatccaataattgagtttcctaagcagaaaattcaatgcctaacttcaagtttttctttcacctttgcattcactgggaattttgaatggaagccatcttcacctttacggtattaaatggtaaaatatagattttcctacaatgcatattaagtactgtaaaaatttctcttgtatgggtattagcctttaatttgtgcaaacagtagatactaaaaaagaatactaaatgaggaaactccaaagaagcattttctaaaacatgttcaatggaacaccagctccttgagatgttcaaaggatattcctcagatagggtatacattgatcaataagtttatgaaatttgggccaaacaaaattaaacaggtttactgacagaaccagcctgtcagagcctttaaaatgcaaacccaccttgtgaatctctatggtaagacataatattcggtgtttaccatgcatacttaatcataaagctgtcttttcttggaacatcttacagggcttgtgtccccagtacaaactttagaaaatgtagccttaatacccttcacgttactccaatctaccactctaatggcttgtctactcttcttcatacatgactagcaaatggtggtgtttatgctttaaaagaacacagatctaaaaaataaa

SEQ ID NO: 9914 - DNA, 370 bp, Homo sapiens
accaaagccacagttgggcacgctaatctttagcaatattactccaaaaagcttcaacatgtcatggaccactcaagctgggctttttgcaaagattgttatcaatgtgagtgacgctcactcactgcatgagtcccagcaattcacagtctcaggagatgcaaagcaagctcacatcacaggcttggtggagaacactggctatgacgtcagtgtggcaggaaccaccttggctggggatcccaccagacccctcactgcctttgtcattacaggtactcaatcagaggttctcacttgtctaacacagagagaaaaggagataagtcatcttaaaggaaaattcaacaaaaatacaatcttcactgca

SEQ ID NO: 9915 - DNA, 1416 bp, Homo sapiens
atggtaggagttttctaccatatcatattgaagatatgaagaggtattttccagcttcccaagtttgagagttgggcatttacctcttacacttcagtcaacaaacaaactagtaattcctaatgcataattaatttggatgcaagataagattaagtttctggagttttgttttgacttctgaggtgctaaaaaataccatgtaaattctccctaccagctagaagggtagcaagacgttgtagagtgcttatcagagagtaccatttacttcaattgatcaatataaatatatctttttttttcatcttaatgagtttctcataaagacacatcttggggcataccaaccttcatattcattcagtgtatccattggtgttaatattaacaatttcaactaaaaacaacaaacataatttttctaagtgtttcgagctgtgagatgtcaatttctacaatttagtttctagacatgctgtatatttaataaactttatgtaaactttaaaatattgcactgcatttatgaaaaaagctttctttgcctactgcagctatctaacattttatgaaactgacgcatgtccttcattattgaggctaaaagctcttgttcagattgcttgaggtttgaaaaagaggtgtgctagctttgcttagtttatttcttatttttggtatacatatacatatatataacattagaatgtgtgtactggaaatgctatgataggtattttgtgttaatccaaatgcaatgatagtttcttgtatgaatgtgcaagaggcctgtgaccgaatgctacgtttttatggtagtttaagattataaaagtagaaatgcaacaattcccagtttttggataggttctaaatttctgagatttgattcatggcagatattctctgttgttgttgttttagatgggctcattacataacgagttaattgtcactagtaggagactgtgaaggaattttgttatactttcaaaaatgttactgtgatgaaaaatcatctattttcagaaaatatttatgaattaatttactatagaattatctctctaattatcataattgggttacaatttaagctccccttttaaatgttatattttaaaatgttattactctataaaagaaaattgcttgctatatttacaccttctttcctaggaaagctttcatccttaaattgttgtattcctaccctctgaagacatttaaaataagcttttgtgcctgcagcagagcctgcagaagctaatacaagggacactggtcttttgacaaaataaacttgtgtaaattttgatactgtattaaaactatttttttaaagttctgcataaaattgagtattaagtatatgtgttcatcttagcaatggtaataaattatttaatctca

SEQ ID NO: 9916 - DNA, 559 bp, Homo sapiens
tgaactcattcatgtggatattttgtctcttgtctttacttcatcttcgctcctctcttaatttacccttaagaaatgcaaatctccttgtgaaagaggaaaagtaagatactcactccttctttttttttttaaggttgtgtggaggaaacttggagatgctgcaggttcgtgtcctggaattaggcaacatttgtcaggaaaccagtacaaaggaccaatgtgagatgcactctttttcaaacaggagatcaccactgccagaaagtgatagaagacaagaagaaaaaggaaagagtgggtttccacaaacctggactcatggaataacatggagtgattgtacattgcacatatctcccctctaaaacctgtagtacaacttctcccctcaagctgatattctgtgtctctcacctcaatgtccacaacagtcaatctcaaacaaggtagctttgaacatctcaaacagagtagctttgaaaatcaacattttggtaccagtgttttcattagaaataagtgtttttaactccccagatataatattgtaattggg

SEQ ID NO: 9917 - DNA, 6586 bp, Homo sapiens
ttttttttttttatttttttttatttaatgttttttttttattatactctaagttttagggtacatgtgcacattgtgcaggttagttacatatgtatacatgtgccatgctggtgcgctgcacccactaacgtgtcatctagcattaggtatatctcccaatgctatccctcccccctcccccgaccccaccacagtccccagagtgtgatattccccttcctgtgtccatgtgatctcattgttcaattcccacctatgagtgagaatatgcagtgtttggttttttgttcttgcgatagtttactgagaatgatggtttccaatttcatccatgtccctacaaaggacatgaactcatcattttttatggctgcatagtattccatggtgtatatgtgccacattttcttaactttataacctgtgtggggcaggagaattaacctgcttttggattagaggctgcaaaaaagccagttctggtgaccacactaaaaagattaatgagcacttagcaccaaattaaatacccccctgcccccgcctttatgaaagtggagttcatagtacaaatgtgacagcgttaaacattgaagccattcgaaggaacctgggaagtactcaggcaccgatgagttaaaaacacagagacatccagtaagtgagttcccgctgggcacgggtctgtttatcttgcctttctgaagtcagagccaacattcttaatggttttgaatgattcagaatgtttcttttttggcagggccagtttccacgcatgggcttatgactaaaaccccttaggtgaggtccaaagcagaaaccagcctcacacttaatgttgtatttcagaatcatcttattttagagcaaaaggaaaactattaaatatagcttgcttatttcagacatgaagggacggaaccaaggaggctttggtcagccagaggtcacaggactggagagagaggccagcccgaggcagacctctgggttctgggcccagccctccctcctctgcaccacacagctcttgtccagacctcggaaggaggttccagcgtggcctcagcctcccgctggaagaggcagcttgccctttgagatcgtttagaaaacgacttgggtcagaaaggagaacttcatttttacaaaatgaaacaaatcagttatttgccatagacagctttttcaaaatatcctttgcccgtgtgtcgtgaatgtattagctctgggacagaaacaagaataataacaattctatctactatatgccaaaagaagagacttgatatacttctttttttttttttttttggatgagaatgaacttatgccacactagttcttaataaaacaaactgaatccttaccgcaggagaaagaattgagcaatgttctaagaacaggctgtcctctttggggcactgagtgaatgtaatatttagaagatgcccttgaagctcacaagtgcctcttgggatggagtaaagggggagaaacggcgagagaactcggacagagaagccgtccatgggaggagaaggccttgggaagagccatcgactcacccccttcctgcttgattgaggactttgggaatcacagatgccataggagagaacccatttcttcaaagccaggaggtgaaccggcccacccctgctgtgcccaccacactacagccagtaagggttctcctctggacctgagccactgtccccaagggccagaaaccagccatgtgtggcgtccccagaaaaggacatgagcaggtactcagccccgccacacacatttgtttaaggagagaaagcaagtcagcgaaatgggatctgcaccaagatctctgcacccagggagctgctgtggagtaaatcctatttttccaggtggtgtttaaacagctgtcattgatcactttgctttttttaattgattatttcgaaacgtgttttcccccaaaggatgttagtatgtcataaatattcagttaagcaactccaggatgatcttttagtaggaggagctgtcttttggtcctagtaacactaagtgccattttttccctcttctaagcccatggaaacaacgtggaggaaaaatgattatatatttagcttctagcatgattttagagataaatgacagccacctcccagacctcattcccaacacctgtattaatttttattttatttttatttttttgagacagagtctcgctccatcacccaggctggagtgcagtgctgtgatctcttagctcgcctaatttttgtatttttagtagagacggggttccgccatgttggccaggctgctctcgaactcctgacctcaagtgatccacctgtctcgtcttcccaaagtgctaggattacatgcatgagccactgcgccccaccttgtctttatttttaaagtaggcaatttattttaattttttgtgtgtgtatgacagggtctcgttctgtcactggagtgcagtggcaccatcaaggctcactgcagcctcaacctcctgggctcaaacgatcctcctgcctcagcctcccaagtagctgggactacactcaccaccacacccagctacttttaaacttttttgtagagacatgcagtcttgctgtgttgcccaggctggtctcgaactcatggcctcaagcgatcctccagccttggcctcccaaagtgctgcgattacaggtgtgagccaccatgcccagcccagtttatttttaaaagagctactggctgggcgtggtggctcacgcctgtaatcctaacactctgggaggcccaggcgagtggatcacctgagatcaggagtttaagaccagcctggccaacatagtgaaatcccatctctactcaaaatacaaaaattagctgggtgtagtggggcatacccatagtctagctacttgggaggctgaggcaggagaatcacttgaacctgggaggcggaggttgcagtgagcctagatcgcaccactgcctccggcctgggcaacagagcaagactctgtctcaaaaaaaaaaaaaaaaaaaaaaaaaaaaaggctaactgaagagaggagtttcgctgtgttaagaccactgtgcgtccataatggccttccctcagatctctcttccagggagctagggctgtctacacatgctccgtagaaacaaatgcacatttttctacacgggagtgaattggagagtcgtggtggtgatagtttaactgaaatctacctgggattttttttcttctctgctttatatttgtttaaaaaagcatgatccagcaaatgcatcaaattaaagctgtgggtacagttctcctaacagaaaatcacacagtaagctgggacaatggaacagaaagcagtgggtattgttttcttcttaagatttttatattcacattggatgagaatgtctcctaaccctccccttgctgttgttcttggaatgggtaccttattcatggcctccttacatagagggagcagattcaggacagaggctctgcacgctcctgggtccctcctaagcgagcactcccctccactgctcctcctgttcggcatgctagattttctgtgcacttgcagtcatacggaaactggcttccttcttagctgtgcgtgtgaaagtcaccccagtgtttcacctgcagtgtgagtgtaatttggggtcccatgacatgatcatcttccttttgatttctaaagctagggtcagggaaggggactcgttttgagccaaagggcattttaagggcatcatttcatatgttcactgtctgcagccaacactgcactctagacaaatgggtacctttatgtcccatttattaagacatcctgcaaaaggggctcctggcccctgtgggaagcttgaaaggaacagaccatatcctgtttctttttgctcatacctctgtggtgagatcttattctgaccccatagtctggtgccatacctgtgggtccctgtatctcctagaattccccctatgctagtgtttagcccgtgtaatgacagttatctgtccacagggctgtatcccccgccagcttgtaaactccatgaagaccggccctgcgtctcactcactcctgtccacagcagtgcctcccacatgttaggtcttaacaaacatctgtttcttctactcttcataaaatccacgcttcttctcacccccccgtcatccctgatcccagctaactttgaccctgtgtgcgggggcgggggatctacatgtgggctccacccccgcacgcctgctgccctgtcatctctgatccctggcggtgggatgtctaccatggctctgcccaatcccccactgtcttcacccctgccacatctggcatgattttaccgtccccttcctagagttctccctttctcccctgcccaggctgcacccctggagagcccagctcaggcccctggcccctatgaagcctctcctgaataatccatcagcctgccctgagctcatccagtctccagtgacgattgtgctctccaccagcaggacacaccggagcactttctctgtccctgagaattggactccattccacagttaggtcctgggtcacatacagacatttcacatcccctcctcagtattccccagcagcgtgcagcacagtgcgggcttctaggaggcagtcggtggatatttacccatgattttaagaggtctgtcttgaccaggaatgttgagaagtgacctgtgtctctgcagcattgctgctagttagtccctcgtggaagaagtggcatgtccctcctgtgtctggctcacggggaccggcgcctcctgtgtttgcccccgccatgccctgtggtttcctttgacaccctctgtcattgtctatttttatgttttaaacttcagtgggatttacctctcgtttgctcccatatcctcctggtaaattgtaaacttggtgaatcaatgatgagtaatcagtaggcagaaatggttggaatttcctggtcccagtttcagatcatatctgtctttccccagactcctaacttcctgttgggacatcccttggtctggcctttccctccagagaagcccccagacccacccgcagccttgatttactgatgcctaatcttattttagtctttcacaccagtttttaacaactcgactgtatagatcttctggaaattttacccaaaaatgttagatgtgccatcccctcacaggggaaagtggtggggtggtgggggttaatgtgttgaaaatctatgtatcttgtattttatttgagtcagctgtgttttcacaacaactctgagagttaacatcatttctactttataaattaaaaaaacaaaacaaaaacaaaaaactaaagccccaaaaggattgaatagcttgccaaggctgtgtaacaagtgaaatttgaatccgggtctgtatgatcccaaagcttaagctgcccgtctttctattcccagttcaaacgtgccttgaaatgggagctcacttgatagtacttggcttttaaaaggctacgtacatgtaagtaccttcactcaaatatgctggggctcagtaggagaagcaaagagaaggaaaaggtattgattgatcgatttgattctaagcagagattgacagagataagcttctaagacctttcaggccccagagtgtgactgttgagcacctaagaagacctcacttgacccgtgacttcccgccagagccttgggaagcccatgagtgcagcgtgctcgccggctgggctggaacttgctgctcttctctgcagtggcaggctggcttctgcccctagactggaactgccaagggctgctatagaagggacaaacttccagtgctcactgaggagccaggggtatcctgggaagctgaaaatgcatttgtcaagctcaggtcttcacaattgagaaaccccatcactaacccgtacggttttcttgaccaaaactttcagtgctctgtttttcccatctgtaaataatgttcatacatctaaatcctaggaggttgcagggacagtggcttagaaagtcaccacattctctaaaggagtgacagagaggatgaaagaagcatgctctataattaggttttattacatgctttttaaggttaattgaaggacttcccagcagcttccctagccactttttcaaatactgaaagcttccagaaagcagcagacaggtgttcctcacaatctgacacagacttcagttactgttgaaaagtgaaagagggctgggcgcggtggctcacacctataatcccaacactttgggaggccgaggtgggcggatcacctgaggtcaggaggtcaagaccagcgtggccaacatggcaaaaccccatctctactaaaaatacaaaaattagctgggtgtagtggcacacgcctaaaactccagctacttgggaggctgaggcatgagaaaaaatcgctcgaacccaggaggcggaggttacaatgagtcaagatcatgccactgcactccagcctgggtgacagagtgagactatctcacaaaaaaaaaaaaaaaa

SEQ ID NO: 9918 - DNA, 6573 bp, Homo sapiens
ttttttttttttatttttttttatttaatgttttttttttattatactctaagttttagggtacatgtgcacattgtgcaggttagttacatatgtatacatgtgccatgctggtgcgctgcacccactaacgtgtcatctagcattaggtatatctcccaatgctatccctcccccctcccccgaccccaccacagtccccagagtgtgatattccccttcctgtgtccatgtgatctcattgttcaattcccacctatgagtgagaatatgcagtgtttggttttttgttcttgcgatagtttactgagaatgatggtttccaatttcatccatgtccctacaaaggacatgaactcatcattttttatggctgcatagtattccatggtgtatatgtgccacattttcttaactttataacctgtgtggggcaggagaattaacctgcttttggattagaggctgcaaaaaagccagttctggtgaccacactaaaaagattaatgagcacttagcaccaaattaaatacccccctgcccccgcctttatgaaagtggagttcatagtacaaatgtgacagcgttaaacattgaagccattcgaaggaacctgggaagtactcaggcaccgatgagttaaaaacacagagacatccagtaagtgagttcccgctgggcacgggtctgtttatcttgcctttctgaagtcagagccaacattcttaatggttttgaatgattcagaatgtttcttttttggcagggccagtttccacgcatgggcttatgactaaaaccccttaggtgaggtccaaagcagaaaccagcctcacacttaatgttgtatttcagaatcatcttattttagagcaaaaggaaaactattaaatatagcttgcttatttcagacatgaagggacggaaccaaggaggctttggtcagccagaggtcacaggactggagagagaggccagcccgaggcagacctctgggttctgggcccagccctccctcctctgcaccacacagctcttgtccagacctcggaaggaggttccagcgtggcctcagcctcccgctggaagaggcagcttgccctttgagatcgtttagaaaacgacttgggtcagaaaggagaacttcatttttacaaaatgaaacaaatcagttatttgccatagacagctttttcaaaatatcctttgcccgtgtgtcgtgaatgtattagctctgggacagaaacaagaataataacaattctatctactatatgccaaaagaagagacttgatatacttctttttttttttttttttggatgagaatgaacttatgccacactagttcttaataaaacaaactgaatccttaccgcaggagaaagaattgagcaatgttctaagaacaggctgtcctctttggggcactgagtgaatgtaatatttagaagatgcccttgaagctcacaagtgcctcttgggatggagtaaagggggagaaacggcgagagaactcggacagagaagccgtccatgggaggagaaggccttgggaagagccatcgactcacccccttcctgcttgattgaggactttgggaatcacagatgccataggagagaacccatttcttcaaagccaggaggtgaaccggcccacccctgctgtgcccaccacactacagccagtaagggttctcctctggacctgagccactgtccccaagggccagaaaccagccatgtgtggcgtccccagaaaaggacatgagcaggtactcagccccgccacacacatttgtctaaggagagaaagcaagtcagcgaaatgggatctgcaccaagatctctgcacccagggagctgctgtggagtaaatcctatttttccaggtggtgtttaaacagctgtcattgatcactttgctttttttaattgattatttcgaaacgtgttttcccccaaaggatgttagtatgtcataaatattcagttaagcaactccaggatgatcttttagtaggaggagctgtcttttggtcctagtaacactaagtgccattttttccctcttctaagcccatggaaacaacgtggaggaaaaatgattatatatttagcttctagcatgattttagagataaatgacagccacctcccagacctcattcccaacacctgtattaatttttattttatttttatttttttgagacagagtctcgctccatcacccaggctggagtgcagtgctgtgatctcttagctcgcctaatttttgtatttttagtagagacggggttccgccatgttggccaggctgctctcgaactcctgacctcaagtgatccacctgtctcgtcttcccaaagtgctaggattacatgcatgagccactgcgccccaccttgtctttatttttaaagtaggcaatttaattttttgtgtgtgtatgacagggtctcgttctgtcactggagtgcagtggcaccatcaaggctcactgcagcctcaacctcctgggctcaaacgatcctcctgcctcagcctcccaagtagctgggactacactcaccaccacacccagctacttttaaacttttttgtagagacatgcagtcttgctgtgttgcccaggctggtctcgaactcatggcctcaagcgatcctccagccttggcctcccaaagtgctgcgattacaggtgtgagccaccatgcccagcccagtttatttttaaaagagctactggctgggcgtggtggctcacgcctgtaatcctaacactctgggaggcccaggcgagtggatcacctgagatcaggagtttaagaccagcctggccaacatagtgaaatcccatctctactcaaaatacaaaaattagctgggtgtagtggggcatacccatagtctagctacttgggaggctgaggcaggagaatcacttgaacctgggaggcggaggttgcagtgagcctagatcgcaccactgcctccggcctgggcaacagagcaagactctgtctcaaaaaaaaaaaaaaaaaaaaaaagctactgaagagaggagtttcgctgtgttaagaccactgtgcgtccataatggccttccctcagatctctcttccagggagctagggctgtctacacatgctccgtagaaacaaatgcacattttctacacgggagtgaattggagagtcgtggtggtgatagtttaactgaaatctaccttggattttttttcttctctgctttatatttgtttaaaaaagcatgatccagcaaatgcatcaaattaaagctgtgggtacagttctcctaacagaaaatcacacagtaagctgggacaatggaacagaaagcagtgggtattgttttcttcttaagatttttatattcacattggatgagaatgtctcctaaccctccccttgctgttgttcttggaatgggtaccttattcatggcctccttacatagagggagcagattcaggacagaggctctgcacgctcctgggtccctcctaagcgagcactcccctccactgctcctcctgttcggcatgctagattttctgtgcacttgcagtcatacggaaactggcttccttcttagctgtgcgtgtgaaagtcaccccagtgtttcacctgcagtgtgagtgtaatttggggtcccatgacatgatcatcttccttttgatttctaaagctagggtcagggaaggggactcgttttgagccaaagggcattttaagggcatcatttcatatgttcactgtctgcagccaacactgcactctagacaaatgggtacctttatgtcccatttattaagacatcctgcaaaaggggctcctggcccctgtgggaagcttgaaaggaacagaccatatcctgtttctttttgctcatacctctgtggtgagatcttattctgaccccatagtctggtgccatacctgtgggtccctgtatctcctagaattccccctatgctagtgtttagcccgtgtaatgacagttatctgtccacagggctgtatcccccgccagcttgtaaactccatgaagaccggccctgcgtctcactcactcctgtccacagcagtgcctcccacatgttaggtcttaacaaacatctgtttcttctactcttcataaaatccacgcttcttctcacccccccgtcatccctgatcccagctaactttgaccctgtgtgcgggggcgggggatctacatgtgggctccacccccgcacgcctgctgccctgtcatctctgatccctggcggtgggatgtctaccatggctctgcccaatcccccactgtcttcacccctgccacatctggcatgattttaccgtccccttcctagagttctccctttctcccctgcccaggctgcacccctggagagcccagctcaggcccctggcccctatgaagcctctcctgaataatccatcagcctgccctgagctcatccagtctccagtgacgattgtgctctccaccagcaggacacaccggagcactttctctgtccctgagaattggactccattccacagttaggtcctgggtcacatacagacatttcacatcccctcctcagtattccccagcagcgtgcagcacagtgcgggcttctaggaggcagtcggtggatatttacccatgattttaagaggtctgtcttgaccaggaatgttgagaagtgacctgtgtctctgcagcattgctgctagttagtccctcgtggaagaagtggcatgtccctcctgtgtctggctcacggggaccggcgcctcctgtgtttgcccccgccatgccctgtggtttcctttgacaccctctgtcattgtctatttttatgttttaaacttcagtgggatttacctctcgtttgctcccatatcctcctggtaaattgtaaacttggtgaatcaatgatgagtaatcagtaggcagaaatggttggaatttcctggtcccagtttcagatcatatctgtctttccccagactcctaacttcctgttgggacatcccttggtctggcctttccctccagagaagcccccagacccacccgcagccttgatttactgatgcctaatcttattttagtctttcacaccagtttttaacaactcgactgtatagatcttctggaaattttacccaaaaatgttagatgtgccatcccctcacaggggaaagtggtggggtggtgggggttaatgtgttgaaaatctatgtatcttgtattttatttgagtcagctgtgttttcacaacaactctgagagttaacatcatttctactttataaattaaaaaaacaaaacaaaaacaaaaaactaaagccccaaaaggattgaatagcttgccaaggctgtgtaacaagtgaaatttgaatccgggtctgtatgatcccaaagcttaagctgcccgtctttctattcccagttcaaacgtgccttgaaatgggagctcacttgatagtacttggcttttaaaaggctacgtacatgtaagtaccttcactcaaatatgctggggctcagtaggagaagcaaagagaaggaaaaggtattgattgatcgatttgattctaagcagagattgacagagataagcttctaagacctttcaggccccagagtgtgactgttgagcacctaagaagacctcacttgacccgtgacttcccgccagagccttgggaagcccatgagtgcagcgtgctcgccggctgggctggaacttgctgctcttctctgcagtggcaggctggcttctgcccctagactggaactgccaagggctgctatagaagggacaaacttccagtgctcactgaggagccaggggtatcctgggaagctgaaaatgcatttgtcaagctcaggtcttcacaattgagaaaccccatcactaacccgtacggttttcttgaccaaaactttcagtgctctgtttttcccatctgtaaataatgttcatacatctaaatcctaggaggttgcagggacagtggcttagaaagtcaccacattctctaaaggagtgacagagaggatgaaagaagcatgctctataattaggttttattacatgctttttaaggttaattgaaggacttcccagcagcttccctagccactttttcaaatactgaaagcttccagaaagcagcagacaggtgttcctcacaatctgacacagacttcagttactgttgaaaagtgaaagagggctgggcgcggtggctcacacctataatcccaacactttgggaggccgaggtgggcggatcacctgaggtcaggaggtcaagaccagcgtggccaacatggcaaaaccccatctctactaaaaatacaaaaattagctgggtgtagtggcacacgcctaaaactccagctacttgggaggctgaggcatgagaaaaaatcgctcgaacccaggaggcggaggttacaatgagtcaagatcatgccactgcactccagcctgggtgacagagtgagactatctcacaaaaaaaaaaaaaaaaa

SEQ ID NO: 9919 - DNA, 6590 bp, Homo sapiens
ccaactttttcactctttttttttttatttttttttatttaatgttttttttttattatactctaagttttagggtacatgtgcacattgtgcaggttagttacatatgtatacatgtgccatgctggtgcgctgcacccactaacgtgtcatctagcattaggtatatctcccaatgctatccctcccccctcccccgaccccaccacagtccccagagtgtgatattccccttcctgtgtccatgtgatctcattgttcaattcccacctatgagtgagaatatgcggtgtttggttttttgttcttgcgatagtttgctgagaatgatggtttccaatttcatccatgtccctacaaaggacatgaactcatcattttttatggctgcatagtattccatggtgtatatgtgccacattttcttaactttataacctgtgtggggcaggagaattaacctgcttttggattagaggctgcaaaaaagccagttctggtgaccacactaaaaagattaatgagcacttagcaccaaattaaatacccccctgcccccgcctttatgaaagtggagttcatagtacaaatgtgacagcgttaaacattgaagccattcgaaggaacctgggaagtactcaggcaccgatgagttaaaaacacagagacatccagtaagtgagttcccgctgggcacgggtctgtttatcttgcctttctgaagtcagagccaacattcttaatggttttgaatgattcagaatgtttcttttttggcagggccagtttccacgcatgggcttatgactaaaaccccttaggtgaggtccaaagcagaaaccagcctcacacttaatgtcgtatttcagaatcatcttattttagagcaaaaggaaaactattaaatatagcttgcttatttcagacatgaagggacggaaccagggaggctttggtcagccagaggtcacaggactggagagagaggccagcccgaggcagacctctgggttctgggcccagccctccctcctctgcaccacacagctcttgtccagacctcggaaggaggttccagcgtggcctcagcctcccgctggaagaggcagcttgccctttgagatcgtttagaaaacgacttgggtcagaaaggagaacttcatttttacaaaatgaaacaaatcagttatttgccatagacagctttttcaaaatatcctttgccagtgtgtcgtgaatgtattagctctgggacagaaacaagaataataacaattctatctactatatgccaaaagaagagacttgatatacttcttttttttttttttggatgagaatgaacttatgccacactagttcttaataaaacaaactgaatccttaccacaggagaaagaattgagcaatgttctaagaacaggctgtcctctttggggcactgagtgaatgtaatatttagaagatgcccttgaagctcacaagtgcctcttgggatggagtaaagggggagaaacggcgagagaactcggacagagaagctgtccatgggaggagaaggccttgggaagagccatcgactcacccccttcctgcttgattgaggactttgggaatcacagatgccataggagagaacccatttcttcaaagccaggaggtgaaccggcccacccctgctgtgcccaccacactacagccagtaagggttctcctctggacctgagccactgtccccaagggccagaaaccagccatgtgtggcgtccccagaaaaggacatgagcaggtactcagccccgccacacacatttgtctaaggagagaaagcaagtcagcgaaatgggatctgcaccaagatctctgcacccagggagctgctgtggagtaaatcctatttttccaggtggtgtttaaacagctgtcattgatcactttgctttttttaattgattatttcgaaacgtgttttcccccaaaggatgttagtatgtcataaatattcagttaagcaactccaggatgatcttttagtaggaggagctgtcttttggtcctagtaacactaagtgccattttttccctcttctaagcccatggaaacaacgtggaggaaaaatgattatatatttagcttctagcatgattttagagataaatgacagccacctcccagacctcattcccaacacctgtattaatttttattttatttttatttttttgagacagagtctcgctccatcacccaggctggagtgcagtgctgtgatctcttagctcgcctaatttttgtatttttagtagagacggggttccgccatgttggccaggctgctctcgaactcctgacctcaagtgatccacctgtctcgtcttcccaaagtgctaggattacatgcatgagccactgcgccccaccttgtctttatttttaaagtaggcaatttattttaattttttgtgtgtgtatgacagggtctcgttctgtcactggagtgcagtggcaccatcaaggctcactgcagcctcaacctcctgggctcaaacgatcctcctgcctcagcctcccaagtagctgggactacactcaccaccacacccagctacttttaaacttttttgtagagacatgcagtcttgctgtgttgcccaggctggtctcgaactcatggcctcaagcgatcctccagccttggcctcccaaagtgctgcgattacaggtgtgagccaccatgcccagcccagtttatttttaaaagagctactggctgggcgtggtggctcacgcctgtaatcctaacactctgggaggcccaggcgagtggatcacctgagatcaggagtttaagaccagcctggccaacatagtgaaatcccatctctactcaaaatacaaaaattagctgggtgtagtggggcatacccatagtctagctacttgggaggctgaggcaggagaatcacttgaacctgggaggcggaggttgcagtgagcctagatcgcaccactgcctccggcctgggcaacagagcaagactctgtctcaaaaaaaaaaaaaaaaaaaaaaagctactgaagagaggagtttcgctgtgttaagaccactgtgcgtccataatggccttccctcagatctctcttccagggagctagggctgtctacacatgctccgtagaaacaaatgcacattttctacacgggagtgaattggagagtcgtggtggtgatagtttaactgaaatctaccttggattttttttcttctctgctttatatttgtttaaaaaagcatgatccagcaaatgcatcaaattaaagctgtgggtacagttctcctaacagaaaatcacacagtaagctgggacaatggaacagaaagcagtgggtattgttttcttcttaagatttttatattcacattggatgagaatgtctcctaaccctccccttgctgttgttcttggaatgggtaccttattcatggcctccttacatagagggagcagattcaggacagaggctctgcatgctcctgggtccctcctaagcgagcactcccctccactgctcctcctgttcggcatgctagattttctgtgcacttgcagtcatacggaaactggcttccttcttagctgtgcgtgtgaaagtcaccccagtgtttcacctgcagtgtgagtgtaatttggggtcccatgacatgatcatcttccttttgatttctaaagctagggtcagggaaggggactcgttttgagccaaagggcattttaagggcatcatttcatatgttcactgtctgcagccaacactgcactctagacaaatgggtacctttatgtcccatttattaagacatcctgcaaaaggggctcctggcccctgtgggaagcttgaaaggaacagaccatatcctgtttctttttgctcatacctctgtggtgagatcttattctgaccccatagtctggtgccatacctgtgggtccctgtatctcctagaattccccctatgctagtgtttagcccgtgtaatgacagttatctgtccacagggctgtatcccccgccagcttgtaaactccatgaagaccggccctgcgtctcactcactcctgtccacagcagtgcctcccacatgttaggtcttaacaaacatctgtttcttctactcttcataaaatccacgcttcttctcacccccccgtcatccctgatcccagctaactttgaccctgtgtgcgggggcgggggatctacatgtgggctccacccccgcacgcctgctgccctgtcatctctgatccctggcggtgggatgtctaccatggctctgcccaatcccccactgtcttcacccctgccacatctggcatgattttaccgtccccttcctagagttctccctttctcccctgcccaggctgcacccctggagagcccagctcaggcccctggcccctatgaagcctctcctgaataatccatcagcctgccctgagctcatccagtctccaatgacgattgtgctctccaccagcaggacacaccggagcactttctctgtccctgagaattggactccattccacagttaggtcctgggtcacatacagacatttcacatcccctcctcagtattccccagcagcgtgcagcacagtgcgggcttctaggaggcagtcggtggatatttacccatgattttaagaggtctgtcttgaccaggaatgttgagaagtgacctgtgtctctgcagcattgctgctagttagtccctcgtggaagaagtggcatgtccctcctgtgtctggctcacggggaccggcgcctcctgtgtttgcccccgccatgccctgtggtttcctttgacaccctctgtcattgtctatttttatgttttaaacttcagtgggatttacctctcgtttgctcccatatcctcctggtaaattgtaaacttggtgaatcaatgatgagtaatcagtaggcagaaatggttggaatttcctggtcccagtttcagatcatatctgtctttccccagactcctaacttcctgttgggacatcccttggtctggcctttccctccagagaagcccccagacccacccgcagccttgatttactgatgcctaatcttattttagtctttcacaccagtttttaacaactcgactgtatagatcttctggaaattttacccaaaaatgttagatgtgccatcccctcacaggggaaagtggtggggtggtgggggttaatgtgttgaaaatctatgtatcttgtattttatttgagtcagctgtgttttcacaacaactctgagagttaacatcatttctactttataaattaaaaaaacaaaacaaaaacaaaaaactaaagccccaaaaggattgaatagcttgccaaggctgtgtaacaagtgaaatttgaatccgggtctgtatgatcccaaagcttaagctgcccgtctttctattcccagttcaaacgtgccttgaaatgggagctcacttgatagtacttggcttttaaaaggctacgtacatgtaagtaccttcactcaaatatgctggggctcagtaggagaagcaaagagaaggaaaaggtattgattgatcgatttgattctaagcagagattgacagagataagcttctaagacctttcaggccccagagtgtgactgttgagcacctaagaagacctcacttgacccgtgacttcccgccagagccttgggaagcccatgagtgcagcgtgctcgccggctgggctggaacttgctgctcttctctgcagtggcaggctggcttctgcccctagactggaactgccaagggctgctatagaagggacaaacttccagtgctcactgaggagccaggggtatcctgggaagctgaaaatgcatttgtcaagctcaggtcttcacaattgagaaaccccatcactaacccgtacggttttcttgaccaaaactttcagtgctctgtttttcccatctgtaaataatgttcatacatctaaatcctaggaggttgcagggacagtggcttagaaagtcaccacattctctaaaggagtgacagagaggatgaaagaagcatgctctataattaggttttattacatgctttttaaggttaattgaaggacttcccagcagcttccctagccactttttcaaatactgaaagcttccagaaagcagcagacaggtgttcctcacaatctgacacagacttcagttactgttgaaaagtgaaagagggctgggcgcggtggctcacacctataatcccaacactttgggaggccgaggtgggcggatcacctgaggtcaggaggtcaagaccagcgtggccaacatggcaaaaccccatctctactaaaaatacaaaaattagctgggtgtagtggcacacgcctaaaactccagctacttgggaggctgaggcatgagaaaaaatcgctcgaacccaggaggcggaggttacaatgagtcaagatcatgccactgcactccagcctgggtgacagagtgagactatctcacaaaaaaaaaaaaaaaaag

SEQ ID NO: 9920 - DNA, 324 bp, Homo sapiens
ggtaacttaacagagctttcttcatcagactgctgagtcatgcagcctcttgctgggtaaaatgtgtcttgagatgtaatcccctataaggacacccccttggagccactgtgaaggcactcccagcttccctagcaggtcgcatcagggggacgactgaaggatttacttgaacaatcagttttcagaaatgaagaccctacgaccttggcttcctctcttgtgatgcagctgaaagatgcatttcgtctgtaaagttagaccaggtaggagagaatgtgaggtggtttccattcttctcagttgccctccacctgattctga

SEQ ID NO: 9921 - DNA, 511 bp, Homo sapiens
cagtgaaagttccccccaaaagaaaaagaaaaagaaaaaaaagactgtcattttcttgagcagctttcttgagctctgtgtgtgtatgcctatgtctggggcatacacaaggactctggcaggcccactaaactctaccacgtagttgccagatatgctgtaaactgtcacctggaagttgggatttactcttttatttttctgtttattttgcatgagtactgtatgtataaaaaagtagccacatatggatggtcaaagggtttcctagaaatatggatagtcagagggcttcctagaaatatggatggtcaaaggtatcctagtttttcaggtaaactccactagaaaccagaaccatatcccaattccatagcctttattatttcagatcaatagaagcagaatcaaaatgcatttggagcttagaggtcaattgatttggaaaccactccggtgcaaagaatctctagattcattgattttggagtattgtttaggggaaaaggac

SEQ ID NO: 9922 - DNA, 511 bp, Homo sapiens
cagtgaaagttccccccaaaagaaaaagaaaaagaaaaaaaagactgtcattttcttgagcagctttcttgagctctgtgtgtgtatgcctatgtctggggcatacacaaggactctggcaggcccactaaactctaccacgtagttgccagatatgctgtaaactgtcacctggaagttgggatttactcttttatttttctgtttattttgcatgagtactgtatgtataaaaaagtagccacatatggatggtcaaagggtttcctagaaatatggatagtcagagggcttcctagaaatatggatggtcaaaggtatcctagtttttcaggtaaactgcactagaaaccagaaccatatcccaattccatagcctttattatttcagatcaatagaagcagaatcaaaatgcatttggagcttagaggtcaattgatttggaaaccactccggtgcaaagaatctctagattcattgattttggagtattgtttaggggaaaaggac

SEQ ID NO: 9923 - DNA, 324 bp, Homo sapiens; identical to SEQ ID NO: 9920

SEQ ID NO: 9924 - DNA, 324 bp, Homo sapiens; identical to SEQ ID NO: 9920

SEQ ID NO: 9925 - DNA, 511 bp, Homo sapiens; identical to SEQ ID NO: 9921

SEQ ID NO: 9926 - DNA, 2209 bp, Homo sapiens
agagttccaagcccacggccccggtcgcggcctcgccgccctcccgcgccccgcaccgggagcgggcctagagcactcgcctcgcccctccgcgagcagggctctggcgcccgcccctgtccgcaccgctggcagcctgaagagagtcgctggccatggtcgctgctaggtaggatatatctgcatcttgaaaggaagataaaacaaaagccttctttggaatagatggatttttgtcactttctgtgtgaactaaagtgattcaatgtctcttttggattgcttctgcacttcaagaacacaagatgaatcactcagacctgaaaaacagtctgaaaccagtatccatcaatacttggttgatgagccaaccctttcctggtcacctccatccactagagccagtgaagtactatgttccaccaacgtttctcactacgagctccaagtagaaacaggaagaggatttgacaacttgacttctgtccatcttgcatggcatactcccacgggaacactggtaactataaaaattacaaatctggaaaactgcaatgaagaacgcctgaaagctttacagaaagccgtgattctatcccactttttccggcatcccaatattacaacttactggacagttttcactgttggcagctggctttgggttatttctccatttatggcctatggttcagcaagtcaactcttgaggacctgttttcctgaaggaatgagtgaaactttaataagaaacattatctttggagctgtgagagggttgaactatctgtaccaaaatggctgtattcacaggagtattaaagccagccatatcctcatttctggtgatggcctagtgaccctctctggcctgtcccatctgcatagtttggttaagcatggacagaggcatagggctgtgtatgatttcccacagttcagcacatcagtgcagccgtggctgagtccagaactactgagacaggatttacatgggtataatgtgaagtcagatatttacagtgttgggattacagcatgtgaattagccagtgggcaggtgcctttccaggacatgcatagaactcagatgctgttacagaaactgaaaggtcctccttatagcccattggatatcagtattttccctcaatcagaatccagaatgaaaaattcccggtcaggtgtagactctggaattggagaaagtgtgcttgtctccagtggaactcacacagtaaatagtgaccgattacacacaccatcctcaaaaactttctctcctgccttctttagcttggtacagctctgtttgcaacaagatcctgagaaaaggccatcagcaagcagtttattgtcccatgttttcttcaaacagatgaaagaagaaagccaggattcaatactttcacggttgcctcctgcttataacaagccatcaataccattgcctccagtgttaccttggactgagccagaatgtgattttcctgatgaaaaagactcatacttggaattctagggctgccaaatcatttcatgtcctatatacttgacactttctccttgctgctttttcttctgtatttctaggtacaaatacgagaattatacttgaaaatacagttggtgcactggagaatctattatttaaaaccactctgttcaaaggggcaccagtttgtagtccctctgttttgcacagagtactatgacaaggaaacatcagaattaccaatctagctagtgtcatttattctggaatttttttctaagctgtgactaactctttttatctctcaatataatttttgagccagttaatttttttcagtattttgctgttccttgggaatgagccctcagaggacagtgcttccaagtacatcttcttctcccagattctctggcctttttaatgagctattgttaaaccaacaggctagtttatcttacatcagacccttttctggtagagggaaaatgtttgtgctttccttttttcttctgttaatacttatggtaacacctaactgagcctcactcacattaaatgattcacttgaaatatatacagaaattgtaatttgcttttttttaaaaaagggggctaaagtaacactttcctactttgtaaattatagatcttaaattcatgcaccccgtgggagctcaataaagatatactgaattgagaaaaaaaaaaaaa

SEQ ID NO: 9927 - DNA, 518 bp, Homo sapiens
taatgggtgcacaacattataaatgtatttaataccactaaactgtatacttaaaatgattaagatagtaaatttcattatgtatgttttactgtaataaaaattacttcaaggagaaagactataaattatttaaagaaaagctttatggagaactaatgctgctggaacacaaatattaagttaatgtaaactacatctactggaacatacaatataatcttattttgtaactgtctactatcttatagctaaaaataattttccttcttcttctgtaaaacttctcattttcacatgtacttttactgtgagttacaaattaaatgtactatgatactccagaaatattatagcaaaatagtaaatcaaaaggctataggaaataacttacgtgccagactactattaaacctctgtaccagcacaaacagctgctataataattttttctgaatacctatttacctccccaaactataaagataaattggtttgaatatatttgttatataaat

SEQ ID NO: 9928 - DNA, 1106 bp, Homo sapiens
ggtgtgtggctcagacacttgtgtcctcacctgccacagtgggaatgctttgtgcgggaaatccagaagttgcaacaggaagacaagtgccagaagaacaagctggacagctacttttgggaaaatggattcaggagggaggagacatgatagcaaacccacgtatgtgtttgacactttgagctatgtgcatgcttcatcttgataaagataaaacctttaaaaaaatcacttaagtagtatagaaagtataaaataaagtttatcagctattatactaaataatgaatgcaagctctatattttactaagtgtaaatgggctgaatttgactgttaaagaacagtttatcagattggattattcaacctgtatttatcatttttgctacaagcatctattgccctttcttctagtaaagtacctgatttggatttgcggatttccccggttagatgagattggcagaactgctcatcaaagttcacggctctccaagaaactgacatgtgactctaagctatgccattaggacgtctgcttcctagacttttattcttcctcatagtgacatacagactgggagtactcgggactgagtcatcccagctattacaatatgaggaaactgtccatctgttctgccacctggacctcttcgctacccatttgctctactttctttactggaaaattttcctactggttctatcttacgaattccttttctgttttaactagtgagtctatttcagttgcctatagccaatgaactctaactgatacagttgaaacctccaataagattcagctggataagagaaaaagaaagattaaaatgaaaggtgtgtgtataaatgtatgtaagtaagcaagcaagataggtaaaaacaaaaagaaagcagaacttaaaatccacaaaacagaatttaagttgaaaggcattagaaacaaacagggtcattatgaaatgataaaatatatgattcataaggaagatgtaacagtctaggatgaaaaacaaaaacaaaaacaaaaaaaccctagcaaacagaacctcccagtctcagcagtcaaatacaattgcataatgaaaaaaaaaaaaa

SEQ ID NO: 9929 - DNA, 9730 bp, Homo sapiens
gccaagatggccgaataggaacagctccggtctacagctcccagcgtgagtaacgcagaagatgggtgatttctgcatttccatctgaggtaccgggttcatctcactagggactgccagacagtgggtgcaggtcagtgggtgggtgcaggtcagtgggtgcacgcactgtgcgtgagccgaggcagggcgaggcattgcctcactcgggaagcacaaggggtcagggagttccctttcctagtcaaaggggtgacagagggcacctggaaaatcgggtcactcccacccgaatactgcgcttttccgacgggcttaaaaaaaccgcgcaccaggagattacatcctgcacctggctcggagggtcctacgcccacggagtctcgctgattgctagcacagcagtctgagatcaaactgcaaggcggcagcgaggctgggggaggggcgcccgccattgcccaggcttgcttaggtaaacaaagcagccgggaagctcgaactgggtggagcccaccacagctccaggaggcctgcctgcctctgtaggctccacctctgggggcagggcacagacatacaaaaagacagcagtaacttctgcagacttaaatgtccctgtctgacagctttgaagagagcagtggttctcccagcacacagctggagatctgagaacgggcagactgcctcctcaagtgggtccctgacccctgacccccgagcagcctaactgggaggcaccccccagcaggggcacactgacacctcacacggcccagtactccaacagacctgcagctaagggtcctgtctgttagaaggaaaactaacgaacagaaaggacatgcacaccaaaaacccatctgtacatcaccatcatcaaagaccaaaagtagacaaaaccacaaagatggggaaaaaacagagcagaaaaactggaaactctaaaaagcagagcgcctctcctcctccaaaggaacgcagttcctcaccagcaacggaacaaagctgaacggagagtgactttgacgagctgagagaagaaggcttcagacgatcaaactactccgagctatgggaggacattcaaaccaaaggcaaagaagttgaaaactttgaaaaaaatttagaagaatgtataactagaataaccaatacagagaagtgcttaaaggagctgatggagctgaaaagcaaggctcgagaactacatgaagaaggcagaagcctcaggagccgatgcgatcaactggaagaaagggtatcagtgatggaagatgaaacgaatgaaatgaagtgagaagggaagtttagagaaaaaagaataaaaagaaatgagcaaagcctccaagaaatatgggactatgtgaaaagaccaaatctacatctgattggtgtacctgcaagtgacagggagaatggaaccaagttggaaagcactctgcaggatataatccaggagaacttccccaatctagcaaggcaggccaacattcagattcaggaaatacagagaacgccacaaagatactccttgagaagagcaactccaagacacataattgtcagattcaccaaagttgaaatgaaggaaaaaatgttaagggcagccagagagaaaggtcgggttaccctcaaagggaagcccatcagactaacagcagatcttttggcagaaactctacaagccagaagagagtgggggccaatattcaacattcttaaagaaaagaattttcaacccagaatttcatatccagccaaactaagcttcataagtgaaggagaaataaaatactttacagagaagcaaatgctgagagattttgtcaccaccaggcctgccttaaaagagctcctgaaggaagcgctaaacatggaaaggaacaaccggtaccagctgctgcaaaatcatgccaaattgtaaagaccatcgagactaggaagaaactgcatcaactaatgagtaaaataaccagctaacatcataatgacaggatcaaattcacacataacaatattaactttaaatgtaaatggactaaatgctccaattaaaagacacagactggcaaattggataaagagtcaagacccatcagtgtgctgtattcaggaaacccatctcacgtgcagagacacacataggctcaaaataaaaggatggaggaagatctgccaagcaaatggaaaacaagaaaaggcaggggttgcaatcctagtctctgataaaacagactttaaaccaacaaagatcaaaagagacaaagaaggccattaaatagtggtaaagggatcaattcaacaagaagagctaactatcctaaatatatatgcacccaatacaggagcacccagattcataaggcaagtcctgagtgacctacaaagagacttagactcccacacattaataatgggagactttaacaccccactgtcaacattagacagatcaatgagacagaaagtcaacaaggatacccaggaattgaactcagctctgcaccaagtggacctgatagacatctacagaactctccacaccaaatcaacagaatatacatttttttcagcaccataccacacctaatccaaaattgaccacatagttggaagtaaagctctcctcagcaaatgtaagagaacagaaattataacaaactatctctcagaccacagtgcaatcaaactagaactcaggattaagaatctcactcaaaaccgctcaactacatggaaactgaacaacctgctcctgaatgaccactgggtacataacgaaatgaagacagaaataaagatgttctttgaaaccaacgagaacaaagacacaacataccagaatctctgggacacattcaaagcagtgtgtagagggaaatttattgcactaaatacccacaagagaaagcaggaaagatctaaaattgacaccctaacatcacagttaaaagaactagaaaagcaagagcaaacacattcaaaagctagcagaaggcaacaaataactaaaatcagagcagaactgaaggaaacagagacacaaaaaacccttcaaaaaattaatgaatccaggagttggttttttgaaaggatcaacaaaattgatagaccgctagcaagactaataaagaaaaaaagagagaagaatcaaatagacacaataaaaaatgaaaatgggatatcaccaccgatcccacagaaatacaaactaccatcagagaatactacaaacacctctatgcaaataaactagaaaatctagaagaaatggataaattcctcgacacatacactctcccaagactaaaccaggaagaagttgaatctctgaatagaccaataacaggctctgaaattgtggcaataatcaatagcttaccaaccaaaaagagtccaggaccagagggattcacagccgaattctaccagaggtacaaggaggaacttgtaccattccttctgaaactattccaatcaatagaaaaagaaggaatcctccctaactcattttatgaggccagcgtcatcctgataccaaagccgggcagagacacaaccaaaaaagagaattttagaccaatatccttgatgaacattgatgcaaaaatcctcaataaaatactggcaaacggaatccagcagcacatcaaaaagcttatccaccatgatcaagtgggcttcatccctgggatgcaaggctggttcaatatacgcaaatcaataaatgtaatccagcatataaacagaaccaaagacaaaaaccacatgattatctcaatagatgcagaaaaggcctttgacaaaattcaacaacgcttcatgctaaaaactctcaataaattaggtattaatgggacatatttcaaaataataagagcaatctatgacaaacccacagccaatatcatactgaatgtgcaaaaactggaagcattccctttgaaaactggcacaagacagggatgccctctctcaccactcctattcaacatagtgttggaagttctggccagggcaattaggcaggagaaggaaataaagggtattcaattaggaaaagaggaagtcaaattgtccctgtttgcagatgacatgattgtatatctagaaaaccccattgtctcagcccaaaatctccttaagccgataagcaacttcagcaaagtctcaggatagaaaatcaatgtacaaaaatcacaagcattcttatacaccaacaacagacaaacagagagccaaatcatgagtgaactcccattcaaagagaatatttgcttcaaagagaatgaaatacctaggaatccaacttacaagggatgtgaaggacctcttcaaggagaactacaaaccactgctcaaggaaataaaagaggatacaaacaaatggaagaatattccatgctcatgggtaggaagaatcaatatcgtgaaaatggccatactgcccaaagtaatttacagattcaatgccatccccatcaagctaccaatgactttcttcacagaattggaaaaaactactttaatgttcatatggaaccaaaaaagagctcgcatcgccaagtcaatcctaagccaaaagaacaaagctggaggcatcacactacctgacttcaaactatactacaaggctacagtaaccaaaacagcatggtactggtaccaaaacagagatatagatcaatgaaacagaacagagccctcagaaataacgccgcatatctacaactatctgatctttgacaaacctgagaaaaaaaagcaatggagaaagaattccctatttaataaatggtgctgggaaaactggctaggcatatgtagaaagctgaaactggatcccttccttacaccttatacaaaaatcaattcaagatggattaaagacttaaatgttagacctaaaacgataaaaaccctagaagaaaacctaggcattaccattcaggacataggcatgggcaaggacttcatgtctaaaacaccaaaagcaatggcaacaaaagccaaaattgactaatgggatctaattaaactaaagagcttctgcacagcaaaagaaactaccatcagagtgaacaggcaacctacaaaatgggagaaaattttcacaacctactcatctgacaaagggctaacatccagaatctacaatgaactcaaataaatttacaagaaaaaaacaaacaaccccatcaaaaagtgggcaaaggacatgaacagacacttctcaaaagaagacatttatgcagccaaaaaacacatgaaaaaatgctcaccatcactggccgtcagagaaatgcaaatcaaaaccacaatgagataccatctcacaccagttagaatggcaatcattaaaaagtcaggaaacaacaggtgctggagaggatgtggagaaataggaacacttttacactgttggtgggactgtcaactagttcaaccattgtggaagtcagtgtggcgattcctcagggatctagaacaagaaataccatttgacctagccatcccattactgggtatatacccaaaggactataaatcatgctgctataaagacacatgcacacgtatgtttattgcggcactattcacaatagcaaagacttggaaccaatccaaatgtccaacaatgatagactggattaagaaaatgtggaacatatacaccatggaatactatgcagccataaaaaaggatgagttcatgtcctttgtagggacatggatgaaattggaaatcatcattctcagaaaactatcacaagagcaaaaaaccaaacaccgcatattctcactcatagatgggaattgaacaatgagaacacatggacacaggaaggggaacatcacactgtggggactgctgtggggtgggggagtggggagggataccattgggagatatacgtaatgctagatgacaagttagtgggtgcagcacaccagcatggcacatgtatacatatgtaactaacctgcacattgtgcacatgtaccctaaaacttaaagtaaaataataataaattaaaaaaatatatatctgaaggtagtttgttgtggcaactcaacaatgtcggcattgttctaggctttgcccatttttgctgtgccatcaagagtggcttcaggggcgtgtgacctgtaaagtcatatagggttcaaactcagaagggtctcttgcttggtttaaagcttgctgttgctgtttgaatgccttgaaaattttatctttgcacttgtgttgagtaaatgaactctgatgggacagtggaacatgtgtgtaatgagaggaaatacatacaatatgagtgtctgtcattccttgcccctccatttgcatatagtctttgtgatgtcccataaggattgaattccagtggacccaggaatcatgggagttcattgagactcaaagtgagcacaagttaaacatgttacatctatgactaagtaggggagatgatattccagagcggctacacttttcatttaaacgaaaacttgcttcaaatataaaaagaaggcagtgccattctaaggactataaataagcaaggagtcttatatcctttcactttcatgtcacgtccctatattagccatttcatttataccaaaaatgatggcatcaaaggaaagggaaaaatagggcaatgcattgtaccttttcctttcagtcccttccttactcatcagtaagtggaaagtagagaattttgggactatgtgtgtgaatcaaaacatgaaataaagacaattgagtttgtcttgtgcagtgtcctcagtgtttggtaagaaagaaatacacatgcatgcgtatacaaggtaagaaatgcaagtagcataatgttggtgattctgtatataaatcaaatgctcttgcatttaacactggcattaaacaatataaactgcaatgataaaattcatgctaataaattaaattttattctttactgataacatcatcaagtagtaaataaaaaacactatggagccagacacagtggctcatgcctataatcttagcactttggaaggccgaggggggcggatcacttgagctcacgagttcgagaccagcctgggcaacatggcaaaaccagatctctataaaaaatacaaaaattcacccatcgtggtggcatgcatctgtagtcccagctacttgggaggctgaagttggagaatggtttgagcctgggaggcaaatgttgcagtgaggcgaaacactgccactgcactccagcttgggctatagagccagaccttgtcttgaaaagattaaaaaaatgctatggcaagttgagaaagagtccatggaagaaaggaaaatgctttatattttagtacctttaatgacacttttttctgctttttgggtgaggccctgcattttaattttttattgggatttgcaaattatatagccagctctgcctgccaccttaagcttattgcttgccctctagctcttccccccataagagttaccccataattgcaaagtagctctcaaagttccaggcatcaaatctgtgtttgaggcaggaaatagatggaagagttggtgatagcaagcttttcttttatggtcattacgtttatcaggagtttaaaagtctttccagaaacattcagccaacattgggccccatggacacttttagttgcaacaaagtatggaacaataagcatctggcatagaggaatagaaccttccaaaccaatatctcgcaaagaataccgtctaaggcagggattggccaactttgtctgtgaaagggccagataggctctggtggctatatatagtctctgttgcaatcattcaactttgctgctctagtgcgaatgcagacatagacaacatgtaaacaaatgggcctggctgtgttccagaaaaacttcttcataaaaattgtaagtgggtcagactaactgtgggctgtagtttgctgacccctgcttagaactttatttcgctttggttaccaaatggtagaccagggggatgatgataattaagtaggtgctatttattgaatgcctactgtgtattcgtcacctgaagctgaacacattgccatctctaaaacatatttgtattttcttatcaaggaagaaagcagtttgttgagaaggcaagtagcggaatctgccacaacacaaattaagacttgattaaaagagatacaaatgcatagatggaaagccttgctattgtaaagataccacttttctccaaattaatccacaaattccatgcaattccaatcaacatttctgtagtttttttatagaacttgagcagtggatctgctcagtggattttttatggaacacatacatgtaaaaagtaaaacatcaatacttttggtagaaatttaaacttgaagcaggacagagcttaaaaaataagacacaaaaaacgtaagcaaaaaaggaacattttgatgaatcggttttcattaaaatgaaaaactttcatagaataaaaggcatcagaatcaaagtgaacagacattccagggagtggtggacattagtaaagcatataacaaaaaatggttaggtctggaatatataaaaacaactagagaaaagtgggtgaataatgtgaagcagaaattcacagaagaaccctgagaggcccacaaacatatgaaatttattttcaatcctgctagtatcagggaaatggaaacaacaatcaagttttatgccatacgtattagataggcagtactcccccaaagtgaaaatccagtagttggcaagcacgtggaacaattaaaattctcaaccactgttggtgagatatgtaatagcaaataattggaaacaacctaaatatccattaacggaggaatagttatctacatatttatgtatgtatgtatgtatgtatgtatgtatctatctatctatctatcatctatctatctatctatcttctctctattcacctatctttttttctgtctatattacctatttatctgtgtgtgtattatatatagtgatatgttcaatataatgacattaaaactgttgagataataaactggctacatgcatcaaaatagatatatctgaaaaataaatctataaatctaatgtggtaagaaaaatggtagagtactgtaagtattatgacactatttaaactgagttttagaacacaatatatacacacatatttagcaaaaacaaaaagtgtgcatgttaatgagaaatgttgaattcaggatagtggttacatcttgggcgggaggaagataaatgagacgggttggaggaggaaatttagctgcattctataatattttacttcttaaaaacaatatttgaaacaaatattgcaaaatatttgggtttggcaaagctgattggcaagtacactggtgtttattttctctcttttatatgtgtttgaaaatatttcataatacaaattttaactgccttgtgatggtaacctttgaaatatttaaaaatttgacccagccatcccattactgggtatatacccaaaggattataaatcatgctgctataaagacacatgcacacgtatgtttattgcggcattattcacaatagcaaagacttggaaccaacccaaatgtccaacaacgatagactggattaagaaaatgtggcacatatacaccatggaatactatgcagccataaaaaatgatgagttca

SEQ ID NO: 9930 - DNA, 1091 bp, Homo sapiens
tgcaaattatatagccagctctgcctgccaccttaagcttattgcttgccctctagctcttccccccataagagttaccccataattgcaaagtagctctcaaagttccaggcatcaaatctgtgtttgaggcaggaaatagatggaagagttggtgatagcaagcttttcttttatggtcattacgtttatcaggagtttaaaagtctttccagaaacattcagccaacattgggccccatggacacttttagttgcaacaaagtatggaacaataagcatctggcatagaggaatagaaccttccaaaccaatatctcgcaaagaataccgtctaaggcagggattggccaactttgtctgtgaaagggccagataggctctggtggctatatatagtctctgttgcaatcattcaactttgctgctctagtgcgaatgcagacatagacaacatgtaaacaaatgggcctggctgtgttccagaaaaacttcttcataaaaattgtaagtgggtcagactaactgtgggctgtagtttgctgacccctgcttagaactttatttcgctttggttaccaaatggtagaccagggggatgatgataattaagtaggtgctatttattgaatgcctactgtgtattcgtcacctgaagctgaacacattgccatctctaaaacatatttgtattttcttatcaaggaagaaagcagtttgttgagaaggcaagtagcggaatctgccacaacacaaattaagacttgattaaaagagatacaaatgcatagatggaaagccttgctattgtaaagataccacttttctccaaattaatccacaaattccatgcaattccaatcaacatttctgtagtttttttatagaacttgagcagtggatctgctcagtggattttttatggaacacatacatgtaaaaagtaaaacatcaatacttttggtagaaatttaaacttgaagcaggacagagcttaaaaaataagacacaaaaaacgtaagcaaaaaaggaacattttgatgaatcggttttcattaaaatgaaaaactttcatagaataaaaggcatca

SEQ ID NO: 9931 - DNA, 617 bp, Homo sapiens
aataaaatgattttctaaaatgagtttgaattatcctttaaatgcagcaaagttctcctaaattacatgctttaacttctgcattgtaataagaagtagtaaataagagaaggacaaaagtgtaccaaaacaacttatgagctgaagattaaaaaaagagcttcatattgttttctttaagtggacattcattcattcattcatacatttgcacactcaataatttgtacatgagtgactaccatgtgctaagttctaaggcatatacagaatttatctagtgcctggcctaaagaagtttataatcccgtaggaatatgaatttaaacattataattgtaagaaatacaaacattgttatgatggagttatgaagaaccttattcacacatttaaaaactaaagtgtatatatatatatatcaaaaacatcatgttgtacgacataaatataaataatttttgtcaataaaaaataaataacattaatgactttgctgcaatgaagttaaaaaataaattgtataaaatatgtattaattttaaaaacaagtgaaatggaaaattgctaggaaaatgtaacttactaacatttaccggcacatgcctggagtcctt

SEQ ID NO: 9932 - DNA, 6056 bp, Homo sapiens
gccaagatggccgaataggaacagctccggtctacagctcccagcgtgagtaacgcagaagatgggtgatttctgcatttccatctgaggtaccgggttcatctcactagggactgccagacagtgggtgcaggtcagtgggtgggtgcaggtcagtgggtgcacgcactgtgcgtgagccgaggcagggcgaggcattgcctcactcgggaagcacaaggggtcagggagttccctttcctagtcaaaggggtgacagagggcacctggaaaatcgggtcactcccacccgaatactgcgcttttccgacgggcttaaaaaaaccgcgcaccaggagattacatcctgcacctggctcggagggtcctacgcccacggagtctcgctgattgctagcacagcagtctgagatcaaactgcaaggcggcagcgaggctgggggaggggcgcccgccattgcccaggcttgcttaggtaaacaaagcagccgggaagctcgaactgggtggagcccaccacagctccaggaggcctgcctgcctctgtaggctccacctctgggggcagggcacagacatacaaaaagacagcagtaacttctgcagacttaaatgtccctgtctgacagctttgaagagagcagtggttctcccagcacacagctggagatctgagaacgggcagactgcctcctcaagtgggtccctgacccctgacccccgagcagcctaactgggaggcaccccccagcaggggcacactgacacctcacacggcccagtactccaacagacctgcagctaagggtcctgtctgttagaaggaaaactaacgaacagaaaggacatgcacaccaaaaacccatctgtacatcaccatcatcaaagaccaaaagtagacaaaaccacaaagatggggaaaaaacagagcagaaaaactggaaactctaaaaagcagagcgcctctcctcctccaaaggaacgcagttcctcaccagcaacggaacaaagctgaacggagagtgactttgacgagctgagagaagaaggcttcagacgatcaaactactccgagctatgggaggacattcaaaccaaaggcaaagaagttgaaaactttgaaaaaaatttagaagaatgtataactagaataaccaatacagagaagtgcttaaaggagctgatggagctgaaaagcaaggctcgagaactacatgaagaaggcagaagcctcaggagccgatgcgatcaactggaagaaagggtatcagtgatggaagatgaaacgaatgaaatgaagtgagaagggaagtttagagaaaaaagaataaaaagaaatgagcaaagcctccaagaaatatgggactatgtgaaaagaccaaatctacatctgattggtgtacctgcaagtgacagggagaatggaaccaagttggaaagcactctgcaggatataatccaggagaacttccccaatctagcaaggcaggccaacattcagattcaggaaatacagagaacgccacaaagatactccttgagaagagcaactccaagacacataattgtcagattcaccaaagttgaaatgaaggaaaaaatgttaagggcagccagagagaaaggtcgggttaccctcaaagggaagcccatcagactaacagcagatcttttggcagaaactctacaagccagaagagagtgggggccaatattcaacattcttaaagaaaagaattttcaacccagaatttcatatccagccaaactaagcttcataagtgaaggagaaataaaatactttacagagaagcaaatgctgagagattttgtcaccaccaggcctgccttaaaagagctcctgaaggaagcgctaaacatggaaaggaacaaccggtaccagctgctgcaaaatcatgccaaattgtaaagaccatcgagactaggaagaaactgcatcaactaatgagtaaaataaccagctaacatcataatgacaggatcaaattcacacataacaatattaactttaaatgtaaatggactaaatgctccaattaaaagacacagactggcaaattggataaagagtcaagacccatcagtgtgctgtattcaggaaacccatctcacgtgcagagacacacataggctcaaaataaaaggatggaggaagatctgccaagcaaatggaaaacaagaaaaggcaggggttgcaatcctagtctctgataaaacagactttaaaccaacaaagatcaaaagagacaaagaaggccattaaatagtggtaaagggatcaattcaacaagaagagctaactatcctaaatatatatgcacccaatacaggagcacccagattcataaggcaagtcctgagtgacctacaaagagacttagactcccacacattaataatgggagactttaacaccccactgtcaacattagacagatcaatgagacagaaagtcaacaaggatacccaggaattgaactcagctctgcaccaagtggacctgatagacatctacagaactctccacaccaaatcaacagaatatacatttttttcagcaccataccacacctaatccaaaattgaccacatagttggaagtaaagctctcctcagcaaatgtaagagaacagaaattataacaaactatctctcagaccacagtgcaatcaaactagaactcaggattaagaatctcactcaaaaccgctcaactacatggaaactgaacaacctgctcctgaatgaccactgggtacataacgaaatgaagacagaaataaagatgttctttgaaaccaacgagaacaaagacacaacataccagaatctctgggacacattcaaagcagtgtgtagagggaaatttattgcactaaatacccacaagagaaagcaggaaagatctaaaattgacaccctaacatcacagttaaaagaactagaaaagcaagagcaaacacattcaaaagctagcagaaggcaacaaataactaaaatcagagcagaactgaaggaaacagagacacaaaaaacccttcaaaaaattaatgaatccaggagttggttttttgaaaggatcaacaaaattgatagaccgctagcaagactaataaagaaaaaaagagagaagaatcaaatagacacaataaaaaatgaaaatgggatatcaccaccgatcccacagaaatacaaactaccatcagagaatactacaaacacctctatgcaaataaactagaaaatctagaagaaatggataaattcctcgacacatacactctcccaagactaaaccaggaagaagttgaatctctgaatagaccaataacaggctctgaaattgtggcaataatcaatagcttaccaaccaaaaagagtccaggaccagagggattcacagccgaattctaccagaggtacaaggaggaacttgtaccattccttctgaaactattccaatcaatagaaaaagaaggaatcctccctaactcattttatgaggccagcgtcatcctgataccaaagccgggcagagacacaaccaaaaaagagaattttagaccaatatccttgatgaacattgatgcaaaaatcctcaataaaatactggcaaacggaatccagcagcacatcaaaaagcttatccaccatgatcaagtgggcttcatccctgggatgcaaggctggttcaatatacgcaaatcaataaatgtaatccagcatataaacagaaccaaagacaaaaaccacatgattatctcaatagatgcagaaaaggcctttgacaaaattcaacaacgcttcatgctaaaaactctcaataaattaggtattaatgggacatatttcaaaataataagagcaatctatgacaaacccacagccaatatcatactgaatgtgcaaaaactggaagcattccctttgaaaactggcacaagacagggatgccctctctcaccactcctattcaacatagtgttggaagttctggccagggcaattaggcaggagaaggaaataaagggtattcaattaggaaaagaggaagtcaaattgtccctgtttgcagatgacatgattgtatatctagaaaaccccattgtctcagcccaaaatctccttaagccgataagcaacttcagcaaagtctcaggatagaaaatcaatgtacaaaaatcacaagcattcttatacaccaacaacagacaaacagagagccaaatcatgagtgaactcccattcaaagagaatatttgcttcaaagagaatgaaatacctaggaatccaacttacaagggatgtgaaggacctcttcaaggagaactacaaaccactgctcaaggaaataaaagaggatacaaacaaatggaagaatattccatgctcatgggtaggaagaatcaatatcgtgaaaatggccatactgcccaaagtaatttacagattcaatgccatccccatcaagctaccaatgactttcttcacagaattggaaaaaactactttaatgttcatatggaaccaaaaaagagctcgcatcgccaagtcaatcctaagccaaaagaacaaagctggaggcatcacactacctgacttcaaactatactacaaggctacagtaaccaaaacagcatggtactggtaccaaaacagagatatagatcaatgaaacagaacagagccctcagaaataacgccgcatatctacaactatctgatctttgacaaacctgagaaaaaaaagcaatggagaaagaattccctatttaataaatggtgctgggaaaactggctaggcatatgtagaaagctgaaactggatcccttccttacaccttatacaaaaatcaattcaagatggattaaagacttaaatgttagacctaaaacgataaaaaccctagaagaaaacctaggcattaccattcaggacataggcatgggcaaggacttcatgtctaaaacaccaaaagcaatggcaacaaaagccaaaattgactaatgggatctaattaaactaaagagcttctgcacagcaaaagaaactaccatcagagtgaacaggcaacctacaaaatgggagaaaattttcacaacctactcatctgacaaagggctaacatccagaatctacaatgaactcaaataaatttacaagaaaaaaacaaacaaccccatcaaaaagtgggcaaaggacatgaacagacacttctcaaaagaagacatttatgcagccaaaaaacacatgaaaaaatgctcaccatcactggccgtcagagaaatgcaaatcaaaaccacaatgagataccatctcacaccagttagaatggcaatcattaaaaagtcaggaaacaacaggtgctggagaggatgtggagaaataggaacacttttacactgttggtgggactgtcaactagttcaaccattgtggaagtcagtgtggcgattcctcagggatctagaacaagaaataccatttgacctagccatcccattactgggtatatacccaaaggactataaatcatgctgctataaagacacatgcacacgtatgtttattgcggcactattcacaatagcaaagacttggaaccaatccaaatgtccaacaatgatagactggattaagaaaatgtggaacatatacaccatggaatactatgcagccataaaaaaggatgagttcatgtcctttgtagggacatggatgaaattggaaatcatcattctcagaaaactatcacaagagcaaaaaaccaaacaccgcatattctcactcatagatgggaattgaacaatgagaacacatggacacaggaaggggaacatcacactgtggggactgctgtggggtgggggagtggggagggataccattgggagatatacgtaatgctagatgacaagttagtgggtgcagcacaccagcatggcacatgtatacatatgtaactaacctgcacattgtgcacatgtaccctaaaacttaaagtaaaataataataaattaaaaaaatatatat

SEQ ID NO: 9933 - DNA, 11129 bp, Homo sapiens
gtgctgcgcagctccctaagcggttgtcaccgctggagacggttgggagaaccgttgtggcgagcgctacacgaggcaaacgacttctcccttctttgaactggaccccgcgagcaccagagtcggcgtaactatcgcctgacagggtatctgaagtaaaagggggtaggttgggctggtggtttcgagagcggagtcgggagaaggacgaaaggccgggaggggctgggttggggggtagtggggtggtcgccgctcggaggccgccgcttggaagcggcggggctgcgcctccccgaccatctcccacttcagggagggcggcttgccgatgggaggacttgctcaggtggaattcagtggacgacgccgaggcccgaagtaggggacatccagcattttcccctttccctgctggcttggcctccgccattttgggtacagtggcgcggccacctcggcttcccgcccttccccgctctttttacttttttgttccccagcttccgaaaactgatctagaaggccaggggagggggtggtcaaagctccctggaagggatgagggtgggtagtgaagcgagcagggaaaggccgggcagttgggtggagggaggatcgggtttgccgggcgcgctcccgatggaaatggcgccggatgggcctggcctcccaccgcggcctcccttcctccgcagtctcggcagggctacctgggctgacgggactgcgagtgacttctgacgcagattcccaagatgagagaggctggagctgggggaggaaagccaatggcgacgaaggtgctcaactcccaaatccaggacaaaggaggcagacggcctcctttgtaattctgccgcccggtggcgaagggttttaagccaggcttggctgctgacgggagggggaaggggcgtactctccctagctttctggtctctagggcagctagataaacggaaagtctcctgggaggaataaaggacgcttagccggcccttatattccagatttggaacttcgaaaagagtacgtactgattttccaaagggttttttttttttcatgtttaaacgttaataaggacttcggggatgattttgtgagcagaaaagtgggtgatttatcaaataggaatgtgaaatgggcatgtttcaagtaggtcgtctgggcccagtgaactataattgttgctttttgaactttgggggtgggggtgggtgatgtagcaattgttttgcgtagtttggcgtatatatgttagaatttgtttttaagttttacttttgggaaacagttaaaacaacccagtgatggtagatgtgtgtgtattgaaattgagctttcgatgttaaatcttccaagagttgtattttgtgcagttttttttccgatggcattaaggctctagaagtaaaatacttcaaaatacggttatggtttattttcttttggtagctaggcatgttttttctttagtgtaggagtatagtacactgtaatcgtattttaaacaagggaataagcctactaaacataaaaacaaattgtaaacccagtcacgtggtggtggtgtgattcggatgagggtcctgagaactggatccgtaattttcattgaagacagtacaaaagggaggagaaaggcctgagagtaagaatttctgataattcatgtaaaactttataagaatattgttacctacttttccagctctaaaaacaaaaacttattattattgaagatgttcagtgatgctttctcaagattgccaaggaaaagtttacgaaaatcttaccttgaaacagtaggtttgagtgaccctttgaagagatagtccagactgtcctgtaaagttatatatgatataacaaatagctttactaattggattggactacacatcttttttctgtcctcttttcatttgtgccgttatctggaaatccatctaattgcctttttaaaataatgttatctttgatttccttgttttggtaaactgactgaactgcagtagataaaaacctggttctagtgaactaacattttagagaccttacctccttaagctattaggggtgtgtctagttttttgtttttgtaaagagcaagcccattgggaaggaatgatgtaaattttctgttaaacttaaatcatcagcactttttccaaaaaataaaattcattctcatttcttgaccactgggctaccatttagaaagttatttattgatgtaaaatcctttatgtattacttcagaagataggctatgcctccgtgttaagaggattctctatttcatttgttctttagtggattttttttctttaacgactttggtatataattcacataccgtaaacttcaccaattttaaatgtacagtttagtggattttagtacattcacagcgttgtgtgaccgtcactacaatttaattttagaacatttttgtcactccaaaaagatatccataccctttactggtcattcccattgctggcatcctccctcccctcaagcctcagacaatcatgaatagaaatggaatcatgcaatatgtagtcttttgtgactggcttgtttcacttggtgtaatgtttagaaaattatacttaaagtctcataaaacttgaccaaagctatcctcatattttaactgtggtatcttttattggtactagcacctagaattcttaaagcagagtagtgattagccatgacattgttgcaaagaaaggttgaggtggattatcctgaataattagtaaactgttttaagtagtttctgacagctttattagagcagattgcttcttcctgtgcccttagagtttttcttgtttttgttttgtaggtaggatttttagttttgaaggggttggtagagtgaggctgtttttattgtatgtgctttgcatacacagtcaccctataaaatagattaagtgttccgagttcggttgggttttccgcaattaaaaattgtgttaacagtttagtgtttcttacagataacactgataacactttttttgttttcattgggtcttatcattggtacagactgatccaaaaatccaattggcttgctagtaattttttcctgtgaattgctaagatttatgggtaaattaatttttctttttcttttctttttttttttttttaagcatttgctccttaaatgcaaatcgtaccactaagatcctctcacaacagattaaggtcgaatttgcagagttcttcaatttttcatgaagcagtgagggtagatctgtaccactttttccgttctgtgtaaatcaccgtttatgggaaacacttgttttttaggttggtgctatttaaaaaaaataaataaaacggtaggcattttcaaaacatctctgaactttttttttttcccaaactggattggggccgcctcctctcagagctactctttagaatagtattaaacttataaaagcctttgctggctttgggaaataaaatttttaataattctcagttcttttcaaggcttgaattgttttctgtccttcagggttcacatattttgtgtatggtatagctcactggcttttgcagggccccttaaaatccagtaacaattgccatcagtaaatgcttaccatgaggcagaccaagcacttgaatagtccagtgaggtacaggtacaactgctatagtttacaattgaagaggctcagaggtaaagtggttcaggtagccagtgagtggcagagtagggattcagacccagaacattcataatatttatttgtgtgcataacaagtagttgtaatgtcagttaaaagtttgtattcccattttggttttctatgtctagagtggcacctagggctgaaggtgattgacactagaggtacttaactacttccagagaatttctacattagcttattttaagtgcatgaattctagggaaaaatattttaccctttgcagatgccacccctaagagatgcaccaacaaatagatgacatgaaattaagcattagtgaatgctgttgatacgaaatatgatcttcaaacataaaggaatcaaatgaacaaactttgtttacaggggaggaggtggtgagggaaaggtttgaaatactcaggtgagtaggattcctacagctgcatagtgagatttgtaaggttctggtaagtttctgcagctgaaggacttctgcattcacctcttttgtaaatattatggaattttaaaaggaaggatggttgcctctggggaagggaactgggaactgaggttattttggaggggaaggggggcttctagatgtaccttttatgctttattaaaaagtatattacctattaaagtttgtttaaatctatttgattaaaaatttgagtaaactggtttctaaacactgtctccagtggcttcaaaaacacaggtactgttggaaggcattcacttttgagtggcctttgacctcagttttaatctgattaattcagtcattttataatcttgctcttggtgagtttaaactagatttggctaaaatagaggtgggagtgttggcccttcaaagacagtttgatgtgttcaaaattgtagtgcatttaaaagggttagacttctgtgatatttgtccaacgtcaatcagtactcattgcatttttttacttaggctcttgatgttagtggatactggtattatatgcaacttctgaataagttttaaagaatttgaataatcagttgaataaaaacctgaaaagtggtgaatgaaaatttgagagataaggaaaggctagagttggcattcaggggacacaaatagtttgaagactctggtagtagaattatgcaagttttcttaaaattaggcaatatataatattgatactacgaaattcagtacttttccgtaggagggggtcaggtctcattgccttttccgtaccccaaaatatgaaaggtggtctacaattttgttgtggcattgtcacagcagttggccccatgttacatttcctcttgtggcacctctgagaggtgtttcttcattacctcttgacaagagtatattttgattgactgctctatgtgcttgtttattttttatagcatttaaatcaaacggtattgagatggattgggttatgaaacataatggtccaaatgacgctagtgatgggacagtacgacttcgtggactaccatttggttgcagcaaagaggaaatagttcagttctttcaaggtacctctagtattagtcaaagtttagtagtattgtaattttatatttgtattgttttactgtttttaatttgtaaaacccatttgattttggaacttttaagtttaactatgatagtcttggttaatgtattaaaataatatgctccagttaatattcaatacagaatgtgtagaatatgtaaaacctaattaatgtgcagtaacatatttgagaattgtgatgaaatgaaccgtgaattagtatatggagcatatatttgattttgtagccttttttcatgtaatataggtgggcttttagagtgtgtaattacacagtgtttttacactggtcgcaaaaaatttatttaatccagtaatatttgaaaaaatctttcatttgtattatggggtgatgggaaactaagcttttttgttttgttttgttttgtttagacttgttttaaatatttgattcagatgggaatgtttcagcctttaacactgttccccttgatggggttatttgtccttgggttaaagggttggaaatcgtgccaaatgggataacattgacgatggactaccaggggagaagcacaggggaggccttcgtgcagtttgcttcaaaggagatagcagaaaatgctctggggaaacacaaggaaagaatagggcacaggtggggatggagagtttgggatggtgttaaatttttatttttgggggttgtgggtcactattgcttaaatgggggggtagccataacatttttctggggtagtttaaaagaattgataattatctaaatttaacttggaaactacagatttgggtggggaattaatgctaatagttaaattaaaattagattgtttccatttctctgtaggatgttgttgataaatgcttttgtataatcacctatttcctttaaaacacctattatgtactaaaagagacaaagtaaaaatatactttatgaattgttttccgtgactaatttctttgtaaaacttaaatatttaattaagtttgtaggtttaaactgttaacttacggtgtatttaggcaatttaaattgggttatgtatctagatatagaaaaacttactgcattttgcccagtatctaatttacactaatacatttatgctgaaacctgtaccttaaaacatttttaaataggtatattgagatcttcagaagtagcaggagtgaaatcaaaggattttatgatccaccaagaagattgctgggacagcgaccgggaccatatgatagaccaataggaggaagagggggttattatggagctgggcgtggaagtatgtatgacagaatgcgacgaggaggtgatggatatgatggtggtatgtgtatctaatgaacaaaggttctgttgtcattttcttaatgttcctgacactttgtcaagaaatacagaaatggcagtaatttcagtacctattaggttttaaaacctgttcatgaaaatacggattcccatggctagctgtgggacttgactgatgcacatattggcacctagaaaacttacacagaaattaaaaataagatgttggcatattttgacctttttttgcctaaggatgaaatttaatttacatgtctgaacttaattaactttctgagattttaaatttccatcacgttgactgcttttttcataggttttaagttgggaattgcaaacttgcaatcaagttacacagactgttaaccacaaaatgtttttgtaaactaaattataaaatttatctctggaaagtgtgtagtcatgtgtttctccttaaattacacaggttatggaggttttgatgactatggtggctataataattacggctatgggaatgatggctttgatgacagaatgagagatggaagaggtaaaataaatattaaagacatttttattcataggtaaattttagtatttgctttgcaagctcttagtggtaatataggaaacttgtataaagttaattcagacaaatttcagtgcattcctatatagagctttataccttgtatagtatgtatgtatacttccctacttgtatctgtaatagtttataatcttggcaaattgtgttttccaggtatgggaggacatggctatggtggagctggtgatgcaagttcaggttttcatggtggtcatttcgtacatatgagagggttgccttttcgtgcaactgaaaatgacattgctaatgtgagtaatttttaataactattagtggttttatacttatcctggtgtctaaatctttaagcattcttaatgttctcatgtttatagcttaataccaaaatcccttgaatataaaaatagatctacctttaattctttttttgagatggagtcttgctctgtcccccaggctgagtgcagtggtgtgatctcggctcactgcaagctctgcctcccaggttcacgccattgtcctgcctcagcctcccgagtagctggaactataggtgcccgccaccacgcctggctaattagatctacctttaattctaatcactgatggatatttttgtatccattgtgtgtcaacctacataggattcaaacaagtaaaaagctacattcgtgaagtccagttaagagtataatgaaagactgatcagcatagaatggtgatgactataccattttgtgctggtgtcttttgttgtaccgttttttgttttgttttcttttttgagacagagtcttgctctgtcgcccaggctagagtgcagtggcgcgatctcggctcactgcaacctccacctcccgggttcaagttattcttctgcctcagcctcctgaatagctgggattacaggggcacaccccaccactcctggctaactttttgtatttttagtagagatggggtttcaccatgttgatcgggctggtcctgacctcatgatccgcctgccctggcctcccaaagtgctgggattacaggcgtgagccactgcgcctgacctgtattagggtttgaaagagtgaatatataaatattagtgatttggtttggctttctaggctagatagtgattagaaactgaggagttggaaataacaggaatagatgctgttgttgtcactgatgtgaaactggttggtttcagatttgttaggaggtcagcaaacttcagtccatgggctaaatccggtcacaccattcctctacctgttgagtggttacattagagacccaatggccattcaggccaaaagtactgactctggctttgaaagcaatggtgtgctctagatcttactgggaatcagctggcctgagttccaactgcttttaatgatagtttaaaacctggctaacttgtgattagaaccaaatgatatcttttggggaacaatttcatatagtcttaaataggtggctttattcaaaccgcatagttccaaatcatgatatcccgtatttctctctgtgtgtttgtgtgcttttttttttttgacagagtctcccactctgtctctctgaggctggagtgcagtggcgtgatctctgcttactgcagctcccacctcctgcgttcaagcgattctctgtctcagccttctgagtagctgggattacaggcgtgagccactgcgccctgcctatctgcttattttaaaagcagtaaattctttacattatccctaagtgtatactctgatattcacagaacctctgtagttgactaagttattagtctgacagggcagtggaagggtttgttttaattgatgaggaaaaatcaaggtatgtggtaatttactttaatattctcaatagaaaagtaaataagtgtttccttttatttagttcttctcaccactaaatccaatacgagttcatattgatattggagctgatggcagagccacaggagaagcagatgtagagtttgtgacacatgaagatgcagtagctgccatgtctaaagataaaaataacatgcgtaagtggtgtctttggcacacaatcttatttcctaaacgtgaatttataaaataagaggctctaagatctgtaggtaacgcttggcagttgttgggatttaaaaccatttgacctctataatggctttctgtgggctttatatatcgctgtactagtaattaataagcatactttgtttaatattacttaattgatcttttttacaaagcttgtattgatgaattttatccatcattcctttctcccctgttactctttctttttttcttaaagaacatcgatatattgaactcttcttgaattctactcctggaggcggctctggcatgggaggttctggaatgggaggctacggaagagatggaatgggtatgtaaagtttttaaaatatgcagggttagctgcttatcgatgagtctcaattttttttcttttttctttttaaagataatcagggaggctatggatcagttggaagaatgggaatggggaacaattacagtggaggatatggtactcctgatggtttgggtggttatggtaagtatctctagttcagtttgtgttagtccgcatatgtagtgcaaactttaaagtgcaggtattacttttattattttatgcagatatctcctgctgagtgattcttaatatctttttcttaaggccgtggtggtggaggcagtggaggttactatgggcaaggcggcatgagtggaggtggatggcgtgggatgtactgaaagcaaaaacaccaacatacaagtcttgacaacagcatctggtctactagactttcttacagatttaatttcttttgtattttaagaactttataatgactgaaggaatgtgttttcaaaatattatttggtaaagcaacagattgtgatgggaaaatgttttctgtaggtttatttgttgcatactttgacttaaaaataaatttttatattcaaaccactgatgttgatactttttatatactagttactcctaaagatgtgctgccttcataagatttgggttgatgtattttactattagttctacaagaagtagtgtggtgtaattttagaggataatggttcacctctgcgtaaactgcaagtcttaagcagacatctggaatagagcttgacaaataattagtgtaacttttttctttagttcctcctggacaacactgtaaatataaagcctaaagatgaagtggcttcaggagtataaattcagctaattatttctatattattatttttcaaatgtcatttatcaggcatagctctgaaacattgatgatctaagaggtattgatttctgaatattcataattgtgttacctgggtatgagagtgttggaagctgaattctagccctagattttggagtaaaaccccttcagcacttgaccgaaataccaaaaatgtctccaaaaaattgatagttgcaggttatcgcaagatgtcttagagtagggttaaggttctcagtgacacaagaattcagtattaagtacataggtatttactatggagtataattctcacaattgtattttcagttttctgcccaatagagtttaaataactgtataaatgatgactttaaaaaaatgtaagcaacaagtccatgtcatagtcaataaaaacaatcctgcagttgggttttgtatctgatccctgcttggagttttagtttaaagaatctatatgtagcaaggaaaaggtgctttttaattttaatccctttgatcaatatggcttttttccaaattggctaatggatcaaaatgaaacctgttgatgtgaattcagttattgaacttgttacttgtttttgccagaaatgttattaataaatgtcaatgtgggagataatagta

SEQ ID NO: 9934 - DNA, 440 bp, Homo sapiens
caaaaccaaaatgtacttatttattaggtgtcacttggaagcgcaattttcaacaacgcaaaactataaaaaaaacccaacgtcggcctccacaggctaatcagtctccgaggcactgacggcgggagagatgaaaacgcgaaggccagaggagaaaaagaggaaggatttgcagagagaacggtaacgtggtggacatgaatacacccaagaaacccggatcccgcgcggcacattgggacgaagcgcgctggcgggcggccagcaactctgggccaggggaaggaggcggacacccagcccgagagccgaaatcggccccagtggacgctttcatcttcgcggcccagaaacactcctatttttcaccgcacaatgcaaacatggtggaccagaaaatccgccccgcgtttgccggtcgaaccacgtggggccctttc

SEQ ID NO: 9935 - DNA, 1584 bp, Homo sapiens
cttgactgaagctatgattcatcttaatgcttgtatccacttcctttaatgagcaatttaaatattagggcatacaccacctgtcttttttgaaagttgtatgtgttttattttcccaggattactctcttaacatcttaaagcagtaaaagtatacagtattaatgaaaccaaaattgcccttttaaagcaggctaattttccaaatatttatttagttcataaaattcacattttattttttaaacattataggttagaagaattacaattgtaattccctggcaccatgatagcattattgtggtagtactgctaggtgagggaatggtatgttaagtctgtttttgaaaagtaaaatgaatacgagttcacaatcacgaaatacagattgttaaaagtcttgtaacagaaaaatccaaagttagtatagtttttaaataagccaaaactacatggagcaagttgctgtcataaaagctgccttaaaaaaaaaaaaaaaaaaaaaaaagcaagtaagtcagtgttgatacatgagttttgaaaagtgagaaacttacttaaaggatgacaaaatcatggtttgttgaatgaaattagccttggaatttaagcaacttaagtcacattttaaaatttgttctaagcacagtaataaaaaagcatatttgaaaatttcattttttgtttattcagtaatcataaaaatgttagcccatcccacctatcaatacaaaatggttcaagaatataatcctctcttgaggacatttctgtcagtattcaagaaagaccatctagaaatctgtgtcacatctgacacctcaaaagctgactggaaatttacgggttttggaaaaaatagatcttcaagtaaaatattcatttcatacttaggctattcagaaaaatttaaatttcatggaagcatatattcatgaagaaaagatcctgcagtattaataagaactcctttgtaggcagggaggtacctaggattaaccactaaatataatgctcttaatccataaattttctatgtattttttataggctcacaaacttaaagtgcatggttaaaaattaatgtaaaaaataggatactgaatggtgatagtgtttatgtaactattcagaggtaatttatacaagttaaattcttagtatgccataagcaatataacttggattagtgttcattgagtcagcttgaaataggtcaagtgtactggccaggtgctgtggctcacgcctgtaatcccagctacttgggaggctgaggcaggagaattgcttgaacccaggaggtggagatcgtgccattgcactccagcctaggcaacaagagtgaaactccatctcgaaaaaaaaagaaataggtcaagtgtatatttcatcatctcaacacccttggcatagaggtgctcaatggacatggtgaaattttactgtggatgtatacaggtaggccactacaatgtgatacttcctaaaatttactccaatgaaaatgttaatacaaaattttttgaactgaactctaatacattaccaaagcaaagtcctgatttttttctcactttt

SEQ ID NO: 9936 - DNA, 4238 bp, Homo sapiens
ggctcggtcggcgcgggtggagggggcgtgaggccgccctacggtggccgtcgagggacggcgctacggctcccacgctaggccaaacgcctccggcggccgcgcccgagagccccttcacctgcagggcgaccccagccggcgacgcgtgaaccacgccctcagccgccttgccagcgcccccagccgcgcgccccagcaccatgcggccgccctgcgcacggagccccgagggacaggggcacccgcaggcccggcccctagcaccgccggccggccccgaggtccgggacgccggcgccgccgcggagagggcaccgggtgagctgcggtcggggacccggcctaggcgggggccgtctccagggcaacgcgcggcgcgggacccggaagtggctccggcaggggctctgcagccagggggcccggcgcggcgcggcgcaggcccggtgctcacgcggagttggccggggcccgttgcgtctctgcggccccgaggaaacagtcctgggtccatgggccgggccgagcgggcgtctgcagaaacgcagggacccggatggagccgcgggccgcgagaccctgcggggacacagctccgccgagtcgcgtttgagtggcaccgccatggccggggtcccggccggggcgagctccaggccaaggccggccttaaatagggccgctctggcccctgcaccccgtggaggagccgggcggagggagagggcgaggtcgggcccctgcgggcacgggagggtcaggcggccccggcccctccctcctccgccctggccaggtccccacggcagggccccaggctgaatctgaaggcaggcgaagctcttggcaacagtcccctgtaatgttaccaactttcctgctcagattttatttcctgacctttgagttcattccgtctacagattatttcggcaaggtataaacggcctttactaggtgaagctggagagccaaatgccgcctctgctctttgcagcccagtctgtaagggccgctgccaggccccgggccgaccccactgtgcacgccaggcccagccccttccctcccacagctacccacaaaggcagtgctattggcacccccattggacagagcaggagccgtcttggggtcaggtgacctgcccaaagtcactgctagggaaggacagtgccagggttcaggcccagcaaggtgaccccacggcccccgagccgtccatctggcacccagcaggttgctggagtcacctgctcccgccgggctcgttttcggttcacctgcgagccctggagtcccttttcccggccctgtggtggcttcttgcagatgccatttaagggcttgcatcagccctgggtcaggcagccgcagaagaccagggcagtaacgggcaaactgcctaagagcagagtgtggtccagctagtggggagctgcgaggatcctgcaggaaagagccactcttgccccttcccatccgttttggcattgaccacttccgggggcctcccctggccactgtccccaaggccccctttccccagtgctgccctagaacaagcactttggcttccccaggtggtgggccccttggaagtatccttgggagggtttgtggaaaagagcccaggagtgcctgcagatcccgccctggactccattttcccgtagtcctggtgctggagtttgtgtccactttcgccagctgattgcctggggagggatccgcatggtgtcctcatactgacgtgggttttgcggctctccccgcaggccgacgcctccccccagggtcagctgcgggctcccaggcctaggcgcccatgacccctacgccaacagccgcctggacaccgccgccgccactgcgacctagcgccgccgccgccggggcccaatgccggtcatgcccattccgcggcgggtgcgctccttccacggcccgcacaccacctgcctgcatgcggcctgcgggcccgtgcgcgcctcccacctggcccgcaccaagtacaacaacttcgacgtgtacatcaagacgcgctggctgtacggcttcatccgcttcctactctactttagctgcagcctgttcactgcggcgctctggggtgcgctggccgccctcttctgcctacagtacctgggcgttcgcgtcctgctgcgcttccagcgcaagctgtcggtgctgctgctgctgctgggccgccggcgcgtggacttccgcctggtgaacgagctgctcgtctatggcatccacgtcaccatgctgctggtcgggggcctgggctggtgcttcatggtcttcgtggacatgtgagggccgtgggtgcgagcttgatgtatcgtcccggcctgtggctgtgttctctccatgggtggggtcggccagcgccttcccttcgcccatcccccaggcagtcgctgctgcccggcgcccacggagagaaaagaaagggctgagacttctgtgatgggggcgcggacaccacccctaggctggcttcctggacccaccctccccgtatgcactctcaggggcagcgcccacctgccggtggctcctgctcacatgtcttcgggtcgtactgcggggtgggccctccgttccgcctctctgtgggcctctctccaggaccacagctgccagggactttagacatcaccctgggaggcccctggacacagagggctgtgtgcccaggagcaattccggaggggggccctcctggctgcacagccccttctgcgtgccctggccccagccccagccaacgggacacggaaggctcccctcgctgacacaccacactgccacaaagctgcttactctgccctgggccgcctgaggcctggcactgcccgcggaccaccctgtgtgtgtcatcctgaggggctgtgtgggtcctgagtccccagccagccttcagggtccccttggattgtgtagatgcagtctagcggggggccggagaagggctcaggtgggaggggcctcagcaggctcccagctcaggggctggcctggggggaaccctgggagccaggggctgactccagcaacactggcctgtctgcctgttctgggagggctgtgaggatgtcttgcagatgctctggatttctgcggaggcacctccattcctttctggctttttttgcgggggagggctttgggcctctttctttgagggaacaccgtcaaagaaagcctgggagatcgaggcttcagtgagccaggatggaaacgcgtgtcccaagtgtccggagcaggcggcagaggcctcagtgcggcaaacacagccccagagcctgtgtggcaccagcagcatcttagagccccaggtatatgctgagatcttatctcacgctgtcctccagtgtctggggggcccaaatgatggcacaggggcaggtgggctggaggggcgcagatgcctgtgttcagggagggtggccaccatgggccgaggtctcacccaggaccccttgctctgctcctcagccttgcagtcacggcagcactatggtggactgcccatggccgtgtgactttgggggcaagtgggagggcgccctgaataatgattgcaaggacaacaggcagaggctaccctagagcaggacacagggtgtggtactgacaaccctagtgtcacctcaaatccatgtccccacactctgggcatgggtgggacttgtgaccctaccctgtcaggcggaccagtggcccaggagccatgaggacagttgtgtgccactggaagagaaactttttgaaaaaccctaaatcaggtagagaaagcaaaaaatctctggccgtaaaccgtgctctctaatttatcggcagcttctgtggatgacctctgatgagcccgggctgcgtccacgccctgggcaggtaggcgggagcttccctgcgtgggcctcatttcttgctgcagagaatcttttgcactaagtcatgctgtttcctcaaagaagctttgttttttgttaacgtattactcagagtcacccaagcctcttggctgagggtgaaggtgggacgggaggcgggagggggctggtggtgccgctcgtgcggtgtcaacgctgcagggagttgtggcaccttggtgccctctgagcacctggccgcctgctgtccccggtgcctgtgaaattcgtcatgccatgacccacctgcattaaacctatttttttaatgtgttgatggagtgattgcttaaa

SEQ ID NO: 9937 - DNA, 2169 bp, Homo sapiens
catctgcttcctactctattttatctgcagcctgttcactgcgggttctggagtgcctggccgctctcttctgcctacagtactctgggctttcgcgttgtcttgcctacagcgcaagctggcggtgctgctgctgctgctgggccgccggcgcgtggacttccgcctggtgaacgagctgctcgtctatggcatccacgtcaccatgctgctggtcgggggcctgggctggtgcttcatggtcttcgtggacatgtgagggccgtgggtgcgagcttgatgtatcgtcccggcctgtgctgatgcttctctccatgggtggggtcggccagcgccttcccttcgcccatcccccaggcagtcgctgctgcccggcgcccacggagagaaaagaaagggctgagacttctgtgatgggggcgcggacaccacccctaggctggcttcctggacccaccctccccgtatgcactctcaggggcagcgcaccgtgccggtggctcctgctcacatgtcttcgggtcgtactgcggggtgggccctccgttccgcctctctgtgggcctctctccaggaccacagctgccagggactttagacatcaccctgggaggcccctggacacagagggctgtgtgcccaggagcaattccggaggggggcctcctggctgcacagccccttctgcgtgccctggccccagccccagccaacgggacacggaaggctcccctcgctgacacaccacactgccacaaagctgcttactctgccctgggccgcctgaggcctgcactgcccgcggaccaccctgtgtgtgtcatcctgaggggctgtgtgggtcctgagtccccagccagccttcagggtccccttggattgtgtagatgcagtctagcggggggccggagaagggctcaggtgggaggggcctcagcaggctcccagctcaggggctggcctggggggaaccctgggagccaggggctgactccagcaacactggcctgtctgcctgttctgggagggctgtgaggatgtcttgcagatgctctggatttctgcggaggcacctccattcctttctggctttttttgcgggggagggctttgggcctctttctttgagggaacaccgtcaaagaaagcctgggagatcgaggcttcagtgagccaggatggaaacgcgtgtcccaagtgtccggagcaggcggcagaggcctcagtgcggcaaacacagccccagagcctgtgtggcaccagcagcatcttagagccccaggtatatgctgagatcttatctcacgctgtcctccagtgtctggggggcccaaatgatggcacaggggcaggtgggctggaggggcgcagatgcctgtgttcagggagggtggccaccatgggccgaggtctcacccaggaccccttgctctgctcctcagccttgcagtcacggcagcactatggtggactgcccatggccgtgtgactttgggggcaagtgggagggcgccctgaataatgattgcaaggacaacaggcagaggctaccctagagcaggacacagggtgtggtactgacaaccctagtgtcacctcaaatccatgtccccacactctgggcatgggtgggacttgtgaccctaccctgtcaggcggaccagtggcccaggagtcatgaggacagttgtgtgccactggaagagaaactttttgaaaaaccctaaatcaggtagagaaagcaaaaaatctctggccgtaaaccgtgctctctaatttatcggcagcttctgtggatgacctctgatgagcccgggctgcgtccacgccctgggcaggtaggcgggagcttccctgcgtgggcctcatttcttgctgcagagaatcttttgcactaagtcatgctgtttcctcaaagaagctttgttttttgttaacgtattactcagagtcacccaagcctcttggctgagggtgaaggtgggacgggaggcgggagggggctggtggtgccgttcgtgcggtgtcaacgctgcagggagttgtgcaccttggtgccctctgagcacctggccgcctgctgtccccggtgcctgtgaaattcgtcatgccatgacccacctgcattaaacctatttttttaatgtgttgatggagtgattgcttaaa

SEQ ID NO: 9938 - DNA, 1616 bp, Homo sapiens
gtagttttttagtagagacggggtttcactgtgttagccaggatggtcttgatctcctgaccttgagatctgcccaccttggcctcccaaagtgctgtgattacaggcgtgagccaccatgaccggcctatgaaccacttttgactcagcctgggggactgtcttctgggcacagctggcagtgggttcacctgaccctgtttagcagcagaagcttcaaggcctgttcctaattttgtattttcttaaggaaggtcccttaaaccacagaagcctcaggccccacaaaacctgcatccgcccctggctgcaggacactccagggtctggatgcagccagggccagccacagcctcactagctgaccgcacctttaaaagtacgcgcattggcagctttgttctgacggccacaccccccaagagacctccttggcctttggcttgggtgatgctgacccacatggaggggtctctggcccagcagtcctgggacatcccctgtatgaagaccatatgtctgacatggcacttgccaccctttctggtcatttgcccctcagcctgtccctgtcacaagatgacaggtgcctcgagggtgggggctctgctgtgcctgtgtccttggtacccagagcagggtagcagcgtgggggcaagtgcaggcacgcatgctgtgcttctctgggcgggtgcacagtgggaagcagggggtgtctaatccagagctggagtcaggggactgcagggcagggaggacacgggaaacccacagcaaggagcggggctgtggctctgctcctcccatggcacagccaccagatgggccaggtgtgagccctgatccatggacatgcgaccaccctcaccagcacgcgaaaagtcgagtgacgggtgaccacctgctttacacgccaccctctatctggccacgggcgccatctcacggtgccggcgtcccagcacgagccacatgggaggggagaattatctttggttagtttgtctctaatagtccttaaaacagaagacaaaaaatgaagacaggcatcaagatgctattatctcaatgtttatatatttaaaatgttttatttatttttgtggaggccatgttgccagccaggtcgcccaggctagtcttaaaactcctgggcacaagagatctgaggccggaatgacaggtgtgagccaccacgcccagccttatctcaatagctaaacgtgtggatctgcctcacatctggagaggcagagaggtgagccaccaacaggactattgaggaaggaaggagacctgtttattgattttaagttttttgtagagacaggggcctcactatgttgcccaggctggtctcaaacttctggggcaagtgatccccctgccttggcctcccaaagcggtggaatgacaggcgtgaactagcgcttcttgcctgacacgtttctttcggaatatttgccgccagccatcggtaaagaaaacaggctcttggccttttttgctgtgctacctcctggtggcctttgctcgtccagatgttcctcgaactcctgctcatgtcgggtaaaggcggctctctctcctgtggcggggatggggccacagtggag

SEQ ID NO: 9939 - DNA, 3344 bp, Homo sapiens
ggagcgagcggggccagcgctgcagaaggcggcggctggctctccgggacggtcacatcccgctgcaggggcgggcggaggccgccgcactgcctcccgcaccggggacccaggccagcgtccgggcaacgccccctgctcccggacagactccgtggcccgctcgagccctgggggctccgcagacccgcgcccgctccgcccgcagctcggccccgcgctgcccgcgtcgccgggcccgcgccgggatggggtaggggcagcgccaccgagtcgggcgatgggccgccctctgggcaccgagcagccccccgaggcctgaccaaccgcggggaccggcggaggtgggtgtgggcagggcggaccgcactctggggccgcccgggcaatgcgggggcgggagggcgtagagaaaatagggctgttgtgagctgtggggagcccaggagagctgctgccccccgacctccgtgcgttctgggcagtccttgaccccccacaactcctgccatctccaggagccccgcctggatgtcaagcggatgccaagcggatgccacagttccccccccagcggactccgtggggacatggcttcgctggtgcccctttccccatatctaagccccacggtcctcctgctggtcagctgtgacctgggcttcgtgcgagcaggtaagtaaaggggaacggggctgagggtcaaccacagctagtcaatgggtgaaacctgttaaacaccctggctcccgcagaccggcctccctctcctgtgaatgtgacggtcactcacctcagagccaactcggccactgtgtcctgggacgtcccagaaggcaacatcgtcattggctactccatttcccagcaagtatgaatcacccttctgctcccccaacctgtgtccttggatttcggcacatttcttcacttaagtgggggggatctggaagctggcgtatcctggctcaggctgcccttttcacgctactcccccggagtgcttggatgttgaagagtctctggttgagccttgtggcctggcactggggtgaggctgtcctcctctcccctcatctccctgcagcggcagaatggccccgggcagcgtgtgattcgggaggtgaacaccaccacccgggcctgtgccctctggggcctggctgaagacagtgactacacagtgcaggtcaggagcatcggccttcggggagagagtcccccagggccccgggtgcacttccgaactctcaagggttctgaccggctaccttcaaacagttcaagcccaggtgaggatctgtgctattggattctctggctgcttacctggcttgcagcctcttacttacttccccaagacaagcaacagactagctgagttgaataggatgatttaattcattgtactgccaggaaaggaaagaaaagcaggtgggaaggggattgggtatagacaggctggtattgagttgtttgggggaaggccttttaagcttcctgttacccaacttcacatcagctgcagcctgcatgagtgagtaattaacctgcagccatcccgctttttggtcgctaaccacctgtccaccaatggcttcctcccagggaggggctaccctacactccaagggcaacattatgatgggtccaccctttctaatccccagcatctccatcctgcatgtctgcagtatggaccccagtaacctggagtctgccttctggcttctcccttctcaggtgacatcacagtggaaggtctggatggagagcggccactgcagactggggaagtggtcatcattgtggtggtgttgctcatgtgggctggtgagtaagcagctagacaggggaccagggactcagtaaaggtgtgaggtggcaaaggttgtcaggagaaaaagaagtgagagatacagtggctcacgcctgtaatcccagcactttgggaggccaaggcaggcagatcacctgaggtcaggagtttgagaccagcctggccaacatggtgaaacccgtctctactaaaaatacaaaaattagcagagtgtggtggagggcgcctgtaaccccagctactcgggaggctgaggcagaagaattgcttgaactcaggaggtggaagttgcagtgagcgagccgagatcatgccactgcactccagcctgggcaacagaacgagactctgtctcaaaaaaaaaaaaaaaaaaaaaaagtaagagaaatagagtggagtggggagatacttagttcaggagggatgatttgaactttgaagagagggagaggaggctgttgagagcccagagaggaggactgcatgggcaccaggaattcaggatgttcttcatggattttctagaagctacgtaggtatctccctatgaggggggaagtggagatgaaggctcagactgtattgtgtttcagctgtaattgggctgttctgccgtcagtatgacatcatcaaggacaatgactccaacaacaatcccaaggagaagggaaaggggccggaacagagtcctcagggaaggccagtggggacaagacaggtgatgtgggggccagtgagggcggaaagggtgattctgcccctgaggggcagccagggaaaggaagaaggtcaaagaggggcagaaaaagatggagaatggaagatctgggatgggggaggctggagagaaagggtggcacctattaccttcctgaagttgagactcaggccattttctttcacagaaaaagtcaccatctatcaacaccatcgacgtttgagtgaagaaacacacccagaagagagactgcactaacaactggggatagggatggggtcagggggagcccaagatggtgatctgcccgagactcccagagggtaatgccactcccacaatctcaggcctggtacccatcctctttccactgtgagcagagccagaaggtaggtctgttcagagtctgtgcccctggacctggggagtggatatcagatgggatatctccttccattccccggtccaggggagagtcactagttgtacccgtactccattaggtcccaaatggggtgccccatttcacctgtatcaggactctgagcatccccagctgccccacatcttgcctgtggccctcagagaggggtgtttctgtgggtactcctcttaccccagcaaataaaaggaattgtctgaccctagaggcagatgctgcactgcactactccaatgtcttccatggagcctcaggtgctccccctctcacctggcagccccttcagctgctagtgatatcacttgttggacatttttccaataaaggttcttggacaaactgga

SEQ ID NO: 9940 - DNA, 265 bp, Homo sapiens
acgcctgtaatcccagcattttgggaggccaaggcgggcaaatcacctgaggtcgggagtttgagaccagcctgaccaacatggagaaaccctgtctctactaaaaatacaaaattggtcgggcgtggtggcacatgcctgtaatcccagctacttgggaggctgaggcaggagaatctcttgaacccgggaggcagaggttgcagtgagccaagatcgcgccattgcagtccagcctgggcaacaagagtgaaactctgtctca

SEQ ID NO: 9941 - DNA, 4239 bp, Homo sapiens
ctagggcactgtgtttagtcttgagtcagaggaggaggaataccctggaatcactgcagaagatagcaatgacatttacatcctgcccagcgacaactctggacaagtcagtcccccagagtctccaactgtgaccacttcctggcagtctgagagcttacctgtgtcactgtcagctagccagagttggcacacagaaagcctgccagtgtcactaggccctgagtcctggcagcagattgcaatggatcctgaagaagtgaaaagcttagacagcaatggagctggagagaagagtgagaacaactcctctaattctgacattgtgcacgtggagaaagaagaggtgcccgagggcatggaagaggctgctgtggcttctgtggtcttgccagcgcgggagctgcaagaggcacttcctgaagccccagctcccttgcttccacatatcactgccacctccctgctggggacaagggaacctgacacagaagtgatcacagttgagaaatccagccctgctacatctctgtttgtagaacttgatgaagaagaggtgaaagcagcaacaactgaacctactgaagtggaggaggtggtccccgcactggaacccacagaaacgctgctgagtgagaaggagataaacgcaagggaagagagccttgtggaagagctgtcccctgccagcgagaagaagcccgtgccgccgtctgagggcaagtctagactgtcccccgccggtgagatgaagcccatgccgctgtctgagggcaagtctatactgctgtttggaggggctgctgctgttgccatcctggcagtggccatcggggtagccctggctctgagaaagaaataggaggcttttcagaagagaaagacagaaggatgtaaggttggagttgtattggctggaatttgaacctccagcagctgtctggacatttgtggaacactctgggataatgggggacttctgctcaacatggcagtggcatgttaggcatgttagggcttgaggtggggcattcacattcatctgactgtaaatcccaagggcctccgctcatgctaaattgagaatcttaggggtaaagcaccccctccaggaccgggttgctcagccttggcactagtgctgttctgaccattctctgtgttggggctgtcctgtgtatggtgggctccacccactagatgccagtggcaccccctcccagagatgacaaacgaaaatgtctctagacattgccaaatgtcccctgtgaacatcccctattgagacccactgctttagcgagagagggtttacttaggaagaattgggatagaaattcccagctgagagaacttagctgtggctcctcagctactgacttcttagctcttaatccccttagaatttcatctttctcgatgagcaggctctgcacccactctttttttgccccccgccctcatcctggagtgtgagggtgctcgcccgtactctcagctgcctctcagggactgcactgttcctcttcacccccaggttcctgctaagatcccacgggcgagggcttgctctggactcagacctgtcaagtccccgaagcttcctgcagctccaccttgtaaaaatgctgcctttgggaatcttcgaaatatgtacacagagaaaatcacatgaaggagacctggggtccccacttgtgagtgcaactgcaagtaactctggctagagagacacatgtgtcttgtgtcaaggcaggaggataacctggatgaccttctgaggtctcttcagcccttttcgctagtggtcacccaccaccatggttacttgccagcaacatctctattgctggatggtccctgtctataaccttgggctagtatattttttccaatatgggaccttagtcttactactgatgagttctatgggtctcttgctagggggtaaggatttttattcttgggcttatagagccagttagatcataattcttatgaaatagagagtgtcctaaatatcactgaaataaaaagtaggaaaaagaagcttgaattttaagactgaggctgctctgcagattctagtttggctttcagagttcaagagtggtggcatcttcacctgaattcttcaatgccagggtaataaaccaaaatagtcctaatcagtatatgctagttgagcatcggcataattttctttcctctggctgatcccagccctaaaggaagggtagacccgtgtctttccagccctaaaggaagggtagacccgtgtctttccagccctaaaggaagggcagacccgtgtctttccatgcccgagggccacgacgtcactatgcagggcacacgtggcttggtttaaaaaggtcatcttagatttatcttagtaaatgtaataaattattttttagatcttgaaatttataataaaaatactttacctaccctgatcaccaaaacctgatgttttaaatgtgctttctttttgaaatttatgttttcaaataaaatctccctaaagcaatatttaaaaattggtcaaaacaaggtctgggagtatgtttgtgtgtctttccagctttatcctgtagcgtgtctttgttctgtgttttagtgtcccatttagggagtgatgttttaagggtttttgtgtacttggattaagtaattagaggtgagtggggggaatgggattattgaggcaatgatttttttcttcatgggctctgatagttgcattgattgttctgtattctaattgctatatttgtgtttgcataggtgaagagcaaactggtgcgttatcttgatttttaaaaagtaataaatcctatgagttccagtattaacacttgccagttctggatcctcacacccattggctgagcgcattcaagcaccaatcgaagccaggttcatctctgagctgctgaaaggaggtgtgaggcttaggaaattggagcctgtgttgcccacgaaaggaaagaataaggaagaaatgtggtatggaagcggctacttgctgctttattttcccacctgttagacattcctccacagtgatttggccagttgtatttcacggtaatggaactagatagtgttttccattggctttctctggtagctcttggtcagctcctgagttaacaggatgtggcagcatccctgttcttccttcacgtcctcaccctctgcctccagcagtggaagggaacagccctcatgaggactgcttcctactgcagctcctgctttttgctcatacatttaaaaaactatttctcaagcttcccctccttttggggggaggagctgatagtaggaggccattccttccacctccaacttataccctctaagtctaaggtgaaggaaagattcagaataaatccaacttgtttatagaaaagttcttgttagtccttagacctcatctcaactgctctgttgaaggtaatgatttattgggggggaaaaacaacgccaatttatcctctctgtattaaagtgataattctgggcccacagaaatcagtcagtacctgcggtgtgccttaaggggactctcatgatcatcattcccttctagagaacattctagatgaagaaatgcaactgttgaccttctggttcacccatctccccctcgaggcattcttgataccccttctcacctgcatttctgtcccagggataccagatgcagccactacctaactaggcttgtcctgggggagtgagccgtgaacctggagacatggctttgacccacagctactgttcatttcctcaggctttgcgctgattccctcaataatatgacagtaaggcaagtagtctccttgcctttctcctgaaaggtatgagatgtggacatttcagtgtttgaattattttaagagatgttttatagaaataaaacgttttgtagctaagaattttccctttctcttaatttcttacatctttccacacaaacttatctttccaagaatttgaggtggtgatcatacccatcaagacggccttgtaggctatctgattgctaacagacacgacctagagcttctgcccaaattcccacacaagcattatctcgtttaacatctcagcgacatactggataccagaataatgtttcctcttctctggtgcaccaaaacctgcccttagtgataatctctcaattatgacattcatttgagtttagggtgtataatttttcct

SEQ ID NO: 9942 - DNA, 4239 bp, Homo sapiens
ctagggcactgtgtttagtcttgagtcagaggaggaggaataccctggaatcactgcagaagatagcaatgacatttacatcctgcccagcgacaactctggacaagtcagtcccccagagtctccaactgtgaccacttcctggcagtctgagagcttacctgtgtcactgtcagctagccagagttggcacacagaaagcctgccagtgtcactaggccctgagtcctggcagcagattgcaatggatcctgaagaagtgaaaagcttagacagcaacggagctggagagaagagtgagaacaactcctctaattctgacattgtgcacgtggagaaagaagaggtgcccgagggcatggaagaggctgctgtggcttctgtggtcttgccagcgcgggagctgcaagaggcacttcctgaagccccagctcccttgcttccacatatcactgccacctccctgctggggacaagggaacctgacacagaagtgatcacagttgagaaatccagccctgctacatctctgtttgtagaacttgatgaagaagaggtgaaagcagcaacaactgaacctactgaagtggaggaggtggtccccgcactggaacccacagaaacgctgctgagtgagaaggagataaacgcaagggaagagagccttgtggaagagctgtcccctgccagcgagaagaagcccgtgccgccgtctgagggcaagtctagactgtcccccgccggtgagatgaagcccatgccgctgtctgagggcaagtctatactgctgtttggaggggctgctgctgttgccatcctggcagtggccatcggggtagccctggctctgagaaagaaataggaggcttttcagaagagaaagacagaaggatgtaaggttggagttgtattggctggaatttgaacctccagcagctgtctggacatttgtggaacactctgggataattggggacttctgctcaacatggcagtggcatgttaggcatgttagggcttgaggtggggcattcacattcatctgactgtaaatcccaagggcctccgctcatgctaaattgagaatcttaggggtaaagcaccccctccaggaccgggtttctcagccttggcactagtgctgttctgaccattctctgtgttggggctgtcctgtgtgtggtgggctccacccactagatgccagtggcaccccctcccagagatgacaaacgaaaatgtctctagacattgccaaatgtcccgtgtgaacatcccctattgagacccactgctttagcgagagagggtttacttaggaagaattgggatagaaattcccagctgagagaacttagctgtgggctcctcagctactgacttcttagctcttaatccccttagaatttcatctttctcgatgagcaggctctgcacccactctttttttgccccccgccctcatcctggagtgtgagggtgctcgcccgtactctcagctgcctctcagggactgcactgttcctcttcacccccaggttcctgctaagatcccacgggcgagggcttgctctggactcagtctgtcaagtccccgaagcttcctgcagctccaccttgtaaaaatgctgcctttgggaatcttcgaaatatgtacacagagaaaatcacatgaaggagacctggggtccccacttgtgagtgcaactgcaagtaactctggctagagagacacatgtgtcttgtgtcaaggcaggaggataacctggatgaccttctgaggtctcttcagcccttttcgctagtggtcacccaccaccatggttacttgccagcaacatctctattgctggatggtccctgtctataaccttgggctagtatattttttccaatatgggaccttagtcttactactgatgagttctatgggtctcttgctagggggtaaggatttttattcttgggcttatagagccagttagatcataattcttatgaaatagagagtgtcctaaatatcactgaaataaaaagtaggaaaaagaagcttgaattttaagactgaggctgctctgcagattctagtttggctttcagagttcaagagtggtggcatcttcacctgaattcttcaatgccagggtaataaaccaaaatagtcctaatcagtatatgctagttgagcatcggcataattttctttcctctggctgatcccagccctaaaggaagggtagacccgtgtctttccagccctaaaggaagggtagacccgtgtctttccagccctaaaggaagggcagacccgtgtctttccatgcccgagggccacgacgtcactatgcagggcacacgtggcttggtttaaaaaggtcatcttagatttatcttagtaaatgtaataaattattttttagatcttgaaatttataataaaaatactttacctaccctgatcaccaaaacctgatgttttaaatgtgctttctttttgaaatttatgttttcaaataaaatctccctaaagcaatatttaaaaattggtcaaaacaaggtctgggagtatgtttgtgtgtctttccagctttatcctgtagcgtgtctttgttctgtgttttagtgtcccatttagggagtgatgttttaagggtttttgtgtacttggattaagtaattagaggtgagtggggggaatgggattattgaggcaatgatttttttcttcatgggctctgatagttgcattgattgttctgtattctaattgctatatttgtgtttgcataggtgaagagcaaactggtgcgttatcttgatttttaaaaagtaataaatcctatgagttccagtattaacacttgccagttctggatcctcacacccattggctgagcgcattcaagcaccaatcgaagccaggttcatctctgagctgctgaaaggaggtgtgaggcttaggaaattggagcctgtgttgcccacgaaaggaaagaataaggaagaaatgtggtatggaagcggctacttgctgctttattttcccacctgttagacattcctccacagtgatttggccagttgtatttcacggtaatggaactagatagtgttttccattggctttctctggtagctcttggtcagctcctgagttaacaggatgtggcagcatccctgttcttccttcacgtcctcaccctctgcctccagcagtggaagggaacagccctcatgaggactgcttcctactgcagctcctgctttttgctcatacatttaaaaaactatttctcaagcttcccctccttttggggggaggagctgatagtaggaggccattccttccacctccaacttataccctctaagtctaaggtgaaggaaagattcagaataaatccaacttgtttatagaaaagttcttgttagtccttagacctcatctcaactgctctgttgaaggtaatgatttattggggggaaaaaacaacgccaatttatcctctctgtattaaagtgataattctgggcccacagaaatcagtcagtacctgcggtgtgccttaaggggactctcatgatcatcattcccttctagagaacattctagatgaagaaatgcaactgttgaccttctggttcacccatctccccctcgaggcattcttgataccccttctcacctgcatttctgtcccagggataccagatgcagccactacctaactaggcttgtcctgggggagtgagccgtgaacctggagacatggctttgacccacagctactgttcatttcctcaggctttgcgctgattccctcaataatatgacagtaaggcaagtagtctccttgcctttctcctgaaaggtatgagatgtggacatttcagtgtttgaattattttaagagatgttttatagaaataaaacgttttgtagctaagaattttccctttctcttaatttcttacatctttccacacaaacttatctttccaagaatttgaggtggtgatcatacccatcaagacggccttgtaggctatctgattgctaacagacacgacctagagcttctgcccaaattcccacacaagcattatctcgtttaacatctcagcgacatactggataccagaataatgtttcctcttctctggtgcaccaaaacctgcccttagtgataatctctcaattatgacattcatttgagtttagggtgtataatttttcct

SEQ ID NO: 9943 - DNA, 168 bp, Homo sapiens
tttttttttttttttttttttttgagacagagccttgctctgtcgcccaggctggagtgcagtggcacaatctcggctcactgcaagctccgcctcccgggctcacgccattctcctgcctcagcctcccaagtagctgggactacaggcgcccgccaccatacccgg

SEQ ID NO: 9944 - DNA, 174 bp, Homo sapiens
tttccttttttttttttttttttttttttgagacagagccttgctctgtcgcccaggctggagtgcagtggcacaatctcggctcactgcaagctccgcttcccgggctcacgccattctcctgcctcagcctcccaagtagctgggactacaggcgcccgccaccatacccgg

SEQ ID NO: 9945 - DNA, 923 bp, Homo sapiens
ccccacaattttcccacctcagcctcccaagaagctgggagtacgggtgtgtgcaaccacacccaggtaagttttgttttttgtgtgtttttttttgcatagaagaagtctcactatattgccctagctggtctcgagctcccgagctctcaaactcctgccttgacttcccaaagcactgggattataggcatgagccaccacacccagcctctaaacactttgcatgtgtttcctaaaaacaaggaattatgtgggaacataaccacagtaagacgattaaaatcagaaaattcaccttcatacaatactattagctaacctcgcccggcctagccttgacatttttgaggagtcggttctgcagaatgtccctcagtttgggaacatctgttgcttttctcaggactagattcagtttgtgcatttgtggcaggaataccccggaagtgatgctgtgctattcttagtgcatcatagcaggagacctatgatgtcagtgtgttactggggatgttaattttgatcattggttgagatggtgtccaccagctgtcttcacagcaaagttagtattttctctttgtaaaataagtattatgtagccgggcacagtggcttaggcctgtaattccagcactttgggaggccaaggcgggcagatcacctgaggtcaggagttggagaccaccttggccaacatagtgaaaccccatctctactaaaaaatacaaaaattagcatggcgtggtggctggtgcctgtaatcccagtgactcaggaggccgaggtgggaaactcatttgaacccaggaggcagagcttgcagtgagcagagatcgcaccactgcactccagcctgggcgacagagcaagactctgtctcaaaataaataaataaataagaaaagaaaaaagaaatc

SEQ ID NO: 9946 - DNA, 151 bp, Homo sapiens
tcaggcgattctcctgcctcagcctcccgagtagctgggattacagttgcccaccaccacgcccagctaatttttgtatttttattagagacggggtttcaccatgttggccaggctggtctcaaactcctgacctcaggtgatccacctg

SEQ ID NO: 9947 - DNA, 2388 bp, Homo sapiens
ggacacctagcctggcttgccaggagaccggggtgggggcgcctccttccagggctgaaccggaagtggaggagagctgcaatggccttcccatgcccagaagctgcaggagcagacaatggggttggcaagctctgggtagggtacaggccgcacaggtctgagggcaagatgcaaatgtcactttcagtaccaagaaaaacgaggcaataatctagagtcctgggctgaacgtggacagctcccgaatcatcaggtgggtggggattaggacaaaatcgtgtatcctggggagatggagggaaacagaactgtgtattggtgtgctaatgtctcagtgcttggtacaaccctggcaactctgccaggccgtattcttgttttatgtacaaagaaaccgaggcaggctgcatgctcaaggtcatgggatgcaggcacgacaggttttctgaactcagaactgactcagatttgccagtcggtttggacttctcacccactctgaagatcacaaaagaaagaaaggtcaggaagctcttagtgcctggtgaatactggatggtaaatgctcacaggtctggaagggaggaagggttccccccaaacggtgggtctggtctgttccgggcttcacaggagaccaagcagagaataagacagtgcggacgggatggagggctcaggggtcttccctgcagaggttcctgggggcgtggcagggctgtggctgacagggtgcttcctacggttttttccaggcccagaggctattggccaaaggcagaccccgccggtccttctttgaatccttcatccggaccctcatcatcacgtgtgtggccctggctgtggtcctgtcctcggtctccatttgtgatgggcactggctcctggctgaggaccgactcttcgggctctggcacttctgcaccaccaccaaccagacgatctgcttcagagacctgggccaggcccatgtgcccgggctggccgtgggcatgggcctggtacgcagcgtgggcgccttggccgtggtggccgccatttttggcctggagttcctcatggtgtcccagttgtgcgaggacaaacactcacagtgcaagtgggtcatgggttccatcctcctcctggtgtctttcgtcctctcctccggcgggctcctgggttttgtgatcctcctcaggaaccaagtcacactcatcggcttcaccctaatgttttggtgcgaattcactgcctccttcctcctcttcctgaacgccatcagcggccttcacatcaacagcatcacccatccctgggaatgaccgtggaaattttaggcccctccagggacatcagattccacaagaaaatatggtcaaaatgggacttttccagcatgtggcctctggtggggctgggttggacaagggccttgaaacggctgcctgtttgccgataacttgtgggtggtcagccagaaaatgcccgggggcctctgcacctggtctgcaggccagaggccaggagggtgcctcagtgccaccaactgcacaggcttagccagatgttgattttagaggaagaaaaaaacattttaaaactccttcttgaattttcttccctggactggaatacagttggaagcacaggggtaactggtacctgagctagctgcacagccaaggatagttcatgcctgtttcattgacacgtgctgggataggggctgcagaatccctggggctcccagggttgttaagaatggatcattcttccagctaagggtccaatcagtgcctaggactttcttccaccagctcaaagggccttcgtatgtatgtccctggcttcagctttggtcatgccaaagaggcagagttcaggattccctcagaatgccctgcacacagtaggtttccaaaccatttgactcggtttgcctccctgcccgttgtttaaaccttacaaaccctggataaccccatcttctagcagctggctgtgcctctgggagctctgcctatcagaaccctaccttaaggtgggtttccttccgagaagagttcttgagcaagctctcccaggagggcccacctgactgctaatacacagccctccccaaggcccgtgtgtgcatgtgtctgtcttttgtgagggttagacagcctcagggcaccatttttaatcccagaacacatttcaaagagcacgtatctagacctgctggactctgcagggggtgagggggaacagcgagagcttgggtaatgattaacacccatgctggggatgcatggaggtgaagggggccaggaaccagtggagatttccatccttgccagcacgtctgtacttctgttcattaaagtgctccctttctagtcctttttctgcccagaa

SEQ ID NO: 9948 - DNA, 1759 bp, Homo sapiens
ttgaatctcatcccaggcaccatttatttccctgtccctttctgggacccctgaacttctcttcccagaagagcaaacgaaccaaatcccaggcccttgtcctgccccacagtgcctcacatcccttcggaagagtccaaggcctggggaggggcatcttcagctgaaggaggacacagggtgtctgctgggaagactggctgtcccacagcagtgcccagccttcgcaggacctctcttggtctctgtccgtgggtgaccctgctccagcctctcagatgatgctggtcctgcaggtgccctggctctgctccaagtggctggccttggtgctgttgctgaaggaggccacggggtgcagtgggaactcacggaggtgccattgctgccacttcttctgaacctccagctgcacctgcccgggagaccagccatcagcccaggaggagaggacagttctgtgcctggagccctgctcactcccccagtgactccacgcaggccctgccactcctgcccagctgccctgtcccctagcctgcaggccacgcagattgactgtttccagccccaatgtccagtagctactgagggtcccctctctcctgggcacatgcacctgcaatctcattacatcgtgtcttaaagaaaggacttgtgcaccttgggacaagtgtgtgcccttgacattacaagagcagtggtggggaaagctagctccctggcccccaggctgagaggaaaagaatcccggattaagccagaggctgagttctctgaaggtctggggcactgacaggggctactgggcagagggccagcttagaggagggtgtggtctgaaggtgtgggtagggcaaggcctgactccactcagtgatgggtccccagtgattttaagtgatttaagatgggtccccacttattcccaggaagccacccaagctcagaactgatctgggaactagggagtttctctttgtaaatttccttcacaattcccagctgcagcagctgaacctttgaagctaggcttgatatttgatttttgggaaacatcaaagatcactcccattcaagtgcaacaaaccagatagatggtcagtagtcacagaaagccttagctcatgttaaccacatagctctgtatgccagagcctggggtcctgacccagatgctccatgtgaggctcgagtcctcaaagtgagtgtgcagtctcccaaggagtcagtgctcatctggaggtccctaaggattgagctgcagacagttctgagtcacccgtttcacatatgggcagactgaggcccagaacagggcagtgactgagatcgcccattaagcaagcagcagggcagtcaggaacctgggttctgcccaactttcctcctgcatttgctgaacagatcaacatcggcaccaggaatgcttgttaaaaaacactttctcagaccccagtccagacctacagaatttatttctgtggaatgagaaactaggaacagggtccagccatggtttgaacaagccttgctcccattaagcaaattcagactcctaaaagaactggccaagccacctgccaccagacccaggactccctctgaccctttccatcccccttcctaccacccctcccaggtagctccttctgacccggaaaccaatggctaggagctctcctgggtacctgggtgacccaagactactcacctccccattgaggaagcagtagaggacggccaccaccagtccctg

SEQ ID NO: 9949 - DNA, 21860 bp, Homo sapiens
ctgtttatgaaacacaacatgctgatctttaaaaagttatgttctaccccgaagtgatttgagcgacttatattgatcatacaagtcattttgtattttcagtattggatggttacggttattacatcattgccttactcacataagtgatctagaaggaatgatggcaagtgcagctgcacctactgctaatctgctgcagacttgtgcggccttattgatgtcaccttactgtggaatgcattcacccaacatcgaggttgtgcttgtaaagataggactgcagtctactagaattggcctgaagctcatagacattctcctgagaaattgtgcagcatcaggcagtgatcctacaggtgataattaactttgatatttaaatgtttacatatctgtaaagtaacagcagttgaactgtgcgatcttcgtgcttaactctgttttgggaattattttttcttttagtttatgtttatctctcctctcttctctgatggagtctcactctgttgcccaggctggagtgcagtggcgcaatcttggctcactacaacctccacctccctagtagctgggattacaggcatctgccaccacacccggctaatttttgtatttttagtagagatggggtttctccatattgatcaggctggttttgaactcctgacctcaggtgatccacccaccttggcctcccagagtgctgggattacacgtgtgaaccactgcacccagcctagtttcattatttttagagtttgttctgtgttgttggaatttatggaagcctcatttttaatgaataacttaattcaattaagtaaatcttcccatggttaacttgcttatttagcaaactttttctttggattctttgttgcaagatttgaatagtcctttactttttggaagactaaatggactctcttctgactctacgatagatattctttaccagcttggaacaactcaggatcctggtacaaaagacaggtacgattttatttttcatttaattaagcacacacatgcacataatcatgctatagtaaatgtttctgacagtttttccttagatgatctcataaaagacaatactgtgatatattgtatgtttaccatatgcctcacacgatgtaacttctgcaagtattcatgaacattagacatacatttgtatgtgtttggacatactttaagcaaatttgaacttaaatagaattctttgttaatactgcttttgaggaatggaataaaacatatatttttaagttggctacgtgtgaaaggaaccttgtaaagtgatggtatcagagtcatactgtcttaggtagtactttatatgtgtatatgaatgtagggatattgtgtctgtagttggtacttcaactgtttttataatggttctgtttatttattattgattatcgtattcatcgaaatcttttcatgactttctgcaccctttcctgctgtttacagaatgaaacaatatcataacatgtaaatgacatttgaacacattggctaaatatttagtgatttttttcttttcttttctttttttttttttttttttttttttttacatttaggtaattttaatgagttgtcctaatgtcattctaccttgatgtcttctacttccaaattgataccaacttgaatttttgtttgttttgttttgagatggagtcttgctctgttgcccaggctggagcgcagtggtgcaatcttggctcactgcaagctccaccttctgggttcatgccattcttctgcctcagcctcctgagtagctgggtctacaggcgaccaccactataactgactaatttttttttttttttttttttttttttgtatttttagtagagacggggctttaccgtgttagtcaggatggtctcaatctcctgacctcatgatccgcccacctcaggcctcccaagtgctgggattacaggcatgagccaccgcacccggccaacttgaagtagttttgaaacatatttttgttgataaatttttgagcaaatatttggcattctctgtttttatgtgtagcatccatattagaaaaacagagagatttcttcctgatttatgttactttttaatattttgattaattatgtttaaaatgaagtcatttgatgttttattaatatctttataaattattaaaattatggattacatttaaacatagattgcaattgtttttgatgaagtgaataacaatttgtgccaaatttgaatcataatcgttagtagtggttaaaatatatttaaaatatcagtgttaaatatttttccagaacaggttgcttgaaatctgttaggattatttaatttttaaatattgttgtggctttttaataagaagaaaattaagcttaattcattttctctgcatagtactttttaaaacatgaatgtttgttatataaaactgacattaatgacaaggttgttagactgagaaaaatgtcttccttgtcttctgaattctctttattccccatcatgtgaaattgaaagtcttatctttcagaattagtattatataccttcctatccctgtttcttttagtgtgaagccaagaatcttatattctgaaatagaaattgaaggaaaataaacaaaatgtaaacacagtgttttaagaacttgagaaatctaaaagtctttcgctcccaggttgtggttcaaaattgggtgtgttttactggttcccaactccaggagattgggattagtggggttagttgacctataatcttgttattaatgttagttctaaatgacagatacctgtatttttaaaagtactatgcagagaaaataaattaagcttaatttccatcttataaaaattatacttaaaaaaaatatgtaagtgttgagagtgtattctgttgtcagaatgaatgagtgtgggtggctattactagtatttaatgctagggtccagggatgtgaaacgtgctgtatttcatgagactttgcacaatgaagaattagtcccagatcactgttctagtatgttatctcaaaccttttgatggttgaaattggtaaggttattggaaaattggaactggaactagtatgtctttgttgccgagagatttcctttttttcctattttagattaaaataatcaaaaacaattagtgcattattctcataaataccctactcaccatgcagagatggtatttatctatatgaaatgccaattgcactatatagttggttatatgaattcgttttcttcgtttaagaattcaggccttgttaaaatgggttagtgattctgcaagagtggctgctatgaagagaagtggcaggatgaactacatgtgtcctaactcctcaacagtagagtatggtcttctgatgccatctccttctcatttgcactgtgtagcagccattctgtggcatagttatgagctgcttgtagaatatgacttaccagcactcctggaccaagagctctttgagtaagtatgatttgtgaaatcttttttatcccccagtactagatcagttagtgttcacttgataaaacaaaatattttacatgtttattaggagaaacataatattttgaaagtagcaaatataatcaagtatacttttgaaatgaattgtcaaatattaatttatctttgtgttttaagaagatatgttagcagtactgccttcttttttttaacctaaaattatgcttaatgtagatgttgctgtggttcatagtgtttattctcagttgcaaattttcccaccagattatctttaatgtacaactctggcaggatagtacagctagacaactttgggggtgggcatggtggctcacacctgtaatcccagcactttggaggccgaggtgggaagatcgcttgagtcaggagttcaagaccagcttgggcaacatgcaaaacgttgtctgtacaaaaatgcagaagtcagaaagctgggcacagtggctcatgcctgtaatcccagcactttgggaggccgaggtgggcagatcacgaggtcaggagttcgagaccagcctggccaacatggtgaaaccccgtctctactaaaaatagaaaaactagcccggcgtggtggcgcgtgtctgtaatcccagttacttgggaggctgaggcaggaggatcacttgaacctgggaggtggaggttgcagtgtgctaagattgcaccattgaactcaagcctgggcgacaagagcaagactctgtctcaaaaaaaaaaagtcagccggacacggtggtatgcacctgtcgttccagctacttgggaggctgaggcgcaagaattgtttgagtctgcagaagttcgccatgctgcctcacgccactgtaccccagcctgggcaacagagcgagactctgtctcaaaaaaaataactttggggagctgagatgggaggatcacttgaaacgaggcgtttaatgccagactggctaaaatagagagaccaaatctctacaaaaaaattaaaaattagccaggcatggtggcatgttcctctatccctaactacttgggacgctgaggtgggaggatcacttgaacccaggagttagagcccacactgacctatgatgatggcaccactggcactgcagccagggcaacagagcaagacgtcatctcaaaaaagaacaaaaatgtaaagctagaaaatttgagacttttctagattgtccttttgacaagtagtttttatttacccacatttcttcaccatatttagctaagtctttgctgaacttactgatagctaactattaagtctgcagcagaatacatttttgaagagttcctgtaacacataaaaagtaggcctattgttctctggtaggtcatcatatttggccttagcgattggcataatccatgacttaattactgagcctcactggtagttttttatttgcaaacatgaatttaagccatttgtcatgtggaatttaacgtaaacatttgtttggcatgatttttttgtttgtttgtttctctacatgaccttttcaggtcacacagaatgatagaaccattttaaaataatttacttgattttctgtactcattgacaagtctaactcaacttgcattgtacctacattcttcaattttaaatatatatatgtgtgtctatatatatatatatgcagtcttaaatcttacaatgttttattattcaatgtcaaataaagtatataatgtcagagtatactttgaactataacagaaatatttgaaatagtttcttctaaaaatatacttgtatcattaatatgatatcttttattttttaggttactttttaattggtccatgtctcttccctgcaatatggttttgaagaaagctgttgacagtctactttgctcaatgtgtcacgtacacccaaactatttttctttgctcatgggctggatgggaattacccctcctccagtgcaatgtcatcatagactgtccatgacagatgatagcaaaaagcaggatcttagttcatctttaacagatgactctaaaaatgcacaagcacctctcgcattaactgaatcacatttggctacccttgcttcctcttctcaatctcctgaagctattaaacaattactagactcaggtttgccttctcttcttgtgaggagtctggctagtttctgctttagccacatttctagctcagaaagcattgcccagtcaatagatatttcccaggacaaactcaggcgccatcatgtcccacaacaatgtaataagatgcctatcacagccgacctagttgctcctattcttaggtttttgacagaagttggcaatagccatattatgaaagattggcttggtggttctgaagtcaatccactatggacagcacttctgtttttattgtgtcactctgggtccacttctggaagccataatttaggtgcacaacagaccagtgcaagatcagcttctctttcttcagctgctacaacaggactgactactcaacagcgcacagcaattgagaatgcaactgttgcgttctttctacagtgcatttcatgccatcctaataatcaaaagctgatggcacaggtaagacaaaaaaataacttacattttagttgttttattacataagaaagggccatgtataaaggccaggtaataataaatttagtgagggttgagtgcctttaaggatctgaatttaagctataaagtactgatatctcctttctccccctcaaaatatgctgtcactggaatcacttattctttatgatgagatgactagcagatgcattgggatgctagctagatcatacaacccttattttcaaaaatttctacaaacaaaaagaaaaagcccaaaaaaacatttcagctgctggaacagtatggacactgatcactgagtactgtatgtgccttgaggcattgtgtttttgtgtaacgagattgccatactgatagtttgcttctctttacatgggcattagattaggtttcagataggagactccacataaatcacatacaaaatgtggaagataggctggttgtggtggctcatgcctgtaatcccagcactttgggaggctgaggcgggcagattgcctgaggtcaggagttcaagaccagtctggccaacatggtgaaaccccatctctcctaaaaatacaaaaaaattagccgagtgtggtggcatgtgcctggaatcccagctactcgggaggctgaggcaggggaattgcttgaatcagagaggtggaggttgcagtgagctgaaatcttactactgcactccagcctgggcgacaaagcgagactctgtctcaaaaaaaaaaaaaaaaaatgtggaagataatttatcatactgcactccagtctgggtgacagagtgagactccatctcaaaaaaaaaaaaagtggaagataatttatcatatattatgattatcataataagctgggtgtggtggattgtcatatattatgataatcataatttattatttatcataataaattaaatcctgaaaggtagaattatttcaagagtaattctagttggctttttgccaaattttgcttttggttacctcacgtgaccttgggcatattggttaatcttataacatggggctagcaatacctgcctcaaggattttttgagacagttaaatattttaatttgtgtaacatacctagcatagagcctatatgagatatggtagacactagtaaataacttttctccttgttatttaatagtgctcattcaagtcaaactttagtagtacctagaaaaatagataatataatttttataaaatattgaaggagttagttttattaagaagaagggcaggtcgggtgctgtggcttatacctataatcccagctctttgggaagccaaggcgggtggaacacttgagcttagaagtttgaggccagttttgacaacatggcaaaacctcctgtctaccaaaaaaagaaatcataaccaaaattagccgggcatggtgatacgtgcctttggtctcagctactcaggaggcttgaggtgggaggatcacttgagcctaggaggttgaggctgtagtgagctgagatcacaccactgccctccatcctgggcgacagagcgagaccctgtctcaacaaaaacctaaacaaaacagaggaagaagagaaagatatttaactgcctgtagtaattaattactgggaaaatatctctgctaaatatgcattaaaaggaaatgcttaaattaccaacttcacccgagggcatgattctaggtatttgaaaatttggtttgtgcttctgggtagcatgaactctttgtgtcccattgatttctctcttggtttcttagtaaggctttatatacattttgggggtgaggtggggcaggatctctctctgttgcccaggcctgtagtgcagttgcacaatcagtgagccgtggctcactgaaactttcgggctcaagaagtcctgcctcagcctcccaagtagctgggactactggcacatgccaccatgcccagcttatttttttttggttgggggagtgggtagagacaggtttcaccacgttgcctaggctggtctggaattcctgggctcaaatgatctcttctcttagtttcccaaagttctgagattatcagcatgaccttggccttgttatatatttttaatatgctttttctcataatttttattttaagataaccacaccaatattgactaaagttaacgggagttcgttatgctaggtattcattatgtgcaaaccgtttagtactaattttttctaaccctggacacgtttcttacacttttatctcctttggtattcatatattttaagataaaatcatttctttcctccttaaaaaaaaaaaacttaactactagacccccagagacatttgttctttagctactgatttgatatgttaaaataaacttattcatattttctgtttcctttttatctttcaaaataaaaagctgcatataaatcttgcatttaactttttaaatattttgtcttgccaggttctttgtgaactatttcagacatctcctcaaagagggaaccttccaacatctgggaacatttcagggtttatacgaagattatttttacagttgatgctggaagatgagaaagtgacaatgtttcttcagtctccatgtccagtgagtatttaacacttaatcattggctgtgtatacatgtattttacaattttgtatcagagcctgcagttacctcctatgttctaacttcgagtatagcaaagtgaaactagcacagcctttatacctaatgacagaacttgacaatttcaggatagcgctctccctcatgcctaggaataacataattttaccttagcctgagaagtatagtttgatttgtggaaaaaaatgaaaaaaggtacagagtgataatgcaaaagttgaccaacaaatcatggcaactatgccatatctaaattaattatatcttgtaggatttattgagtattttattcttagatgcttttgagattattttataacaatatgtattccaaaaagttacttcctgatttctttgatttcttgattttcagctgtacaaaggtagaattaatgctactagccacgtcatccagcatccaatgtatggagcaggccacaaattccgtactcttcatttgccagtctcaacaacattatcagatgttcttgacagagtgtcaggcaagtcagatttaagtattagtttttgtttaactttatgtttgatgtatatggaggtttattgtttttataactttattttctgcatccactttgcaaccattgatgactaggaaagttcaagacatctttatagtttgaagcataagaagccagtcaagtggacaaaatgtaaaatacttttaggcacccctaattttttggtttattgtgtcacagtgagaaatgggcagctagaaatacagacaaataattgatggcatgttctcacaataaaccatctggtcattttatactagattaattgcaggatatttggttgaatagcaagattctaattaatacacatttactaaattgaaggtggtgatcagtgatcaagacataaatggagtaggtagaattgactggtcacctcattgtttatcgtagtcagtgaagaaagcagacagaacattttcccctaggttcttgcctgtattttataggatgatacctttaaacaacatatgggatagttttttaaaaagcagtttttgatggcaaaggcatatcaactttttattttatttatttatttaattttgagaggggggtctcactctgtcacccaggctgaagtgcagtggaacgatcttggctcaccacaacctgtgcctcccatgttcaagcaattctcctgcctcagcctcctgagtagctggcattacaggcatgtgccaccatgcccagctaattttttcatttgtttagtagagactgattttcaccatgttggccaggctggtctcgaactcctgacctcaagtgatccgcccacctcggcctcccaaattgctgggattacaggtgtgagctaccgcgcctggcccatatcaactttagatagttggagtgtattgccactgtgaaattctggttaatcagtgagtgaacttgctgagcatctgcaaagtgcaatcactataatttgtcctaagattataaacatgagcaagacacacattccacctcacaagatagttgtgatcttatgtctgttgtcaacttctaaaataaactagaaatgtctgtttgcattataacatgaatataagtagatatatttctatctgtatacataagaagggacctaagtttttaatggaagctgtgaactgaagcaagaataggagtatctaagaaaaaagttggaaatgtctatcagttaaaaatacaaatctaaagcccagagtaaaagagagagttaaagagatttgggagttgttaccacacatagatggtaagtgaaaccatgtgaatggatataatcattataggtaggaaagattgttttctgcttcacaatcgctgtgtctaatatgcatgtgcataaaatcgtaattctttcctaccgttttacaacttatacaataggttgttagcatactgttataaatattaaaaaaaatttatttgaaaatgactgccttatctgttacagagaaacttttttgaaaatttgatgttagacagtattttctatcagtttcctgaaattgtccattctacatgatgaagaaaaatgaaaattaaaaagtaaataaatgggccaggcttgttggctcacacctgtaatcccagcactttgcgaggccaaggcaggtggatcacctcaggtcaggagtttcagaccagccctgccaagatggggaaacacatgtctactaaaaatacaaaaattagttgggtatgatagcgtgcacctgtagtcccacctatctgggggactgaggtaggaaaatcacttgaaccctagaggtggaggttacggtgagccgagattgcgccactgcactccagcctggacgacagagcgagactctctcaaaacacatacaaacaaaattaaataaatgaagaaagtggggaggagcactgaagctcagttattgatattgatatttcatatgtttaacttgaagtgcaaaagtagacattctaatacaaaataactgaaaattgaacattttaattagtctttactgtggaagaatgctattctaaaacattctagcattcaaaatattttacaaaatagttttctgtattgcataaaaataaaagctaatcgctttggaagtacacgacctcaaaagttatatgtgctgaatgtaacctacttagcgattttttttggttctttaaagtggatttatactctttagccatattttctgatatatttacttgtacgtttatattagatcaacatgtataagaataagtaattcagaagtattgcctcagtaaatttacctgctatctgtagcttttgacagtatactttctttttttttgtttgagatggagtctttctctgcattacttgagcccatgagttccagaccacctgggcaacatagcaagacctcatctcaaaaaaaaaaaaaaaaaaaaaaaaaaaagcaaagacaacaagagaatattaaaactggccaaaaaggaagtgacctattattttttctctctctctgttttttttgttttttgttttttgttttgagacggagtctcactctgtcccccaggctgtgcagtggcgcgatctcggctcactgcaacctctgcctcccaggttcaagcaattctcctgcctcagtctgcagagtagctgggattataggcacgcgccaccacactcggctaatttttgtattttttttttttttttagtagagatggggttttgtcatattggccatgctgatgtcgaactcctgacctcaagtgatctgccttcctcggcctcccaaagtgctgagataacaggcatgagccaccacatcaggccgacaatattactttcaaataataacctttatgtgtcagtctgtttgcttttacaaatttctgtcactggttttaagcagtatgatgattgtgtgccttacaattttttcttcacatttcttatgattagagtttgtcgagtttcttgaatctgtgtgttttagatttcactaaatttcgaaatattttggcaattatttcttcaataattgcctcccctttttttataattacagttacttattaggctgtatgaagttgtttgacaccccaaatctgtgtttcctcttttcccccccatcattttttttctctatttttaaattttggataatttcctgtgtctgatctgttagacgttttatatctccttgtccttacttaaagtgtataggttttcttcagctttcttgaacatagtagtctgtttgtactatttttctcttccttatggattgtatgttctcgcttctttatttgcctggagaattttcttggatgccagacaatgtaaattttactttttggggtgctgaatattttgtattctaatatatatattttattttttcatgaaatataatgatattatttgaaaacagtttgttgcttttagacttgcttttaatctttgtaagtaggatcagagcagcttttaatctaaggcaagacttactgtaattattggtaatttttataaaccaatgttgtctagtttggtaactgttaagcacatgaaatgagactaagaaactaaatttttagattgaatttttaattttaatgaattttacctttaaatatgtacctcattagaatagaattaaggtaccaggtttgaaaatgcagttctaaatcccatttgaccccactattaaggctctgtccttatgagtactctgttaggaattcactagatgtctaagagcacaaagcattttattccctgaaaccctggggttgcttgccctgctacttttcgatagtacctttcctggccttcagtggtttgctcacataggttcgtcagtacatgttgaagtcttgaagaccctgtatagatctctggagatccagggatctccagatctctagatgcaaatctgcatagatgcaaatattttcttcctggatttccggctcttacatcctcagtctagggtgacaactaggttgtgctgagctgtggcctaggaattcttttccagacagctcacacaatcctaggggtcacctcattggtttccacttacccaggcatcactgccctgccctgcctgatactcagtgtctgaaaagtattgttaatatatatttctagttaaggttatttcacgtgggagatgaacctgatccttataattccagaagtggaattctaaaacagagcagctttttgcatacgttcaagtacagagaaaaaaataaaacagaaatttgtattaaaaaataaaaaagtaaattaatattagaaaccagagcatttttaaaaggaagttgagaaatttttttttagtgtttgaatggcatttattctttatatttacttttgaaataagggtaataaatgaaaattggctaaacttctaattgcactaagtaaattattacctaatattctttgtgtgcttttcttacctgattatgctatgaattaattttgtgaatttcttattatttaaatgtttcactctgacctgtgtcagtatgtttgccatttttagttgcttggttgtttttgttagaaagtaaaatgtattgttgcaccatgcatttgttatgtgtataaaattttttacttcacaaaactgtctataggcaattagcaattagtattaagaagttgtataaattgaaatcactttcatatactaaaaactgtaaaatgagagttattacaaaagatgttgtttattgttttattgtctcaacctttttaacataaaagaccgggtcataattgtgctaaattagggaagtaaaaagagaattgagctagatgcagtggctcatgcctggaatcctagcactttagtaggctgaggcaggcagatggcttgagcccaggattttgacaacagtctgcacaacatggcgaaacctcgtctctcctaaaaatacagaaattcatggcatgtgcctgtggtctcagttacttgtgaggctgaggtgagatgatcacttgagcctgggatgttgaggctgcagtgaaccgcgattacaccactgcactccagcctgggcaacacagcgagaccttatcttaaaaaaaaaaaaaagagaattggagacttgataacagttatatagtgaaaaaaattaaaatttcaaatcaattcattcagcctttaaatttcttaataactaaatcacattatatgatcacccatttattttataatttttagtggtgtgctgtatgccacagtaatgaaaggaatattcagagtaataactatctatgagagcccttaatactcattttttaaagtaaaacacattaaattttaaaacatattactttgttgtctaagattcctgtttttgtcctaaataaaaattaacagaacaggaaatctgttacagaaatttgttcttttatactttcatttgtaatataagcagaagtctagtttaatgctatagactgaatcttgagcttgagtcccatatttgccatatacagattatatcagtagcctttctaaggctgtttcttcattttgaaaataacattcatttctatgttgcgaggactgaattagatgcagttgccaagcacattgaactatggctaaaataaagcaagttttcatgctactggtttttcattgtttctggaggtggtaccattaaaatactgtatataatactttacagagattagatcttaaatattctggcttaagtacagtggtgagtcttcctcatcaatgtcagtaaagattgggtatcaggcctttacctcatgccatttctcctaaattcctttatattgccttagtattaaggataatattatcttgcataatctccctctgaaacatatattacttctcttcttaatgatttggaaaagcagtgtattttagataatatcttcttacagatactccaagtatcacagctaaattaattagtgaacaaaaagatgacaaagaaaagaaaaaccatgaagagaaagaaaaagttaaagcggaaaatggatttcaagacaattacagtgttgttgttgcctctggtatgctttctattttttataatcttgattttgtttgggtttctataaaatattagaattttagttacaggaaatttatgtaatacattgtactaatataaaaagctgactcgtaatgatgttttaatactagatttttatctttttatttttattttttttcactttccactaaataggttgtcatctgtatttcagagattatagcagctagctacagtttttactttttaggaaaatagttacagatgcaatgccaaaattatttatttgttgtcatgaaggacgaatagaattgggagattagatattggattagaaggaacatttctgttttctgacattagctaggaatgcatgccttattaaaatattttaggaacactgttttccttcatattagtgtgttgactatgtagaatcttactgatccttttcttttagggctgaagtctcaatctaaacgtgctgtgtcagctacaccacctcgcccaccatccaggagggggaggacaatacctgataaaataggaagtacttcaggagcagaggctgccaacaaaataattactgtcccagtgtttcacctgtttcacaaactcttggcaggtaatattcctcaatgaataaacgtcaaagaaattttagtagccttaaaactatgtaaatcagaggcacagtcaccaaaatcattttaatcaggtgccattgatgagatcagtgagttagtgagacttcttccatacagttcctccgaagagaagtgagagcaaaggaggagtaatctattacgtatcctttttaacactatcaagttatttatttctactttactggttttctaagtttttctgtcagtgtgccatgaaatgattgatgaaatagacatttagagagttcatgacaagttatttaggaaacaccgtggggcaaatttgtaggactagttcaagcagtagaactcttagaccactggtagttaagccatatgttcttcccagataaaacacatttattgagcaccatcctgtctgttgttcaaggtgataacaggttgagcatccctaatccaaaaattcagtatctgatactttttgagtgctggcatgacacaagtggaaaattccacatccgacctcatatgacggttacagtctaaacacaggcacacaacacagttttttcagtgtccacaagaggaaaaagatcttccagcccccttcagatattttttgagcatgcccgattcctccctacatatccacagtgggtaacaaaactgcaaatgtgcatgccagacgtgccaacagcaggtttcccacgatgccccacatgatgccaagatgtgtgtgcattactgtgtttttttgctctgtggtgttggaaatttaaaaaaggccccagatacccttatgggtaacaatgataaaaagaggaagtatttatgtttatctgtagcacagaaaaacaagctgttggagaaactggacagcaatgtaagtgtgaaatgtctttcaagagagtatggtgttggagtgaccaccatacatgacctgaacaaacagaaagataaaccattgatgttctgtgctgcaagtggtgaatagaggttaatgaaaaatagaaaaagcactccatgaagctaaaaatgaagatattgattgtgtattgaaacagtgaatccatcagtgttggcagtgaacacgtgcctcttaatggtatgctgatcatgaaacaagtaacgatctatcatgatgaactgaatgttgaaaggagctgtgaatattcaacacactggttgcagaagtttaagagaagatacgacattacatttttaaagatttgtggtgataaagcatctgatgatcaggaagcaatggagaagttcattgataaatttgccaaagtcatggctgatgaaaatctgccagaacagtttataatgctgatgaaatatatccctgttctggtgttattgtctcaaaaagacactgggctacagttgatgggacagcccctccaggaattaaggataccaaggacagaataactgtcctgggatgtgctaatgcaactggcatacataagtacaaacatgctctgataggcaaaacctttcacacttgttgttttcaaggagtgaatttcttaccagtccatggttactctgacacaaaagtatggatcaccacagacatcttttctgattggtttcataaacactttgtaccagtggcttgtatgtactgcccataagctagactggatgatgtaggagtttgttattccttgatatcacccaattcatcctccagctaaaattctcaaaactaatgtttatgccatgtactttccctcagatgtgacttcattaattcagccatgtgaccagggtatctttagatcaatgaacagaaaatataaatccactttcttgaacagcatgctggcagcagtgaacagaggcatgggtgcagaaaattttcaaaaggagtttagtataaagaatgccatatatgttgttgccaatacttggaacacagtgacaaagacacagttgtgcatgtctggcacaacctctggcctgcaactgtgtttagtgataatgatgaactgtgtgtgtgtgactttgaaggattctgtatgtcaagtgaaaaaaaatgatgtctgacctccttacatatgtaaaaaatataccttcagagttcagcagtaagctggaagaagtagatgtcaaagaagttttgaactttgataataatgcttcagttattcattcattgactggtggtaaaatagtcgaaatggttttgaatcagggttatgatagtgatgaagaaggtcaagataacaccacagaaaaggtgcttatagaagaagacatggtgaaaatgtatggtgggcatattgaaggattacggcagcgtgcattaacaacagaatgaaaaaccatgtcagtttttaaaattgaagagagacttctgagctaaaaaccatgttaatgaggcagatgactccacaagaaccatttttaaaagccttccagcagaatgtctcttcatcccccgtaggatccacttcctggtccctcagctgcttctgatgtttcttcttaactaaaaaacacagtttatagtaacctttgaataaaaacacagcatcataggtgaagactgaaagcctgctgttgtttgtagctgctttttcctttttttttttttgagacgtagtttcactcttgttgcccaggctggagtgcaatggcgtgatctcggctcactgcaacctccgcctcctgggttcaagcagttctcctgcctcagcctcccgagtagctgggattacaggcgaccaccaccacgcctggctaatttttgtatatttgatagagacggggtttcaccatgttgaccaggctggtcttgatcttctggccttaggtgatccacttgccttggcctcccaaagtgctgggattgcaggcatgagccactacccccggctctgtggttggttttgtttaatagctgaaacaggtatcctggtgatgctactatgctgcttagttgtcctgacacattattttttcagtgttaatggtatgtcatatttttactgttaagtacttaatgtatgaataaatgtaagaaaacaattgcctattgttagcatgtagattaagagtcaggaatgatgactcttgttgacatgggtggctgagatagtgacacctttgctttctgatggttcagggtacacaaactttattacaggcacaaaattatcaaaaatacggtataaaattaccttaaggctatgtatataagggatgtgtgtatgtgtgtatacacacaaaaataaattttgtgtttccacttggatcccctccctaagataactcattgtgtacatgcaaatattagaaaatgcaaaaaaaagaaaaaaaaagaaatctgaaacagttctagtctcaagcattttggatgagggatacccatcctctattttatcaccattttcatgctgtattaaaatgaaattgccaactcagttcaaaggaatttttcttcttagctttacattgttgattcatggtggaggcgaacaaactatcgactggtgggttggataccttggtccagagaggtccttgtgacatatctcatggcccattacctaggtgatgtgagtcttgccttctgcctgcaataaagttttgttggaatgcagctatgcccatttactagtgtattgtccatagctgcttctctgctacaatgtagattagcagttgtaacagagactatatggcccccccaggttaaagtatttattagctgtccttttatagaaaaaaatgtcccacatcagatttatggaaatgtctgttcctttgtttacgttttgcccatgactttttaacactttcacagacattattgttcattattatatgtcagaaataaactcactttttgtaaactttccaatggctgttgaattttttaattgttttgaaattggtttcagaatcaaactcttgcctgtaatttagtaaaagcagataataattaaaccaagtaaatgtttctttctcggtttccagatttaacttagttatatcattttaggccagccattgccagctgaaatgacacttgcccagcttttaactctcctatatgaccgaaaacttcctcagggttaccgctcaatagatctgactgttaaattgggatcaagagttataacagaccccagtctatcaaaaacagattcttataaaagactacaccctgaaaaaggtatgtgcataatactactttaaaaattacagactgtcatacaaagaggcagagatttctatagctaatgacttaattgacttgtgtttttattatatcaacataagatataatttttttatgactgaatttttgtaaatataaaaaatggccattatttcatttggaaactaagttgcattatttcttataacatcatttgttttatgagcgcatgtactttaatttctgatatttctgtgagagctatgtgaattgtcattttataataaaagtgagaaactcaacttacaactttgttataatttatattgagtggcatttcttgcatataaacatgttttctcatataattgggatcacatatttttgttttttacttatatattccattaattttttttgagacagagtctttttctgtctcccaggtcggagtgcagaggcacgatcttagttcactgcaacctccgcctcccgagttcaagtgattttcctgcctcagcctcccgagaagctgggattactggcacccaccaccatgcctggctaatttttgtattttttgtagagagaaggtttcaccatgttggccaagctactctgtaactcctgacctcaacttatctgcccgcttcggcctcacaaagtgctgggatataggcatgagccaccgcacccggcccttatattccattaaatatttttgaatatccatttttgaattggctattttttcataaaaatgtaagaaaatttatttgttccccaatcatcgaaacattgtggttgtttccaatttttactcctataaatgctatataagtagttttcatagtgtgagtatgatatgaacttacttaaactttccatctttctcatgactaaaattcagtctttagttattggtcttttgtattcttcagcaaattttggtacattgtctttgcccagtttttcagcacgattatttctctcttttgttttaatgtttaaagggtctggttacgtgaccttttggttttctttggtgagtaattcagagttaaactaatatggtataattttttgttttaagtaagggaagtctttgtcattaatttttcttaataggatactttagagcatattatttgctatgagaactttgagaacttatttattttaacataggatatacgttaaagtatgccctaaaggacagtgcttctcaaacttcagtatgcttacaaatgaccagcatcatactgttaaaatggagattcttcatttcaaactagcttgcaggtgatgccaatactactagtccatgaaccattcttccaataacaagactaaagaaggcagtatcagaagtcatttaaaggtcattgtaccgtctagccataatacagctatatctaaataaatgatgttttgtgctcttttttgagtagcaagaaagcagtaatacctgcttttgtaaatgaaagaatattataaaaatataccctttcttacctattcagttatttgtaatttattgtctagatcatggagacttacttgctagctgtccagaagatgaggctctcactccaggtgatgaatgcatggatgggatactggatgaatctttgcttgaaacctgtccaattcagtcaccattacaagtttttgcaggaatgggtg

SEQ ID NO: 9950 - DNA, 428 bp, Homo sapiens
atctagtagtaatagaataattggtagataaacaagttttattacatttttccccaaattatttaaaatagtaaaccatagcatattaatcaaaggtagttttgtattatttgtgataattttgagtaaaatagaaatgatgacataattacctatttggctggttttattcatagggagcatcaggtacatgtgcatcacacatctttggttcctctttttttaggtgaatattagactgtttaagtataatttttattgtagatcaaatattttgtgttgaaaaatagctccaacattaattatggtgaaagtcattgtcaaactatattttgttgtataagttttccttttacaagttcatgatgaatacaactgtgaaagctgctattttactgggattttaataaactgttcaatctagtata

SEQ ID NO: 9951 - DNA, 1592 bp, Homo sapiens
tgtggttcactatattgattagtaactggaaatggggtcctggtaatacatacctaagaatgtgaaagtgactttagaattgggtacttggcagagtatggaataattttgagtagcatgatttaaaaaaaaaatctagattaccttgaatagattgttagataaaatgtggatgataaagcttctgccagtgagggcccagaaggaagtaaggatcataggggagaaaacctacagtgtcttagagaatatctgaattgtcataagcagacttggtagacatacaggtgtttaaagtgctgacaaggtggtttagaaggaaatgaggaacatgttaccggaacctgaaggaaaagggatctttgtcatatagaagcagaactattaactcatttgtgtcctaaatatagaaagcagcacttctgctgtaatgaacttggatgtaatgaacttacatgtaatgaacatgtaatgaacttggatgtttagctgagatttccacacaaagtggtgaaagtacaacctgtctttttcttgctgcttatagtgaaatgtgcgaggaaagatataaattgagagaagaactgttgaaaaacaagcaatcagtgcttgtcaatttgtgaaattacctatccagatcacagaaggtgctaaaatttagatatttgctatcagaaaagcatgctccaaagtataagccaagagtgaggctggacaaccttttgctagtgccttagaaacatcaaaagtcagagtattcagtcacatagagggctctttgaagagattaggcatgtaactcatggatctcctcagccgtctaagcataagcgaggaatagaggatatgatgtgatgatggaagcatccaagagccatggaacgtaagttgcctctggaagctggaaaaggtgaggaactgttatttcctaagagcctccagaagcaatgcatcctttgattttagtcccataagacctgttttggatttctgacctctggaattttaaaataataaattgtgctgttctgagccactgagtttgtggcaatgtgttatagcagcagtagaaaactaatacagagtttggtctgtagttgtaatgcctttgtctggttttggtgtcaggatactactagctatatgggatgggttgagaatttctaatatatcaaattaaggatactgttaggtgtgtttaataagagacactgtctgggcatggtgtaatcctagcctgtaatcctgtaatcacacttgtaatcccagcactttgggaggccaaggcaggagggtcacctgaggtcagcagttcgagatcagcctggccaacatggtgaaaccccgtctctactaaaaatacaaaaattagcccggtgtggtagtgggtgcctgttatcccagccgttcaggaggctgaggcaagagaattgcttgaacccgggaggtggaggttgcagtgagccgagatggcttcattgcactcaagcttgggtgacaagagtgaaattccatctcaaaaaaaaaaaaaaaaagagacactgcagattgcaacagtagtgaactggaagatgtatcaaaagaaatcattc

SEQ ID NO: 9952 - DNA, 16431 bp, Homo sapiens
agcttgctgatgaccgtatggcactggtgtcaggcatcagcttagatccagaagcagcgattggtgtgacaaaacggccacctcctaagtgggtggatggagtggatgaagtaagttccatgttagtttcatagcatcttgtttttttaagtaattatgacaatgtattttaagatatctgtcatataaacgaatttggctacacttgaatgtatatttctagaaatactttagctttaggttaagttgtctatgtgtgtgttaatgattttagctgtagttttaacattggtagtaactacctgaattataggaagaaattgaaaccccatgcaacaaggaagaatgtgattttctggtaatttgaattaaaagctgctcacacatcagcaagccaacaagtttgctgaagaccgaattctgtatgctgagtgtagctgatggaggcagaccatagcctgcctggcatcagtggagttctgtgacttcatttgcttagattcagtatgatgttggccggattaagcagaagatgaaagaattggccagccttcatgacaagcatttaaacagacccaccctggatgacagcagcgaagaggaacatgccattgagataactacccaagagatcactcaggtgaggagtgcaagtgagtcctggggaaaccagcgagccttctcatggcaatctcagaaactagagtgttactcagaatcagtctcctggagtcatttcccaacctgaagttctcagagggacctcaagaggccctgaagtcctccagctgtcagcgtaggtacctgtgaggccttggaggtatggggactgtttttcaattgttggcagataactgctgtggacggattaagtaaatatgaaatttcaaacattatcgagttcaatcatttgattttaaaatgtataactaatatcgtatactagtgttaagaaatttcaatgctaaattatagtcctcataattgaaaaaacaacttagtatcctagaaaaaattttttataaatattaaatttgattaattttaaaataataggactagtgttgaaacctcagtgtttacattttttactgaagtctcctgggtgctaattatcagaggagtgtggtgctttgagaaaagccctggggggttggaatgttggaaccctggctcttagcagtttaacagttacacgattctcatttaatccctctgactctagtgttctcatctgtaaaatgggactaataatcatagtaccatcctcataggatgcttgttagggattaaatgagaggaatgcaataataatatgatatatgataatacaggttgaacattcctaatctgaaatccaaaatgctccaaaatttgaaactttcttttgagtgccaatatgacactcaaaggaatgctcattggagcattttggatttcgaattttcagattggggtactcaactagtaggtattctgcaaatattccaaaatctcccgaaatttgaaatcctaaacattgccaatcccaagcatttcggatgagggatactcagcctgtctaacgtgatgatatgtgagcagctgggcacacagcaggccctacatagcaggagctgaaatctagtgaaatctttctgtgtatataaatgaagccacagattccttttatctgttcacctttctctaaaccagactgagtgaacagagcctctcacttctcactctggcttgtgatgtggcagtgttagcagaggggcttctctcccaggcttgccctgagcctcgggcttgttctcttagctcttccacaggtgccagcgtgccgtgcaggccctgccgagccgggcccgggcctgctccgagcaggaggggcggctgcttgggaacgtggtggcctcgctggcgcaggccctgcaggaactctccaccagcttccggcacgcacagtcaggctacctcaaacgtgagtgctgcccgggcctagtgaagggattttgagtaagaaaagcactttatgttttcttttttgccactattttttcatttagtccagtacctttcattgttagcttttgaacatgctcataccttgtacagtaaagggaagcctcctccccatgtgaaaccctggcttggaatgaaggcacagcgtggggtaccgaccaaggctgggggagggcaccaagatagttcagcatctcagcaaacaaaatttgttttgtgtcaagctgcaagaatttgaaaatcaaccaagcacattttaaaaacctgttgttttctggatgttggggtttgggagagctgctcttcaataggtaaaaagcagttgttattactgaaagccacatatttgcataacaaccaaagtgtttgagagcacctgagaaaacctccccagggtccttgaaacacttcctctgctggcaccacaggtttcacccagcagaccttttcttcccaaatagtgcaaagccagatttcagctctcttctcattctaatcaccctgtaaactgggttttttaaaattgcccttgcaatcaataaagtccccacatactccaaaaaacctagttctccctccctctgacaactggcatatttgtattttaattttattatttccaaaatttgattagggccatatggaattcatactagagatgcttctagagagaaatactgattttttaaaatgttttgtaacagcagttagattaaatatttctgcttcacttagagattctcagatggttgtgtcatttttatcttggcatcaagtgaattgtgcacatttacactgtgacttttgtcttgagtaatcccaaatgcctgcatattgttgtatgtttgtaatcctttactctccctccacccccgttggagataggcttctttaaagcggctaagaatatctcaattttgactgttggagtttactctagaattcccccttttaatggtagaacaatactcaggatggtttacatattcaagtaaaatgaattcctatctgtgataggcatgaagaatcgagaggaaagatcccagcattttttcgacacatcagtaccactaatggatgatggagacgataacactctttaccatcgggtacgtgaacgggctgcaaagctgattgctgtgtctgtgcaccccattctgcatctttcacctcctagacctcgatcttctgtgcagtgtcagtggattgatacagttgacttgtatattcatcaggttgttttgcagcaggtggaagaacagccgtactgtttcttcctttccaaaggccacagggagaccttgtaatctgctttccagagcctttgggaaagtggtcaacacgctgccttcttaggaagagcccagagaaacagagggctatcccgggggttttgtttatctgcccttgtggagttggcagacgtgggcttctgtcttccctgctatggcctcagagctttagatcctgctggtttagggaatttgaatctttcctgttagggaaaaatgagtgcttactgtgctttgtagaaatattttcagaattcattttctttaaattattttcattgtctttaaattatatctaaacaagtataccatagctttcctgagagggaaaacaatctatccaacacattgtgcactgtcttgctagggttttacagaggaccagttagttctggtggagcagaacacactgatggtggaagagcgggaacgagagattcgccagattgtacagtccatttctgacctgaatgaaatattcagggacttaggggcgatgattgtagaacaggtacgtgagctggccttcctcgtgaataggttttcctgccatactatctgtaccttctttttcctgtactcctttcagggaaaaaaattggagccaattttcccaacatgtgtgtgcacctgtcctttatgtgtgtgtgggtgtgtgtgtgtgtgtgtgtgtgtgtgtgtgtgtgtatattaatattaatcaaatattaaatttgattaattttaaaataataggactagtgttgaaacctcagtgtttacattttttactgaagtctcctgggtgctaattatcagaggagtgtggtgctttgagaaaagccctggggggttggaatgttggaaccctggctcttagcagtttaacagttacatgattctcatttaatccctctgactctagtgttctcatctgtaaaatgggactaataatcatagtaccatcctcataggatgcttgttagggattaaatgagaggaatgcaataataatatgatatatgataatacaggttgaacattcctaatctgaaatccaaaatgctccaaaatttgaaacttttttttgagtgccaatatgacactcaaaggatatatatacatagcaatcctaatcagaaaatatgaagttcaaaatgctccagaattcaaaactttttgagtgttaacatgatgccacaggtggaaaatccctacacaagacctcatgtgacaggttgcagtcaaaactttgttttatgcacaaaactagtaaaaatattgtggccgggcacggtggctcacatctgtaatcccagcactttggggggctgaggcacatggatcacctgaggtcagcagttcgagaccagcgcggtcaacatggtgaaaccccgtctctgctaaaaatacaaaaaaattagctgggcatggtggcaggtgcctgtaacagctactcgggaggttgaggcaggaggatcgcttgaacctgggaggtagaggttgcagtgagccgagattgcaccattgcactccagcctgggcaacaagagtgaaactctgtctcaaaaaatatatatatatatattgtataaaattactttcaagctatgtatatgaaacattaatggtatatgaaacataaaggtataagaaacattaatgaattttgtgtttagacttgggtcccatccagaatatctcattatgtgtatgcaaatattccaaaatctaaaaaaaaaatcccaaatccaaaacacttctagtctcaagcttttcagataagggatactcagcctgtatatgtgtgtatttacaaattatatacataggctactgtcattccctataagaatattaataaatctttttttgataaatgaagttctaatattctcttcccatgcctcgagggtactcatgtgagcaccctactctagagacctagttgactctgaccgagctcagcaatgattctgacgctatagaagatttcccttctaattttggcaggttattgtgtaatggcaattggaaccactagcgttcaagtagaattaaattgttgttcaccgttaaaatctgattagggcattttattatcttgccagcagggatttgggtcctgatccccctgaaaccaactgcagaatggagtgttcaggctctggaagatccagttacattaattactccagtggttcccagtgaactgctatctcttctaatccagcatgtttccaataaaagctctgttcttcctcatagcccagtgtccccgtcttccaatttaattgtttaagagattaaacaattaaacatcttccccttgagtccaaatttttaattttaggtggtagactggagtttaccatttcctgctctgacccatagagatgtggatccacgtttatagacgtgatagtcaatttgcaggtctacttatgacaggggcgagcttacctggtgttctctgcttacttgaatccaagtacgtaggcagcaaatgggcgcagagcttctgtgctgctcagagcctctgtccactggaccatagatttcttagggccccaggaagtccgaatatggcatttctatggcagctgaaaccaataaggaaacctcagtctgtcagtacttctttctcgtgagctagatgtgatggcactaaccagcattctgccatcgagctcctgacactgcttgagggtgaactccagagccctccgtgtgtacctgcagcacacagggaaggaaaacatcatcttatggatgatgatgtctgtaatttgcatatctcatttttgacgttcagttttcccagttgctattgttgattgtctgtaactgtcatttattacctagggtacagtccttgacagaattgactataacgttgaacagtcctgtatcaaaactgaagatggtttgaaacagcttcacaaggtaatatgtctttcaagacttgggaatcttaggaactattttcaaataatcaagaattggtaagagggttcttttccaccataacgatcttcagcattcttgtgttgtccactctcaatacagtagtgtaaaaagggattcatcatttcatttaaagccaattgtgggggctgttgccgttttattgcagttaatgattccaggtgtatctcacacttaaatccaaaattgctaagaactcctttttgtgacagtaaattctaaagagattggagttctttcttttagaaaatatttcattcttttctaatgcttcttgttttaggaaatcaattgggcatttgctaaaatatgtgttgaaaatctgtctgcttgttgccgttgacttgggcctctcttgtgatacattcctgatgaattgctgatggagaatcattctgcagaagataaaaatctaatcttctctttaattaccacagcatatctgtattaccttgagaaaagagaagtttgttgaagtgagagtagtaattcttttattctgtgctaataaggtagctgtttcagggatgtttttatgatattctcttttaaaaaaatagatggaaagcatcttaggaatcttatcggttataagaaacatgcataaacggctgagactctcatatataattggttacgtattttctttaaaaggaatataacaatacttcacaaattaaataatatccatttccttgtatctttgagacccagtggagtttctagccatataatgagtgttttgccaattcactgttggactactctaccatttttctgaaatcagtcgcttcctataccagagatcgccccatttaatagcagtattgggtttacaaaaagtcagcccttgcactagtctaaccagaagccctgagctgtcttttcagggggcttgttgccatgtgtaggtggatatgagactccagcctgtggtgggaagagaagtctgaccttgtctatgcagggtttttttaagcatttagattaatttggttgccaagccctgtctattaaaagtgaaaactaacttaagtttctcactctgtaatacccaggttttgatgtgctgctgaattatgcattggttttgaagtttcttaaataaaaactagtgaaatatgttttgtaatataacacagataaaaggaaaagctttctctgcgggagtgagcaaatctagtgggaactaaaaattttgttttaggttctactttataaatcattttgagaggttttacagtatattatttagtattggcttccctggtgttctgggttacttattagaaaagtcagcgtgctccatcttccctccagccacaaggctgtaggcagcacgcgcgtgctcggcagtcggctagtctaagggtgattgagcgtcgggagctgctccccatgaccggactctcggtgctgtccccgtgcctgatgtttcctcctggtggatgaggggctcctccaggtgggcgggcaggctcacttaggaaacaagcccaccgcgggggatggagcaggagagattgccattctcgccagggctgccttcccgctgtctcctcctccctcctgtgccatagcaaggtctggaagaggcagcgcatgctctccctggacgtgcctcccggcgccctctgaactctgctgtcctctggctctcctttctcagtgctctgcgtctttcgccagccaggtggggccctttggcatttctctagcaggcatgatggagttcccgctcctgccgagcttccaggatgcggtgttaaggtgaagagatgtgcagggtgcagcctcgtccccagattgagcttggagggctcctttgctgtatcgttagcggcactgggaggacgcgcctcagagggatctttctgcatatgacatccatggggcacacgtgtctgtttttatttcaaaggatgagtttttgtttccaaatttaggggaggtcgaaatggggcctcttccgggtgtctgttgcctacctgccaggtacggtcctccagcccgttgtttccttccgcggtgaaggaactgtgcattcgctccaggaacacggaccgggaacaggcgacccgtgctgcaggggcacttgccacggcctgcaggaggaaaagccgggagaagcaggcccagctgcacccggaagcatgagctttcacttccctgtcaggctttgtcttagtagtaggtttccaacaaatccatttccacgtccagggtaaataagcagcaccaggatcatggggctcttccactcctggtgattgaattccgtgggattgattggagggattacaatcatgtagcctgtagcagagacctcagtcactgtgcagagagatctggaagcctcattctggaaacgagtgggacttgatttgggattttggggaaaatgacggccttttttccctcctctttttgtaggcagaacagtatcaaaagaagaatcggaagatgcttgtgattttaatattatttgtcatcatcattgtgctcattgttgtcctcgttggcgtgaagtctcgataagtggcattgggttttcgtgtgtgccgcgcgtgtggatctcccgggtgtgaggggcttggcctgcgccccgccagctgcccgcagaggtgcagcctcgaggaatctgagggcgtcggggcagcgaacctttgcatccacggactcctccttccctagtcctgctcaagcggtccggggaatgggtttttgtttttccttcattgttgagaatttaaggacctttgatactgctgcacaatagagattgagttctgggatcagttataatatatattttttttagaaagagaaaatgagctgagagtttacaggcactgcagaagctgttcagtattatatgtgtatatgctatttttttagcagccatgtctgagcagaatgttaacataatttttggaaaaattttctttaaaccatctggtttttaagaaatttggtaccaaaaattgatgagtagaggcaaaaatgccccttcatctttctctatatattttccagttgaaaacaaactaagaagtcctttaagaatttataatccgttccccattaacttaatttagcttttccatcactgttaatgatcagagtaacaaagtgtgaaaaataagaaaccatcattgatgttaattaacacatttagatgggccagttaaaacagcttcataagttttaaattaattgtaaatggaatattcctcatttaaaatttttgcactgcattttctactgtaaaccaaaagaggttactaagcaaaaccacctaaatttaagttggtgatttaaatgaatctcacattaaaagaaagcttgacagtgttatgaaagccaccagactcagccagtgtgtccccatgggtatccccagccatccttgctcaatccattacttatatactaactacataatgacctgttcaaaccagactctatttaatgaactgtgaatttacacagaggccattttaaatgggtcaccccatttaggattagtggatctcaaattattaaccaaacatcactccatttcaaagtaaaatattccaccagcgatttgatttattggctcttccattgccactgagcaatgcccaggaagcaggcacattgccaaggactgggggcatcttgactaggaagctcctcgtttgtgtgagcgtgggtcagaccgccaaagtaggacttcatcgtttacctacctattatcaatatggtgcttgaatatattcctataactgtagaacagtgtggaaagtgatggtaactttgaagttgttcatgttttattggctttgttttaattgacactagtagagttttaatggtctttgtgtaaattttaatggcttttccattgtttttgcttctcttaaaaagtttaagaagaatatgacctcattaaatgtgctgttttatttggaccagtcacacaaaatgtctctctagagttgactttaaagttgtttacagaaatttaaactcaattccagagattgaagttgtccaaacagctcatgggcttagtgtccaaacccctgcccagccttccctttccaagttggtgccacctccaggtagccattggtggttttcctattactgatgtggctgtggaatgataaggtcctagaggggccctggcatttcaggaagcggacctggtattccctgacaaacattgcttaggaaagagggccggagaataagaagccagcacctcatcagtcagccctgcaatgtgagacttccgtagctgttgagagtcactgcaggtgttctttcatcccatctgattttaacccatggttgagacgttccaagttagatctgctgctcttaggtgtggggctgtccacattagggaacttgcctcaaaaacagtccacagtggcaataccggacttctgttcaagctttttaaagtgctgagccttacaaacccctgaaggaaagtgaccctttaagagaggatcatctttttttatatttattttcaccaaatagggtgatgagggttggtttttgttccctcaacccatttgggtaaaataacggatctgattagaaactgttttaaggaggggctgggctcggtggctcacgcctgtaatcccagactttgagaggccaaggcggtcacgaggtcaggagttcgagaccagcctagccaacatggtgaaaccccgtctctacaaaaaatacaaaaattagccgggtgggacacgcctgtaatcccagctactcaagaggctgaggcaggagaatagcttgaacccgggaggcagaggttgcagtgagccgagatcacaccactgcactccagcctgggtgacagagcgaggctccgtctcaaaaaaaaaaaaaaaaaattgttttagcgctgggtttcccaaggtgggagagacagacccagcctggagctggcccctggcctgtgtgctgacttcttggggtcctcaaaccactgtatttttctgttgagcctgtacttggggagagatcagtagcatttgaggaagtaagagaaaagaatcatggtacctcagggtttctttccctttactcgctggcagccattgtctgtgggcacctcatgtttttccacactctactgggccgtggaggtaacgatcacccaggccagtctcctctgcctgggatgcgccctctgagaggaggcctagcagggcaggctccctctgggcatccctggatgcagcctctggacacatgcctcctttaaagtgtccgggtgcagctcaggttgagtggaggtagaaggagaaacagacatgtttaccacgcgttttccaaagctcctgatctttcccaagattgtaactgaaaactgctgtctcttgttttgttcgttttgggggtggtggtgctggctgggccatgcttgtgaagtgatgtgtgtctctgatttaacggattcactgttttctctgctaattgagagagcgttatttacattatttatttgttttgacacaagtgctttcagtgttttatcctagctaatggcttcttaaaggtaataaaacccttccaacgtaattggtcagataaaactttttttcttgtatgcttaaataaagcaattagtgaagcacttctatccaaaatgacttttttgtccttttttaaaaccaatttactgttactggaaactttttgtacaataaagcaatcacgcagattaaagaacatcctgcaatcctagtattaattttaacaatgggttcatgttttcttccagtgcatttgtgttaggggagggcttggccagttttgtgatcctctgggcccctgactctgttttgtgcctgaggcctttgcctcagtgtccgaaagtagatctatctaatggatgctttcaaagggacaatctatttactatctgatatacaaaaagaacaactgcctaaaaggcagataagtatttttcttatgaaaatatatgctttatatacataccaagaaacatttggaaatctccaaataaaactgtgatgtgccttgttgagaagcaattcttacacacaggctgtaagagacttgactttctaaatgattttgtttcctactctgttacaccaaaaacttgagagacaagtgtctgccagtttaactcaaagccaagactatgtttccccttgattgtgcctgtcctggggtcctccgaggaggacctttgtcctgaaacttgactttgatgcatttgttttgctggtgggagatgtggacctgagtgatggtaggggtatgtggtttcatcaccagaacctatacaaacaaaaaatagcagctgtcatgccaggtctctttggcacccttggcgtttggtcctgaggtgttgcggcgactcaacagcagaacccttcagagcctgtcaacaaaccacacaaaagaaacaacctcctcctcttgcactctcaccgtgttttttgttaagaaattacatttccccaactcgcatgttggccactggctctgtccaagaatcaaatccactctcgagggagagacgtttgccatagggttcaagaatattctgaccggcaatgctatttaataacattgaagaaatcctccatcccgaaggggaccacataaaggcggcaacacctctttggtgacctcttgggttatgttctcagctgagtctttggtggcccagtcttgaaccagcactacaagagtatgcagacgcagtctgcagaagcattgctgtcagtggagagctgcaggatgccaccaatgacttggaggcatgacttgccaagaggcctggaagtggggagccactggggtgtccctttgaatgctcactttgacagcaggtaaacaggctggatatggatttcctctgtgaaatttagcaaccatcctataagaagtctgatcctgatccaacgtttgagcaatctagaatccttcctggtccgtctgccatagttacgtagccacaacaaaatttacctagcctagcaccatttctatctaaatctaataggatagcatgtcattctacatggggccttaattgtgatcagcatcccttactctagtcaagccatgtgggaccatgtggagagatcttttcacagaagggatgtccctagttgggtgtagagaagacagctcatcacaaagacttcctgcttctctgtggttctaattcatcgattagttatggtaagtttccattccttctaagatttaggtaggcaggcctggttcatccaacatgaactacatttcagaacctagcactgtgcatgcacataaatgcatgcctagaattgtatatcttggcgtatattagctcttaaaaactaattttcttggccgggtgcagtggctcatgcctataatcccagcactttgggaggccaaggcaggtggatcgcttgaggtcaggagtttgagaccagcctggccaacatagtgaaaccccgtctctactaaaatataaaaattagctgggtgtggtggcacacgcctgtaaacccagctaccagggaggctgaggcaggagaattgcttgaacccaggaggcagaggttgcagtaagccgagattgtgccactgcactctagcctgggcaacagagcgagactccgtctaaaaaaaaaaaaaagccgggcgtggtggctcacacctgtaatcccagcactttgggaggccgaggcaggcagatcacgaggtcaggagatcaagccatcctggctaatgcggtgaaatcccatctctactaaaaatacaaaaaattagcaggccgttatggcaggcacctgtagtcccagctgctcgggaggctgaggcaggagaatggcgtgaaccctggaggcggagcttgcagtgagccaagattgcaccactgcactccagcctgggcaacagagcaagactccgtctcaaaaaaaaaaaaaacactaattttcttgaccacccagatgccacttctaaccttgctgcctgatggttttaattctgttttgaaaacaacctcctcccaagtgatgggtattagaaggaactaatgagaaccctgggtgcaagcagagacttttagcacgtatgaaagtgcttctgatttaggactcggagttagatggtgggtgtcagctgcgtgtgtcttgtccccaactccatgccaccctcgggcagacgtcatggtaccagtctatggccaggctttcttactacacaaagagacattccatggagtcaaatggcagagacttgtgtacaattatctggtcagttgaggcaaaagaaaataatcatttgtccaattgtccaaattagctctgtggattgtcctgaatgctcggggtaactgtgtggttctccacttcagttccgtaacctggctaagatggaccatttaaatgaggctccattcaacacaatgcacatttaaatgaggctcagttgcaagagaccactgggcttagcgttttcaatttgtcaactataattctataattgcttttagctaatcatccaaatgattacatgttgtaatggaggcagaagaccctcgtatgcatcatttggtctctttttctcagaggaagtgctgaaggatcaaatgttttgtgtgtctctgtgtgtgtgtgtgtgtgtgtgtgtccgtgttttaacttggtgttctgacgcacaacaccataatagacctccattttcatcaacggtgggggaatgagaacaacgccccccatcccaacatcccccttttccagagggggaaactgagacccaagtttccctcttgccaaggccacaggactagaactagaatcgtcagttttctgatttccagatcaggactatttctgcttatgccattttaatttttcatttctttccataaaattaaatgaccttcttcaagaaagatttaatggtcaagatgcgatttggtaaaaagcttcctcaaggatttttttcttattacaaagatgagactggctgaggctgagagatttgcaagcagtggtatgtcattatccccagctcagttttttgtgtaattggtgtgaagagattgctgctgatgaatcagcctgctgctcaacagaaaataatgattcttttgtgacgtgagtcagtgtacgtacgtgtacgtttgtggttgtttatgaaaggtatgtgtgtacataaaatgcttatcaagatggataatgtcattttaaagtggtaaataataaaaaatagtcctgagcaaaactgattttacaattgcctgagaatgcagcacttcattttaacactatgcaatggctagaaattgattttttttttttaaatccaattaagcctcaaggttggttatccatttaaaaggtcggatgagttaaacaatgacagtaccttcagttcgtgctaataaatttgcacagaacttcagcacttacatcgtgtgcctcacagaggcatacattttgtatgtgcacaacactgaactaccaaagtcccagcagtggtacagatacaccagcagaccctggaccccaactgggggagtccctgagctgaccgccggccctatcacctcttccacttagatccccgaagcaccccccaccccagagtgctgagtccttccatctacctggcccccttttctgtggccccaagagcactgggagatgaaaagttgcctctcatttaaaaggggggaaaaagatgtattcactacttggttttgtgtgctgctgagtttataatgtaacaaataaatcctgttttaaaaatagtactttatagtgtgtatttactgtgtattcatagtgcattaagaaaaagacttcggccgggcacagtggctcatgcctgtaatcccagcactttgggaggcagaggcaggcggatcacgaggtcaggagatcgagaccatcctggctaacgtggtgaaaccctgtctctactaaaaatacaaaaaattagccaggcatggtggcgggcgcctgtagtcccagctactaaggaggctgaggcaggagaatggcgtgaaccagggaggtggagattgcaacactgcactccagcctgggcgacagagccagactccgtctccaaaaaaaaaaaaaaaaaaaaaaagaaaagaaagaaaaag

SEQ ID NO: 9953 - DNA, 11146 bp, Homo sapiens
cttcctccagttaggagccttgatgccggaggggacagtggtaggtggggaggttgagtgcaaagggttcaggctgtaagtcatgttgggttggaatgggggcacaggaaggtggggctgttggggagccacgctaagccgggtgtctgtagcagagccagagaaccgggacactgaagagggtgctgaagggggcgactctcagggatcgagccagggcccccgaaggtgggatcgaccagggtaggagacaggaaaaaaaaggagagcagcgggtgggggcgaaagcagggccgaggagagagcactttggacagaacccggcggggaaagggcggcgccgaggcttgtcaggggcgccccgcagcgtcccaggcgcacctgttgggaagaaaggaaggggcttcccggtgttcgagggaaatccagtccggaggggctgactcggagcttgggactcctggggagccaccgcctcctccccagcggcggtcaaaaccgggcaagcgaaggggcgtgaccctggtgctcaggtttcttcctcctcacctgggcaaggaggggtgggggccacgacttccggttcaggtgagtgtcccttcggtgacgtcaggtcatcctcggccgcccctccggtcccgcctccccctcccgcgctcccggggcgcgcgggccgcgcccccgacgccctacatatactcaggtgcgccccacctgtccgcccgcacctgctggctcacctccgagccacctctgctgcgcaccgcagcctcggacctacagcccaggatactttgggacttgccggcgctcagaaacgcgcccagacggcccctccaccttttgtttgcctagggtcgccgagagcgcccggagggaaccgcctggccttcggggaccaccaattttgtctggaaccaccctcccggcgtatcctactccctgtgccgcgaggccatcgcttcactggaggggtcgatttgtgtgtagtttggtgacaagatttgcattcacctggcccaaaccctttttgtctctttgggtgaccggaaaactccacctcaagttttcttttgtggggctgccccccaagtgtcgtttgttttactgtagggtctccccgcccggcgcccccagtgttttctgagggcggaaatggccaattcgggcctgcagttgctgggcttctccatggccctgctgggctgggtgggtctggtggcctgcaccgccatcccgcagtggcagatgagctcctatgcgggtgacaacatcatcacggcccaggccatgtacaaggggctgtggatggactgcgtcacgcagagcacggggatgatgagctgcaaaatgtacgactcggtgctcgccctgtccggtaaggccgcgggaccgacggggcggacgcgcccttgaccgaggtggcggggtggcgcgcgtgggagagccgaggccccacggctgggggccctgggttgccggggagctgcagggcgaggaagtggtcggctgggggcggcggggctgggcgggagcgggccggggttccggcggctgcacgtgggcgcgcacctcggtcgcccacgttcctcttcctcccccaacccagcctcgtccccggctcggagcagcggtgcttaggccggggccatcccctcctccattcccgggcaggccatggcctccgtcatctcccgtccttttctcagacagaaacggccccggggcgcggggcacggggcgcgccgagggccgaagggcggtgcggctggtcagagtgggccgccgcctgctgcctctaatcttatcggccgattagccgaagccacaaacccggtggcctcgatagcgggctcagagcagggacgccggctggcatgtgcgccgcgcggggcttcggaccaccgtctcggcttctcttcgctgcaccctttcacccttccccctatccagggcagtttcaccgaaaccccggcgccccgggcggatccttgagcggagagggcggggcgggagcaggaaggccgcgctgtcgggaggggcggggacctgcccgcttggcccaggtcttggacacctgggcgcccctggccctcggcagaacacggcgccggacagaagaggtccagcggttagtgggcgcggccggcggcacgaaggctggagccgcctgcatttccagcaatgacggcgccctttcccctcgcccgcagcggccttgcaggccactcgagccctaatggtggtctccctggtgctgggcttcctggccatgtttgtggccacgatgggcatgaagtgcacgcgctgtgggggagacgacaaagtgaagaaggcccgtatagccatgggtggaggcataattttcatcgtggcaggtgagcccccgggttctcccatctgggaggagcaaggctgggcaaggcgcccatttggggcctcactatactgaaaccctcattctgtctccaggtcttgccgccttggtagcttgctcctggtatggccatcagattgtcacagacttttataaccctttgatccctaccaacattaagtaagtctgggaaccctgcctcctaaggggacaggtctggggtcctggaatagggaggagggcagaggcacgccagggtttctaaccacccccttctcttcacaggtatgagtttggccctgccatctttattggctgggcagggtctgccctagtcatcctgggaggtgcactgctctcctgttcctgtcctgggaatgagagcaaggctgggtaccgtgtaccccgctcttaccctaagtccaactcttccaaggagtatgtgtgacctgggatctccttgccccagcctgacaggctatgggagtgtctagatgcctgaaagggcctggggctgagctcagcctgtgggcagggtgccggacaaaggcctcctggtcactctgtccctgcactccatgtatagtcctcttgggttgggggtgggggggtgccgttggtgggagagacaaaaagagggagagtgtgctttttgtacagtaataaaaaataagtattgggaagcaggcttttttcccttcagggcctctgctttcctcccgtccagatccttgcagggagcttggaaccttagtgcacctacttcagttcagaacacttagcaccccactgactccactgacaattgactaaaagatgcaggtgctcgtatctcgacattcattcccacccccctcttatttaaatagctaccaaagtacttcttttttaataaaaaaataaagatttttattaggtacgggggtgttctactctctcacattaccccatgtcttcatcctaccttctgtcctgatgagacgctgcttcctggctcacaaggcggggctccatagacaaggggaaccaaggtggggcagggacagggtaaggctaacacaaacaatagaaagatggttctgggcccaaagtcttcccgcgccccctccaattacaatctaatcaaatctggccagtcaaatatccaggtcgtcatctgggtcttcttggtccaggtcatcataagcatctggctcatagaagatgtggctggtagcctgccctggcctaggccgcaggagagcctgctgtctgagaagggaagatttggtgctggtgagggtagctaacaggttgggtctggatactttcttccaggtgactgtgactctcattcaggcaacctgttaggcctccatgtcattttattggtccaagtccctttctctgacctccatgttagagctgaagcaccatttggtactgggatagatacccttgtactgctctcctaataaaaccgtaagttcctagcagcttgagggcaaggatcttgtagtcttgcgtcatccgcccacatactgggcacagaacagcaagcgtgtactaagcccttgttaaccagcctctgccacgcccatatagccttctgtcctcctagcaccactgcctagggatagggccacctcccaagggtctggtctggctcagcccaggcccagggtgctctggggacaactggagctgtgacccaagggtataagggagagaaaagagacataaaggtcctctgccattatagggggaatgggtggatcaagaacttggacttgtctctggaggtggacttcagtccctataaagtcaggttaatcaataacctgttgccccaacctctccatggcccagatgctgggatctactcagggatccacgtacccaggtcccaaccttacttttcagaactgaactggaagggcaggatcaggctatctctggcttctctctctttcttggacaggtgaaggttaaaggtcaaatgagttgtgggatccacctgtaggtacaaaggatgctgccactctgccccatccctagaatccctgaccccacccccaacctctgcagcttttattttctctcccgtgaccagatactaaactacatttccttgttctggccttggcattcttagataccgggggtatatgaggatcggagtagggctgggactctacagagggcccctcttggagatccaggctgaagtccggaaggatggagaaccactgagtctggagagaaaaaagaaaagagtttttttcatcttactgaagaaactagacagactccaggacctcacatcctcagcccccaatcacctatttaactgactgctttcagctcctgccctcaacttttttttttttttttgagacagggtctggctttgttgcccaggctggagtacagtggcgtgatcttagctcactgcaacctccgcctcccaggttcaagtgattctcctgcctcagcctcccgagtagctgggattacaggcacgtgctaccacacccagctaatttttgtctttttagtagagatggggttttgctatattggccaggctggtctcaaaccactaacctcaggtgatctgcccacttcggcctcccaaaatgctgggattacaggtgtaagccactgcgcccagcctctattttattttcaaaagtgaaagcaagttgattaaggaagtaaaggaataaaaggatggcgactccttaggcagagcagcccacttactccttttttgagacggagtctcactctgttgcccaggctggagtgtagtggcatgatctcggctcacctcaacctccgcctcccaggttcaagtgattctcccacctcagcctcccgaatagctgggactacaggcacccaccactatgcccagctaatttttgtatttttagtagagatgagatttcaccatgttagccaggccggtctcgaactcctgacctcacaatctgcccacctcggccccccaaagtgctgggattatgggcctgagccacctcgcctgggccccacttacactttataaccttggtaagtgacttaaatttaaacctccttgggccgggtgcagtggatcacacctgtaatcccagcactttgggagaccaaggccagaggatggcttgagcctagttattcaagaccagcctgggcaacagggtgagatctcatctgtataaaaaactaaaaagctggctggatgtggtgctacatgcctgtgctcccacctccagctacaccagaggctgaggcaggaggatcacttgaacatgggaggtcaaagctgccgtaagttatgattgcaccacagcactccagcctgggcaacagtgagaccttgtccaataaaaaaaaaaaaaaaaactccaagggaataaaaccctccctggactggctttccagcctgaaaaatggtgataataaaacaatctaccttaaccatagctgagaggattaaatgaagtgagtgatagaaaacagagaaatacctaaatcagctttttttaaaaaaaggtctcactgagggctgggcacagtggctcacgtctgtaatcctagcactttgggaggctgaggtggaaggatcacttgagcccagaagtttgagaccaccctgaccaacacagtgaaaccccatctctaaaaaagtttgtttttaaagtctccttgaaacatcagcattttcattgttcttcccatcgtgccacccctttctctgtcccccgtttccagtccttctctgttggttcttctgacctggtcagttgggcgctgtcggggcctccgacacaggatgtgggccgaggcctggcccatggtaccgcccagggtcacctcagtctgagcaaggctgctgagagctcccacagggcctggtccatgaagctcttcatgtagcaagcccagcacactcactttccccactgaggagctgtcacctagaggaggacaagaaatgtaggatagtagggagcattcaggttggtggcctgggagctaacagtgaagaagagagagcctcacaattccatcacagtgctgccaaaatcctgacgtcccttggccaatctcactaccgtgctctgagcctcctccagcccacaccttaatctcctctatcatcccaatgtaaagctgatcaaggcaccgctctaacttctattcttcagcagctcctgccttcaggatggaacgaacgcttccagcaggtggtgtccacttactttccagcctcatctcttacacacggaagtacttgtagtttctggaacttcccaagatctcagtcagtgccttcaattctctgcctccctttttgggagcatttagagagtgtcaggtactatgctaaacgctttaacacaatgtttgaatccttacaaaggtcagcgtttttaggtcaaactgtatgaaatcactgacatttaacaatttttttttcttttctttttcgagatggagtcttgctctgtcgcccaggctagagtgcagtggcgcaatcttggcttactgcaacccctgctacgggctcaacaatactgcctcagtctcctgagtagctgggactacaggcgcgtgccaccacgcctggctaatttttgtatttggtagagacggggtttcagcatcttggccaggctggtcttgaactcctgacctcgtgatctacctgtcttggcctcccaaaatgctgggattacaggcatgagcctctgcgcccggactgtttttatttttttgagatgacgtctttctctgtcacccaggctgcagtacggtggcgtgatctcagctcactgcaacctctgcctcctgggttcaagtgattctcctgcctcagcctcccgagtagctgggattacaggcgtgcaccaccacacccagctaattttttgtatttttagtagagacagggtttcaccatgttggccaggctggtctccaactccaggtgatccgcccgccttggcctccccaagtgctgggattacaggcatgagccactgcgcccagacaatatttaacaacttttaacctaagaaatggcaatatagtggttcatcctaatacttcccttgtaccttcccccatatacaggggaaagtgaagcaatgagagatcaagcaccttaatacaaagctgggcgtctgactcctaagtccattcgagtacccacagtgcacttcaaggctagtctcagtgcccctgcccggccaaatttgcctggatgacctcttgctcttcaagagagtgcctttttttttttttgagatggagtcttgctctgtcgcccaggctggagtgcagtggcccatctcagctcactgcaagctccacctcccgggttcacgccattctcctgcctcagcctcccgggtagctgggactagaggtgcccgccaccaagcccggctaatttttttttgtatttttagtagagacggggtttcaccatgttagccaggatggtctcgatctcctgaccttgtgatctacccacctcggcctcccaaagtgctaggattacaggagtgagccaccgcgcccggccaagagtgcccttctttaaggtgccctgtgcatgcctgtatcatcatggcctttatcagaccatcttgtaactgcctgtttacttatctccatcttttatgggacttcgagctcctggaaggcaaggacccagctacagtcagtctgtattttgccattatctagaattgtacctgacacattgtatatatttactattgatttgttaaatgaatgaatgagtgaaacaaatgagtaaaaaaataacttggagaaaaaaaagcaaatggtagatggcattaaggagaagtaaaaaaaaaaaaaaacagacaaaaaagtcaaaaaaatgaaaaaaggtctgactggagaacccagatgtttattctagggtagaaaggaaaaggggcacactccttggcagagggagatgtatgaggggaaacaatgaaggaggggtctcaccaggacaagagtcctgatggctcacagcatgcaggacctggcagagtgtggtgcagggaaggcgaagtagcagccagctgagtgaatcgagagcaatggtgacaggaacaggatctgtcctcttgcacatggctctcaaggctcccagcggccccccaggaaaggcctcctcagtttttgaccagttgagagggtctctgaagaagtcatggtaaaccagcctgcaaagggaaaataagacacaatataatattgccccttcccccgagaggatcacaaagttcatcctctgatctttatggctgttttctcaatttttatgaatatcctaaatattagtgaaagataattactgagagagagcatacagtgattgagagcacagactttggtgtctgacagcctgatctccaagcttggctttgctacttgcccaaggtcagctaactgatacattatttctaagagttgcctcattggtgaaatgagatgccaacctctaagcattcagcacagtgcttgacacatagtatatgcctgataaatgttagttatcaccattatcaaatatttcctgtgtgtggcacctaaagattatcaccctgggtgaaaaaagagaaagcagaggacgtgagatttggtcctgcctgtagaacagcttaaagaaagtcaagaattaagtcaagaagtaacaactacagaaaaaacagctcaggaaagggagactggcataggtagcagaactttttttcccagatatctcttttctatcttctcttgtggagtgcccgcttttttttttttttttgagacagagtttcgctcgttgcccaggctggagtgcaatggcgtgatctccgctcactgcaacctctgcctcctgggttcaagcgattctcctgcctcagcctcctgagtagctggaattacaggcatgtgccaccatgcccaggtaattttttgtatttttagtagagatggggtttctccatgttggtcaggctggtctcgaactccagacctcaggtgatccacccgcctcagcctcccaaagtgctgggattacaggcgtgagccaccgcgcccagccatggaatgccatctgaacatacaccaccgcctctatcacaacaatggctgatgcaaaattggaggctcaacagataagatgtaaactactattatcatccactgagttgccgggactaggaagtagaaagcatcctactaatggttcttaatgtctcctgatcaggcatgccgctgggtttaggaacttccttatctcaatactttcttctcccccatattagtcaataaatcctggaaattctacccactaaagtcctttacatgtgttctaaactttccatctctactgccactgccttaaaccaggcctctatcacttcctaccattattccctaaaattcattaggtcaggaacaggtctcactcactgccgtctccagtatcttgcacagcacctggttgatagttggtgctcggtacatatgtaccttaaagagtgaagccggattaacggattactgcaatacccttcccacatgttctccctatttccaggctatttctctctcgacttctatgatctttgctttggactccccaaatactcatcactcctcttattaattcttgcctcctgaaagatccatatccaattcttcaatgaatatttaaggaactgctactacataccaggttctgcgcttgttgtaaagaaatttccttagcattataggtctcaaatttaatcaaatctcttccaactggtacttaccgattgttgatatcagagtcaaaaccttcacgaaactcttcctcgctcacttcacagcccaggatatgcacttgctccccactaaggcagagatgagaagggattgtcaaagagtgggcacaggtgccctatccagggtaggccggggagacactgtgggatactcaccacagtgcagatttcttgacaagcgccttcaagagactgcgcccctcccactccacggaatctgcagagcgagggacggataaagggtatgagagcgctgggattaccgccttcgcgaacccgtcgcgatttccacacctagcctgtgacccctggcccttcctgcccacttccgtcccctcagccaggcccgaaccgcaccccccgccccgccaccgtgcctctggctctcaccccgaagcagcaccaggccgcccaaggccaacagcgagtccaacatctccaactcgcgtccggtccctgctctggcgccctctgatggcgtcatgacccagtgtccttcctcctcggggtgaaacgggccgagcactcgggcgtcctcccaccattaagacctaacatagtctggaatgagaggtgattatgttcaatattcccaggggggcgctcacgcggagggcgcccctccccgagccctggcgcacagtcgtacggacaacgaccccgtctacattttcactgtgaccggggcgggaagagcagttggggcagttgtcagtgggagggggaggaggacccacaagccccccgcgagggccctaagcgcgggccaagtgacgtcactctccccgcccacgcagtttgaggcggggcctgcttcgcctcaggccccgccccgcggccaccttctgcgcgtgcgcaatactgcagcctcgcttggagtgcttttggctttccttatacctacccgccatagaccgcgcaggaggaacttagt

SEQ ID NO: 9954 - DNA, 4022 bp, Homo sapiens
cttcctccagttaggagccttgatgccggaggggacagtggtaggtggggaggttgagtgcaaagggttcaggctgtaagtcatgttgggttggaatgggggcacaggaaggtggggctgttggggagccacgctaagccgggtgtctgtagcagagccagagaaccgggacactgaagagggtgctgaagggggcgactctcagggatcgagccagggcccccgaaggtgggatcgaccagggtaggagacaggaaaaaaaaaggagagcagcgggtgggggcgaaagcagggccgaggagagagcactttggacagaacccggcggggaaagggcggcgccgaggcttgtcaggggcgccccgcagcgtcccaggcgcacctgttgggaagaaaggaaggggcttcccggtgttcgagggaaatccagtccggaggggctgactcggagcttgggactcctggggagccaccgcctcctccccagcggcggtcaaaaccgggcaagcgaaggggcgtgaccctggtgctcaggtttcttcctcctcacctgggcaaggaggggtgggggccacgacttccggttcaggtgagtgtcccttcggtgacgtcaggtcatcctcggccgcccctccggtcccgcctccccctcccgcgctcccggggcgcgcgggccgcgcccccgacgccctacatatactcaggtgcgccccacctgtccgcccgcacctgctggctcacctccgagccacctctgctgcgcaccgcagcctcggacctacagcccaggatactttgggacttgccggcgctcagaaacgcgcccagacggcccctccaccttttgtttgcctagggtcgccgagagcgcccggagggaaccgcctggccttcggggaccaccaattttgtctggaaccaccctcccggcgtatcctactccctgtgccgcgaggccatcgcttcactggaggggtcgatttgtgtgtagtttggtgacaagatttgcattcacctggcccaaaccctttttgtctctttgggtgaccggaaaactccacctcaagttttcttttgtggggctgccccccaagtgtcgtttgttttactgtagggtctcccgcccggcgcccccagtgttttctgagggcggaaatggccaattcgggcctgcagttgctgggcttctccatggccctgctgggctgggtgggtctggtggcctgcaccgccatcccgcagtggcagatgagctcctatgcgggtgacaacatcatcacggcccaggccatgtacaaggggctgtggatggactgcgtcacgcagagcacggggatgatgagctgcaaaatgtacgactcggtgctcgccctgtccggtaaggccgcgggaccgacggggcggacgcgcccttgaccgaggtggcggggtggcgcgcgtgggagagccgaggccccacggctgggggccctgggttgccggggagctgcagggcgaggaagtggtcggctgggggcggcggggctgggcgggagcgggccggggttccggcggctgcacgtgggcgcgcacctcggtcgcccacgttcctcttcctcccccaacccagcctcgtccccggctcggagcagcggtgcttaggccggggccatcccctcctccattcccgggcaggccatggcctccgtcatctcccgtccttttctcagacagaaacggccccggggcgcggggcacggggcgcgccgagggccgaagggcggtgcggctggtcagagtgggccgccgcctgctgcctctaatcttatcggccgattagccgaagccacaaacccggtggcctcgatagcgggctcagagcagggacgccggctggcatgtgcgccgcgcggggcttcggaccaccgtctcggcttctcttcgctgcaccctttcacccttccccctatccaggacagtttcaccgaaaccccggcgccccgggcggatccttgagcggagagggcggggcgggagcaggaaggccgcgctgtcgggaggggcggggacctgcccgcttggcccaggtcttggacacctgggcgcccctggccctcggcagaacacggcgccggacagaagaggtccagcggttagtgggcgcggccggcggcacgaaggctggagccgcctgcatttccagcaatgacggcgccctttcccctcgcccgcagcggccttgcaggccactcgagccctaatggtggtctccctggtgctgggcttcctggccatgtttgtggccacgatgggcatgaagtgcacgcgctgtgggggagacgacaaagtgaagaaggcccgtatagccatgggtggaggcataattttcatcgtggcaggtgagcccccgggttctcccatctgggaggagcaaggctgggcaaggcgcccatttggggcctcactatactgaaaccctcattctgtctccaggtcttgccgccttggtagcttgctcctggtatggccatcagattgtcacagacttttataaccctttgatccctaccaacattaagtaagtctgggaaccctgcctcctaaggggacaggtctggggtcctggaatagggaggagggcagaggcacgccagggtttctaaccacccccttctcttcacaggtatgagtttggccctgccatctttattggctgggcagggtctgccctagtcatcctgggaggtgcactgctctcctgttcctgtcctgggaatgagagcaaggctgggtaccgtgcaccccgctcttaccctaagtccaactcttccaaggagtatgtgtgacctgggatctccttgccccagcctgacaggctatgggagtgtctagatgcctgaaagggcctggggctgagctcagcctgtgggcagggtgccggacaaaggcctcctggtcactctgtccctgcactccatgtatagtcctcttgggttgggggtgggggggtgccgttggtgggagagacaaaaagagggagagtgtgctttttgtacagtaataaaaaataagtattgggaagcaggcttttttcccttcagggcctctgctttcctcccgtccagatccttgcagggagcttggaaccttagtgcacctacttcagttcagaacacttagcaccccactgactccactgacaattgactaaaagatgcaggtgctcgtatctcgacattcattcccacccccctcttatttaaatagctaccaaagtacttcttttttaataaaaaaataaagatttttattaggtacgggggtgttctactctctcacattaccccatgtcttcatcctaccttctgtcctgatgagacgctgcttcctggctcacaaggcggggctccatagacaaggggaaccaaggtggggcagggacagggtaaggctaacacaaacaatagaaagatggttctgggcccaaagtcttcccgcgccccctccaattacaatctaatcaaatctggccagtcaaatatccaggtcgtcatctgggtcttcttggtccaggtcatcataagcatctggctcatagaagatgtggctggtagcctgccctggcctaggccgcaggagagcctgctgtctgagaagggaagatttggtgctggtgagggtagctaacaggttgggtctggatactttcttccaggtgactgtgactctcattcaggcaacctgttaggcctccatgtcattttattggtccaagtccctttctctgacctccatgttagagctgaagcaccatttggtactgggatagatacccttgtactgctctcctaataaaaccgtaagttcctatcagcttgagggcaaggatcttgtagtcttgcgtcatccgcccacatactgggcacagaacagcaagcgtgtactaagcccttgttaaccagcctctgccacgcccatatagccttctgtcctcctatcaccactgcctatggatagggccacctcccaagggtctggtctgg

SEQ ID NO: 9955 - DNA, 286 bp, Homo sapiens
gtcctttggacggtaaaatggcgcctgtcagagtgggaaacccagctgcagaggctgcagccccggtccccagcggctaaaggacccccgagctcggggagggggaggccgctccggcccagcgctctgcgccctccggctccccctccccctccttccctgctccttcgctctgcaggcccgttctccgctgccgcggccctttgcgcgccgctgcccccgccctccccgttcctgcgagcagccccctagcgcgcctgcgcagcgggccactctctgctttccc

SEQ ID NO: 9956 - DNA, 37437 bp, Homo sapiens
atcttgtaggcggggacacgccgaggtaacttccagggtgcgccttcgttgtcttctccaagctgtagttctacgtcccgacctccctatcataccacactcttcagcgaccacgcaggcactttcccggtccccaggtgagcgccaggtggctccgaggcgcgtgtatgaggggggtggcatggcatggcatggcttgcaggcgccagagccagaccccgagggacggtgtccctggaaggtgggcgggccggccggcgccactggacgccgatgtcgtttgcgagccccctagtcccgtggtccaggctcagctgtggcggcgtgcggggtgcagcaggcaggagtgcacatcgcaaggtgagcagtttccgctggggatggcacggtgggcgcggttcgagggtctcgccccgcgacactttgctcctgtccaaggaccaaggcaggagcgctctggccccaccttccagggcgctgactttaggggagactggcgggagcgccggcggaccttagcccggccctgtctggcctggagacgtggcagagcctgaggggaagccgctgtctcctgaaacaggatttcggccgctctggccctggagaggcccaggaggctcgagagtcatcacaccaggacctgcaatgaaaggaagcttattttccctgaggttaccccatcggtgcttagcgccgcttgggagagtttttgcattctctcgtttctttgtttggtcttgggacctgcttcaggcaaatttgcagatagcacgtttcctagattgacagaatttatagccaatagtgtttttgtcattcgaagtagttattttgagagacaacatgtgcatttctgcgatcgtgacacatcttggcattcagtctttctcctgtgcagccagtgtttaattcagtgaaaatttataaaattttatttcggggtcagattaggctctaactagcgctcactgtctggtagtagagacaatcttgtggcacgagtaggtcagcaataattgctcttaatgctttaaagtttatcagagcttcactcttccatttcttgtaaacttgtaaatagacatccactttttttttttttttttaacagaaaaaccaaggcacaagcaaattggaacaacagggtctagccggactgagaactcagttttccaaaccattttcttcactttttctttagtgttgatatatgaatagtacttttcgtgacaagacttgagccctaaaacagttaccaactctgacacttcagtattgttttatcataataggtttttttagtagaaggcactatgtttatgcatgtaaaatttacctcagtattgccattacggcagttttcatataaaaagccattaaagacaaagaaattgattatttattccacttaatgactttgtattcattgtacagtttcttttgcagacacatttgttaatgttagggattctcttacaataggacttctactagtcattgtaaggattggggagcatctgtagtagagggtgaatgaccaataaaaaattaaatgaagaaaagagggagctttggttgaggagtggtaaaatctccaaaggggcatttctatctcaggttatttaccttcgatgtataggtactgaatgaaaggattcagcctccccggatccctgttctctgcttagtgccatagatctttcctacgttcacagccaaactttttgaaagtgtcatgcgtgttagtctcacctgccactgctcgattcagtttacactggaatctttctccactctttatatgaaaaccgttctccctaaattcatctccagtttggcagatccattgaacttctcagatagtatcctatttggcttctctgcagcattaatactgttgcccattcatactgcgaaactctggcttttggacaccacagtctcctggttttcttccttttagctcatctcttattctctgcaaacttgtcttccatcttactaaaccaataattggtttaacatcatattctcttttctcttggtattctcttacgtaatctcatctcaaaacatgatgttagactatcagtacactgatgacacccacatttatgtggttgctaagctccagaccaagtcagtgtctctacttagatgtttgttgcaaggaacttaaacagcatgtcaaagactaaacattttatgatttcccccatccgactcccccagaaagaacatcaaacacattggccttctgcagtgtttcctatctttgtgcatggcaccaccatctatctagttgtgcaagtcatgcctcctttcccttcctccatacccagtcactgaattttgccacctaatcttgtcttgaacttatttacttttctccatctccactatcatcacttgagtctaggtcagagtttttcaactttggcactattgaaatttggggccacttaattcttgtgtgtaggctgtgcattggaggatttttagtagtattcctaacctcttcatgctatatgccagtagtagccctctagttgtgacaataaaaaatgtcttggacattgccaagtgaccccttgggggcataatcagcccttcccactatgaaaatcattagtctaggttgttacttacttctgatggaactacttctatatcttccttaatggcctgtctgcatctgctctgtctgcccagtggcccaggctgcatactttgttcagatcttttcaaaaaataaatatgaattgctaataactggaatcagcctaaatgtccttcagcaggtacatttatacaatggaatactattcagcaataaaaaggaaccaatttgatatatgcagcagcttggatgaatctcaagaacattatgttgaatgaaaaaaagccaacttcaaaaggttatatgctgtatgattcgatttatgtaacattcatggaacgagaaagtgatagaaaacagagcagtgtttgccagggcttatggttgacgggaaggtagataaaggaacaacatgaggaagtttctttttagtgatggaatggttctatgtcctggtcgaggtggtggttatacgagattgtgcatatgatgaagcttcatagaactatgcacatacacacacacagtaaatgtaaaaacatgtgaaatacaaataagatctatagttaatagtgttgtaccaatgtcagtttcatggttttgatcattgtagtgtagttatgtaagatgctgttactgagagaagctgggtttggggtactcaagaactctgctgtttctacattttttttttgaacctaaaattccttcaaaacagttaaaacaaaagacagttatgctaccctcagcttgaatgccttacagttgtaggatatgataaatttctcttcatagattttagcctgtaaattgttaagtacaatgagttctgagatcctctccaaagaaccagtgtatcagtatgttcagctcccctgttctttgttcttcattttaaagtttaaattcctagttctttatttctccttgcccccagtttcagtaaacaatccccttctagcctctatcaactgctctgaccttagtcacccttggtcacctgctctgaccttagtaatccttggtcatctgctctgttcttagtcatcctggatcacctgttctgtaaccgtccttcccgccaaactactcaccctgctgctctggctcatacccctgctctctttaaaatagccagttggaattagcttagactgcgtggtccaaccctagccaatgggggaaagacacagcagtagggactagctgcgttaggataagaaccccttcccctcccttgttcaggtgtgctcttgacattgctccatctgtgagacacacccttctatagaagtaaaattgccttgctgagaaaattaaatttatgttcgagtgctatttcttttgtggcaccgaaaatttatttctaacacagtgacactctgttctttaaaaacccaagttttttaacctggtttatgaggctgaacaccttctgggcttctgtctgtccctccagtcctgattcttctttctctcccttcacatggattttattgaatgtatcttgttcttcccagctcagttggtatatatatttgctatatattcacttttcctggactctgcctttcttcccttgcctaattaagttcttatccttcaaatctcggtttatctgtgacttatttggggaaccctttccttacctccaagtcaaaatcatattcctgtcaaacaaaactgtgttcttaccctcagagcacataattcagctaccattcattgtaaattggtttattatttgattgtttcctgtactagactgtaagtatcctatttgtttttgctaatcattgtcatttccaaaggcatcagtatagtgctcgtcaagcagttgaccttcgctaaaaacttattaaatgaataaaaatattaaaaacaaatatagcatatttagaagttggttctgtacttgagatacacttcaggatttgtaattttaaagaaagttttctcatattttataatccattgttgtctattaggatgctgctatctaatggcatttttgctatagttaacttttctaaaacctcagatatacaatttatctgttactggatatgctttaaaatgtgaactaggaaaattgtgaattaatgcttttatcaagtgaagcacattttattttattttattgagacaaggtcctgctttgttccccaggctggagtacagtggcattctcactgctccctgcagcctcaacctcctgggatcaggtgatcctctcacctcagcatcctgagttgctgggaccataggcacatgtcaccctgcctggctaattttttaatttttttgtagagatggagtcttcctatggtgcccaggctggtctcaaactcctggtctcaagggatcctcccacctctacctcccaaagtgtaggtttacagcggtcagccactgtgcctggctttattttttttttatgttaatggggatatcttatacacagtactttatgagagaagaggaaaggcttcaaaaatacattaaatattttatttatttatttttagagatcttgctctgtcacgcaggctggagtgcagtggtgcagtcatagctcactgcaaccttgaactcctgggttcaaggcatcttctcatcacagcctcccaaagtcctgggatttcagacgtgagccactgtgcccagcctcatttttattttaaatttaataatgactgaaatttatattatttacttattttattttttagaaatgagatcttgctatgttgcccaggcttgtctacaactcctagcctcaaatgcttcccgtcttggcctcccagagtgctgggattataggcatgggacaccacacctggcccagacataactatctctaacatgcattcatgtggcagaaatcaaattagtaatttactatttgaaatgtagtagataattagttatattgttattataacatgaaattatttcccacttataaagtatctacatgggaatgttacagattgtttgatattaaatattctcatagattgctttcttagaaatttggacaaactcttcgtctggaaataagttgcattataaacagtaaaggtggacatctatctcttgatgattttttttttagtcgttctctattcaagctttaaaaatatacttttggttactgtgtaatatttgttacatttttgtgtttttatagtataccataattgaagaaaaatgatggaagagagtggaatagagacaacaccacctgggactcctccaccaaatcctgcagggctggctgctactgctatgtcttctacccctgttccattaggtacatgtagttgtctaacatctcgtgtgttttgagaatagtgaagatactatcatcttttctcagagtcaattaagaaaagaatgcatatattaaaacttctctattatttttcaggatgaaaggaaataacctttttaatttaaagaatagaaagaaagtcttgtgtatttaaagtaagaaaacatcagtgttttgctttaggtggacttttgttctttatgttcataattttaccatcatttatattatggcagaaatatcctaaaaagcatgtgttagctttgtcttctgttctttttcttttttttgagacggagtttcacttgtcacccaggctggagtgcagtggtgcgatctcatctcactgcaacctccgcctcccaggttcaagtgattctcctgcctcagcctcccaagtagctgcaattacagcactcaccaccatgctcagctaatttttgtatttttagtagaaatgggatttcacaattttggccaggctggtctcaaactcctgacctcaggtgatccacctgcctcagcctcccaaagtcctgggattacaggtgtgagccactgcgctcggcctactgctctatgactttgtggtgattaacctttctgagccttcagggcataggtttttatgctcaaactagggatgaaaaatcgctttattttattaaaaatacaccaaaacaaaccaaaaagcaaaaatgaacaatgccataggttcatacagctgcttcttttacttatgggagttgaaagtcatttacactcaattatatttgttgtatattttaaattacacattttaaaataattcttgggatatgctttggtaagttaaaaattttgcaagaagaaagtaattagacagtttgaaaactaaataaaaaacatttctaattctgtgcttttatcctctccacttttttctagcggcaaccagttctttttcttctccaaatgtatcctccatggagtccttcccaccactcgcatactctactcctcagccgccccttcctcctgtgaggccttcagcaccattaccttttgtgcctcctcctgcagttccttctgtcccaccacttgttacttctatgccacctcctgtttctccatcaactgctgctgccttcggtaatcctcctgtatctcacttcccaccttcaacttctgccccaaacactcttttacctgcacccccttcgggtcctcctatatcaggattttctgttggttcaacttatgacattacaaggggacatgctgggagagctccccagacacccctgatgccatcattttctgcaccttcaggaacaggtaattctttctgatactttgaaatacatggctattaattaatgttttattcttttttaaaataatagctttgttgagatataatttatgtactctacaattcacccaattcaaagcatacagttccatagttagtttacatcagaattgtgcatcccttgtcgcaattttataaccttttcatcactttaagaaagaaaccctataccttttagcagtcagcccctactgtcccccaaatcctcacagctctaggcaactactaatctactttctatgtatatggatttgcttatcctggtcatttcatatagatggaatcatataatacgtggtcttttgtgactggcaacttttacttaaatattttcacttaaatatttaacttaaatattttcaaggttcatccatgttgtagcatttgtcagtacttcattccttttcatggctgaataatattccagtttatgaatatgtataccacatttcatttattcaattaatcagttaatgttgggttgttttccactttttggctatttagataatgctgctataaatatttgtttacaggtttttatatggacatgtttttatttttcttgggtgtctacctaggcatggaattgctgatttacatggtaattctacaccaaactgttttctaaagcaggtgtaccattttaccttcttattagcagtgggcggggtcccactttctctgcattaatgttcttctctttattcatttctttggtttccagagttacctatttcacatttttgccatttaaattattaaaataaggctggtataatttagtatatgatttttttatgtgatatacaactcagtagatgattagtatatgggatgtcagaaaattccaaaattttgtcctaatatttgtgcatttatagagaaatttaaaggtgaagtctgagtttttttaagttttactgaaaaaattatcaggactgactgttccagggagtagtgtttttttagccaggtaaaaagtcagaaacaaataaaacctcatgtatgccaaaagtttgtgatactgggtcatttcctttccctaggtcagttaaatctacttgttttgtttctttggaataattgttgcaaatgagttatcaaaacttcgtccttgtcatcctctgcctgttgtttctcattttagggaaaagcagtagctttgctgtgctttttattatctatctttccctgtctacctttacaaatgaaaattattgcagagtgcaagtactatattcatgtctatgtatatgtgaattttctttctgagttaacatgaagtatatagagtatgtgtaataattgtgtgcttttttgtgatgaacttcagtgctcaattaattttatggattaaagagacctgaactacagccgttcatatccaagtgctgaataggacagacctgaagaacttttggatatacgctttttgtccattttcaggatacttggtttaagactatataaagggaaataaatttcttttgaaattctgtttaatttgcgttttataaaggtttgtgttaatctttgattgtataactcagtcttcaaatgcctgaatattaatattaaagttgtttgagccactcctttttataggaaaaagtttatggaataaattatacatatgaaaatttttgccattgattaggtcttttgccaactcctattactcagcaagccagtttgacatctctggcacagggaactggaaccacatcagccattactttcccagaggagcaagaagaccctagaattactagaggtcaggatgaagcatctgctggtggaatctggggttttattaaggtaagacgtgtttaaaaattatgtttaattttctaattataaaactaatagatattcattagagaaaatattgaaaatacaggatggcacaaggaaaaataaaattcttttttattagcagttttctgtagctgctctcagtctcttgcctatgcatatctgtgtaaacgttcctttgaattaaaatcaaattgaagtagtgacaggtcagatggatactatttcatgttttctggtctttactgagcatatatcatggatatcttcctggccgtaaaatatttttttcagaaatgtattttggtttctcttatggctgcttcaccatacatgctgttgcatttatttcccgtgttttattttgctaatctgcctattggcattttctaattgtaattattttttttaaattagttaatttattttaattgacaaaaattgtatgtgtttattatgcacaacatgatgtatacatgaagtgtgtatacattctggaatggctaaattgagctgattaacatatgcaatacctcacatatttaccatttttttgtggtgagaaaacttaaaattttgaaatataaaaccttatatttcaagaatataatacattgttcctaactatagtcaccctgttgtacaagagatctcttctaattgtaattcttatcaataaatcatcatcatgattaggtctggcatggtgcctcatgcctgtaatcttaacactttgggaagcccaggcagggggattgcttgagtcgaggagttctgtatgagaccagcctgagcaacataatgagacccagtctctaccaaaaacttaaaaaaattagccaggcattgtagcgtgtgcctgtggtcccatgtactcagaggctaaggtggtaggattgtttgagcccaggaggtccaggctgcttgagctgtgatcatgatactacattccagtctaagtgacagagtgagacactgtctcaaaaaaaaaaaaaaaaaaaaaaccaaaaaactatgatgagcactgttgtatgtaaatctttatggacatctttttttcctccgaattaattcctgatgaacatttgagtgaacatttgaagaaattgatacctattccacttcaggaggtttataccaaaatacactggtataacatttttcactggccagcagtagttattaatttggactagggtattttctgatttgacaggcaaaaaataataccacattttaatttgctttcctttgctactgaatttgaacattttctcgtatgatttttagccatttgtattcttcttttgtgaaatatcggttatgttctttgcctagttttaaattgggatgattttcttttcttatgaatttgtaagagctcctaatacagtaagaatacttttctatatgctctcatatgttgcagttttctcaatttttagtttacattttcattttaataccctttttgacagaaaagttcaatttcaggagtcagttctgtcagtcttttcttttcttttttcttttcttctcttttcttttctcttttttgagacaaagtctcgctcttgtcgcccaggctggagtgcagtggtgcgatcttggcttactgcaacctctgccttctgggttcaagcaattctcctacctcagcctcccaagtagctgggattacaggcatctgcctccatgcctggctaatttttttgtatttttagtagagacgggggttcaccatgttggccaggctggtctcgaactcctgacctcaggcgatctgcccgcctcgcctcccaaagtgctgggattacaggtgtgagccaccgcaggcagcctctctttttctttacatttttttttaatgctaaaaaagaccttttctcactacgatactgtgataaatgttcttctgtgatccctttctagttcccttaatgtttaattttttagacacttagcgtttaatatagttgatatttctttactatatgaggtagagatcaaacttaattttcttccagctactcaatggagtatttcaatatcatatccccattgatttggtatgatccctatattatcttccttaagaaattgtgtgttaaaatcagcttctggcctctgtattctagtccactgctgtttccctgttcttgtagtagagcacactgttttaattacttttactttgtgttcattgtactaacgtgtactgaggtggggatgtggaacattcagtgataagtaagataggacagttcaagtctgcatttataaatgtatatcagtatttagttgtgtaagttgtataagctggctgatttttcttttaaatttttctttactcatctttcccaattttttttgcaatgaattttgaaatcattctgccaagttccaatattctgctaagggtttgtttgcaattttattattataattataatttattattatattaaagatttaaaattggtagatgattggctgatttgtagtatttgagcttcatgtttcaggaatgtggcatttttctaagcttgtttattttttaatacccctctgtactttttaaaaaagtttttttttgcatacagactacaacattttgtccctcgttaagagcatgtgtcagtgtgtttgtcatgagttgtaatacccagttcaactctataggtcttgtaaatagtaagtcatgatgtttcagcatatggttggttggcagtcttaaatttcaattttatgaactcatcttttcctgagtcaccttagtttaatggcagattggaagatggggaatcatggcaggttagtcagatgccgtctcaggaggcactgctccctggagtgtcttttaccgtttgtgaagtatcgcacaagaaggaatactcaagacttggttccttttagtagtaatggctctaagaatccagaggaatagatctgaatataaatggcgagtttgggaatgtacaaaacaagaaacaagaagtaggaaaaagaagaaactagtagaagatagcaaaatgttgtacgttaaggtaataagtaactgttctgcccccagacaagaggtgtttttactctttttattttttttattagggaacaagtatggacttacgtagacacctgattgggacctttatttgggaccctaagggacaagttttgcccaatcttttatataaataagtagaagtgaaattgtatatatgtatatacacacacatatatatgtatatatagtatagcatcctttccatacccatgctactcaaagcgtgatctgtagattgctgctggtctacacactgctgagtcaggaaaaaaaattgagagtatcatttagaaacttaatagcaatttgatattgtcatgaccttatatatcttacaaaagtactggtttaggatgcattggaaacttttaaaaaagttttcttcacaatcatgaagatcatggtgttcctcacttagagtgaatacttacatattgatttgttttatgcagggtgtggctgggaatcctatggtgaagtctgtgcttgataagacaaaacattcagtagaaagcatgattacaacgctggaccctggcatggctccctatatcagtatgtacataagttagaccggtatctgccattttttttttaagggtatgtccacatcagccactaattgtaattctctgttcgtttccactgattgtgtaatcagtggaaattcttattatattcttgcattaatttaattgtcagtcttattttttggtgttactaattcatcttttttaaaagtcattaaataaattttgaaaatcccacagaatgatcctagaaggagtaaaaaccatgaattattggtatacttgctgattttaattttaaatataggttagcattgctttatatgaattttactttattcactactgacatttgaagtgatgtttgtttcatactttttttttttttttacatttctcctgttatctattttaattaaatgtttgtgtgtaattgagggataatatttttggaggaagcaaatctagttaataatatctaatgactgggtatattgggaaagctatttttaaccacctctgaacactaatcatccagaatcatccagacagttgatagatactgtctgctatttaatttttatgtacatatccaatatgtgaaaaaatatcacaaggcttagtgaccaattattagtaattctgtaaaagataacttttaagtcaaaattgtgcagcaggtacctgaacagcgatttcagtggcaataaaaagccaatagctttcacaagtcttgactatgttggtagtttactgtctagtaaatatcaaaagataaggcctagcaattgttaagtgtctttattgaatgcttctgccaggcactttctcataagagctctgcaaggtaggtattttcctcaagttttggacgaggaatctaggtttggagggatgtaagttatcaccctagatcacacaacttggtggagctgtattgaactcatgctcaatttttttacacttagccactttgcttcccttgtagtagaaaattgaatcaagcattaaatcaactgagttgttctttgtgtttgtaactgtccaaagaattcaaaattggagtccaccatatatgttcttttctttgcaagtacatattttgaatgaaggaaaaaaaggaattaatatttttggagcttttgctgttttaatggctgtactatgttagactatgaaagcaattaccttatttaatccttagagcaaaccctatgaggtgccaggtgtttttattcttcttcttctttttttttttttttttgagacagagtctcactctgtcactcagactggagtgcagtggcgtgatctcagctcactacaacctctgcctcctgggttcaagttattcttatgtctcagtcttctgagtagctgggactacagccgtgtgccaccacgcccagctaatttttggtagagacggggtttctccatgttggccaggctggatagcaggcatttttctacaaagaaacaagctcggtgacttccacaaggtaaagaagctagtaaatgataaaggtagagccatcaagaaaaatgtgtaacaccgaaggggaaaaaagaaaggtacagaaatgaaatttctattattagcaaatgtcataactttatcagctttaaaaagtaataaaatcgaatttaagaaagctgacatctttactgacagcaaagcatcaccattctgatctaacaaaacaactcaaagtaaatcttaaggtttttttttttgttgttttttttttgaggtggagtctcactctaccgccaggctggagtgcagtggtgcaatctcagctcactgcaacctctgcctcctgagttcaagcgattctcctacctcagcctcctgagtagctggacctacaggtgcacgccaccatgcccagctaatttttgtatttttagtagagatggggtttcaccatgttggccaggatgatctcgatctcttgactttgtgatcctcccgcctaggcctcccaaagtgctgggattacaggcgtgaaccaccgcgcccggccatcttaaggtatttttacacaaatattctagaaatcatttgatgtaacaatttcgtatgtgtcaagaaactcaaaaagtattagaaatggcaggactactcatcacaagctgaaaagccattttgagctgaagcttaatggagcagtacttagctaaggtcgagagatgtgtcccatgtggaggaaaaaagtgaaaaaaaaagtatattcttcttctcttttatgtcctagtaacttctgaagtatccagtacagatgtgatctgtgagacattatgtcagtcaggaaaaagggatccattatttttaaaacccaaatatttgaaaatatctttcactgttccacatgatatttattagggaaaaacaaccttgtttctagggcaaaatgttttacattataaacaattttcatgaaaaatctcttttgccggtgataactattaatgccaaatatcaaaatgtgctgtgtttagaacaagggctttgaattcattatatcacagaaatgtttggttaagatttttaaaaataatgaaacatttggtcaaattggtctgtctagaaatagtagtacttaggttgtttaagtaattgaaaaattaaaaatatttgaaaatatttttatttcgtattactcttaatattttaaattttaagttttatgtgttatttcaatttcatatatgcttgcatatttatattagggcagtagtacatgtataattgataaatatctatttgtggtgtatgctcagaacattgtggggatatttaataaaaagcttgatgaccccatatttaaactattttctaggttaaaaagtatatttcatggtagtgcttgtttagtacataacttctctgcaactcattgacaaatcacttactatcagtaagtctttattttaattttccgtggagtatactaaatatgtaacttacacttcacaagccagatatgtgatttctggcttgtgatatgtaatgtcagttttgagtcctgacattagtgctaagtagatacgttaccttgggcaaaactttgttggcctcagttttctcaagcatataaaaaagataatgatctatatcttgcatggttttatgaaactggtaataattatgtatattagatgttagcacctggtatggtagtaattatgagaattgcattattttaatttgaaagttaaattttcctctggtctttttagaatctggaggtgaactggatattgtagtgacctcaaataaagaagtaaaagttgctgctgtccgagatgccttccaggaggtctttggcttagctgtggttgtaggggaagctggacagtccaatattgccccacaaccagtgggctatgcagctggattaaaagtgagtaacagaacaccattttcaggacatggaaactggcatttaattttttcacaattctgataatctgttgtctctatggagctaatagacttttacatactgaaataacaatgaactttgcttttagtagacagccctatcgtattatgaagatatagtggagttttaatttaaagaaatttaagataggttttgattattgtgggagggaaagaaacattgagagagcacaaaaggaatagttagtcctaaaagagatcttcttaatccagcattaacattcaaatcaattactgagatgataatatcccttgaatcccataagcttttattatccctattgataatgcttaaaaatatgtaagttccaggaattccgtcctctctttcatactttattttcctctctttgtgttattaccagcatacagtcatgcaagaacaaattaacagttcattggcatacaaacatctttctcaccttgaaaaaaaaagaaaaaaccaaaggaaaccccaacaaattctttgacctcccttcctctataacttaatgacctattttgcttccttttgcagctaaactccaaggagttggcagcacttttctcatatccttttcacattcagttaagtctacctcagttaggctttgatgtccagcactctactgatagtgctttcaggctcgtgctaatgttctccatcttattggacttaccagaggcttttgagacagttgatcatgcacttctctttaatgcttttttcacttgatttctaggattccacactttagtttttccctccttcatgtattgctcactccttctgtacttcctttgctgattcctcctcttctctccagtcttctgacggtcaccttctcatcaattcactctcagactatcccatggctttaaatactgtctctgtgctaacagttccaaatttatatctccacctgagaccttcctgtagactcttgatttatatataagttgcctttttgacaagtttacttgaatatctcaaacttaatatgtctagaactaaacttctttcctccacacttgctccctctagccttcttcaccttaattgatggcagttctagccttccgttttctcaggcaagaaaccttggagtcagccctgacttctctcattacccacttctaatccatcaagaaatcttatttgtaagacagacagttcttgtttttcaacataattgtgttccataaagttgctacagactgaatttgtgaatactgagccattgctcccaggggagatacgatggttaggatggttaggatactgtgggcctctggtcacattttgccaacctgtcaatacataactttgttttatgcctctttctgtttaaatacatttttatacacatacatgcacatatttttgattcattaatattgaactctcacagtcaacagtactgtaactcatgcttgaatgcagcttatttaacacactcgttttctcattaaggcacatcattgtcttcttgtgcttaggaacactacagcactccagcactacacttgggggccatttgaaaacagcagttaacatcaacaaacacaaagatgcaaaaaagaggtgctaaatagatcccaaaaaggatacctgtttacattgtgtcagctgaaagaagaagtcagggcactgccttgttcagcctcagctaggagtgtatgcatcaggcaactcaaatttctcatagctctgtgcatgtccgattttgagattataaataaatttcatgtgtagtcaatggaatccacaaaactaataggatcgatcaactgtatttatgtttaaggagaaacacattttcatatatgacattctgttgttttatttgaaggagcttataatagcctgcatttattgagaacatcccctgagccaggcacatagaccctttacctgcattcatttgatgtgtgtaaagcattagaatgaggtaattgacatagcatatttcattggggaaaaagtctgttgcattaattataattagtcactaaacacaaacccacactgacactagattatttttaattctactaggtagtgctacataagtttgaggtgttctttgagttgtatttagtactttatttaaatagaatatgaagcccttttcttttacacatatgcatactcacataccacaaaaccacttttctatattaggggctattaggcagtagttataccctatctaaatgtaatgcattatatataatatgaattaaattacatgttttctgccttttcacttttcacagtggtctgtccttacacacagagcaaagctgccaaaagcacatgcactttgaaatgcttcttttctctagtaggtttctcttgaatttgagccctagtatacattgccaataagagtttctttggtggtaggtgtttggacttaataaaatttagcaaaggtaactgacggctgtagggtttgaatttaatctagaaatgaaaaaaaaatacagcaaatgggtaaaataagtatgtatacatgataattgtacattaaactagttgtatatatataagataaaccataagcattcatacgggcgatttttacttgaaagactggaacaagtcacatacttagattgagaatgtatttgaagatttcccaagaggttttgcaagttggaaagagtttataggtctgagaaagaagacttttcaagatttagttgcagagagtaaactgaggaaaatcctaagtagaaatgattattagacaaaatggtgagtacatttcactgaaattagagactaaaacaagggatttctgtaaattgtgaagcattgtataaatgtgatatggaagttggtaaccttatttgatggaaattattgtagttgcatttatctttttataatagcatttgacagattatttttgctgctgatttttatccttcaaatttacaaatatgaattcattttccacaattttcagttcaagctcaaaactaaaattcattgaaactaatatataagaaagtgatttgtaaatttgtcggctttttattttttttcagaaacagtagagggagctaatgagaagaaaaataatgtagagtcttagagtataaaatggtaacctgtttttgttctccccaatcagattttatttgaagtaaatgggttttctgaactaaacttacgttaccttttaaaaataggaaattatttaaggaagtaaatcagttcagccaaaattaaagttaggaagcttctagaacttttatgccaagtattaactttattgaaaagccagttgtagttatgactactgttttatatagttttatattcaacaaatataatatctataagcatttatgaaaatattataaaattttaactattcactgaaccaagttgcttagtataagctcttagagtacaatattgttcttcagttctgaaatgattattttaatatggtctctaaactacctaattcttgatctcttatattgctaaaaaataaaatctccttctcaaaacattggtagggactaatattaaaatgtctgtatttgtaactccaaaagaggccacatttaattaatgtagtggtcagaggaaaaagaaaggccagatataaccccattttcattttcttatggattttataaacaaaaaagaaatttgtctacctagcttattatcctgtttcttgcaggaactaattaattttaattaaatgttttgtgaatcctgtgaaatataaagctctgtgctgtaggatagtgaaaaatgaacaaacttagtctctgttccctggaagcataaaatctaggaatattttgttgtagtgcatagctgagatatcacctgcaaagagttaggggatgaatctctgtacatcttactaatcccttaatagtttttacggaatgaatgtttacttaagctttttaaaaatcaaactttagccataactgcttcctgggaggagtgaattaggcaaatttgtaacatctggtataaataactaagttcatcttatctgttaatactgctttcaaaatcaacagctgcctctttaagtgttattagatttggtgatgccatatttacactatttgtattcttaacattgaccacataggccttcagaagcatttatttttttctttgttcagttttttatgtggtaagttcttattgaacacctattaagttaggcactgtgctggaaactagagatagaagagtgagcaaaaatatacaatcttggttttattgtactttaaatcctatcatcttcatctttacaagctagtatcttaaattatcttacacgttctcgcacagttgtcactttctctttttcacttcagttgtctctgaaataaattgagttttctcgagatgtgtcctagccttcttaattttcatttggataagaatttaccatttaatctgatattgtctgtttacctctgctgtccttataaaaattatccatggctacttctgttcagacttcttatcttgcgttttgaacacatattcatcacattgttcatggtcaccttttatgaaaggattcagataaaagcaataaacagaaaccttttccctcagtcatccagcttttagttttctattacatataatcagttcatgtcttcaatggtaattattttgttgaataagctgtggtgtaatgtatacatttgcagctttttattttaagtaactggtcattttggtgcatgtatatttaaaaggaatcagaagaaagagaaaaacatatttattattgatatgattgcctacctgaaaaattcaagagagaattaactgcaaaactgccagaactgataaaaactttgtatgtagtaagatggtctcttgccagatcaacattaaaaaatacagttttcttaaattatttaacagtaacaatcaatgagaaaatgtaatataaaaataatccacaatagcaaccaacatcataatgcatatggaataatttggaaggtgtaccccaaactgttgatactacggaaatgtaattgtattttgtcattttttactctacatttttgtattgtttgaacgtttacagtgagtatatatatgtgtttgcatataaatgtatgcatgtattgtgtaatcataaattagtatatttaatatgtaataatttgaaatggtctctaacctctgccattgttgtttagggtgctcaggaacggatagatagcttgcgtcgaactggggtgatccatgaaaaacagacagctgtgtcagtagaaaacttcattgcagaattgctgcctgacaagtaagtgtattatgtttctcttggaagcaaaatataattgggtctgggagttgacactgaatacttagcaaaaagtgtctcctgttttataaccagagagaaaagtatattttgatgctggctatatcacttaactagctgtgtgtcctgcatggcttagctggcatttctatccttgtgtctcttttttaattataaaatggagatggtcatgcctgctttctgagatcatgctaataattaataaaatggcactaagtataagatgatagatttggtgtggatataattgaccatgagtagcaaacacaattattctcatagttattcaaagtcgtggaatatatgggcaagaaggcctgatggcattctctaggtttgagtttctagtgagcagtatctctcctgtactcataatagtttagaaaaacctccagacagcataatttatcattgtttttcaggtggctttttatgggaaaaatttttaatttgcttaattgatttatattaaaataacttccctttgttgaaatctaccttcttttgtatttgcattatggttttgttgtttttattttttatttgtttgttcagtgttgaataacaatgggcatagcattttgtggcttgtaatatgcaaaatatatcctccaactttgaggcatattataggccagtgggaaagaagatatatgtagtacacagatgagcagttttaagtaattgtaaaacggaaacataattttttgctgacaggaaatatataaaatttcagtggaggtaactctgtggagatagtgtcaggtgaaattcatgaataattagggcttgaactggattttgaagaagaggtgaaacttggccaaatggaacaaaggaagtaggatgttctgggtggagaaaaagtttgaaggtaattgaaatgtattcttgggtcagtgattatatcaacttggctgaaggtttgttggatgggaaatcaagaggtgacgggacaaattgtgaagagctctgaattctaggttgataagtttcaactttctatgtaagcactgagaaaccgtccagtgattgttgtgtcatttttttttattaacctgttactgttcatttaataattaacattagaaattacaatatgcctttttgatataacaaaaattataacttgtgataatactagtactacttttaatactattcactcccttttcaccttttgcggtatcattgttaagtattttaattctgcatatattttaagctcttaagacataactggtaatgttctttgcagtcagtatttgtttattctctgaattctttcttgcatttctgtttttctgtctggggtcatttttcttcgaaaggaagcctaaagtacttcctttgataatacattatagttcagagctgctcactaccaattctctcagcttttgtttatctgaaagtgctttaattcacctttatttttgctggatgtagaagtctaggttggcagtttcttttctttcagcactttaaaaatgtcatggtactgttttctggcttccgtcatttctgttaaaaagtcatctctccataaatgttttcttttgagaagtgtctgttcatgtccttcgcccactttttgatggggttgtttgtttttttcttgtaaatttgtttgagttcattgtgattctggatattagccctttgttagatgaatatgttgcgaaaattttctcccattttgtaggttgcctgttcactctgatggtaataggagtggtgagagagggcatccctgtcctgtgccagttttcaaagggaatgcttccagtttttgcccattcagtatgatattggctgtgggtttgtcatagatagctcttattattttgagatacgtcccatcagtacctaatttattgaaagtttttagcatgaagagttgttgaattttgtcaaaggccttttctgcatctattgagataatcatgtagtttttgtctttggttctgtttatatgctggattacatttattgattttgtgtatattgaaccagccttgcatcccagggatgaagcccacttgatcatggtggataagctctttgatgtgctgctggattcagtttgccagtattttattgaggattcttgcatccatgttcatcaaggatattggtctaaaattctctttttttgttgtgtctctgcctggctttggtatcaggatgatgctggcctcataaaatgagttagggaggattccctctttttctattgattggaatagtttcagaaggaatggtaccagttcctccttgtacctctggtagaattcggctgtgaatccatctggtcctgtactctttttggttggtaagctattgattattgccacaatttcagatcctgttattggtctattcagagattcaacttcttcctggtttagtcttgggagagtgtatgtatcgaggaatttatccatttcttctagattttctagtttatttgcgtagagttgtttgtagtattctctgatggtagtttgtatttctgtgggatcggtggtgatatcccctttatcattttttattgcgtctatttgattcttctctctttttttctttattagtcttgctagcggtctatcaattttgttgatcctttcaaaaaaaccagctcctggattcattaattttttgaagggttttttgtgtctctatttccttcagttctgctctgattttagttatttcttgccttctgctagcttttgaatgtgtttgctcttgcttttctagttcttttaattgtgatgttagggtgtcaattttggatctttcctactttctcttgtgggcatttagtgctataaatttccctctacacactgctttgaatgtgtctgagattctggtatgttgtgtctttgttctcgttggtttcaaagaacatctttatttctgccttcattttgttatgtacccagtagtcattcaggagcaggttgttcagtttccacgtagttgagcagttttgagtgagtttcttaatcctgagttctagtttgattgcactgtggtctgagagacagtttgttataatttctgttcttttacatgtgctgaggagagctttacttccaagtatgtggtcaattttggaataggtgtggtgtggcgctgaaaaaaatgtatattctgttgatttggggtggagagttctgtagatgtctattaggtccgcttggtgcagagctgagttcaatttctgggtatccttgttaactttctgtctcgttgatctgtctaatgttgacagtggggtgttaaaatctcccattattattgtgtgggagtctaagtctctttgtaggtcactcaggacttgctttatgaatctgggtgctcctgtattgggtgcatatatatttaggatagttagctcttcttgttgaattgatccctttaccattatgtaatggccttctttgtctcttctgatctttgttggtttaaagtctgttttatcagagactaggattgcaacccctgcctttttttgttttccatttgtttggtagatcttcctccatccttttattttgagcctatgtgtgtctctgcacgtgagatgggtttcctgaatacagcacactgatgggtcttgactctttatccaatttgccagtctgtgtcttttaattggagcatttagtccacttacatttaaagttaatattgttatgtgtgaatttgatcccatcattatgatgttagctggttatttttctcattagttgatgcagtttcttcctagtttcgatggtctttacattttggcatgattttgcagcagctggtaccagttgttcctttccatgttcagtgcttccttcaggagctcttttagggcaggcctggtggtgacaaaatctctcagcatttgcttgtctgtaaagtattttatttctccttcacttacaaaacttagtttggctggatatgaaattctgggttgaaaattcttttctttaagaatgttgaatattggcccccactctcttctggcttgtagagtttctgccgagagatctgctgttagtctcatgggcttccctttgtgggtaacccgacctttctctctggctgcccttaacattttttccttcatttcaactttggtgaatctgataattatgtgtcttggagttgctcttctcgaggagtatctttgtggcattctctgtatttcctgaatctgaatgttggcctgccttgctagattggggaagttctcctggataatatcctgcagagtgttttccaacttggttccattctccccgtcgctttcaggtacaccagtcagacgtagatttggtcttttcacatagtcccatatttcttggaggctttgttcgtttctttttattcttttttctctaaacttcccttctcgcttcatttcattcatttcatcttccatcactgataccctttcttccagttgatcgcgtcggctcctgaggcttctgcattcttcatgtagttctcgagccttggctttcagcttcatcagctcctttaagcacttctctgtattggttattctagttatacattcgtctaaatttttttcaaagttttcaacttctttgcctttggtttgaatttccttctgtagctcggagtagtttgatcatctgaagccttcttctctcaactcgtcaaagtcattctctgtccagctttgttccgttgctggtgaggaactgcgttcctttggaggaggagaggcgctctgctttttagagtttccagtttttctgctcttttttccccatctttgtggttatatctacttttggtctttgatgatggtgatgtacagatgggtttttggtgtggatgtcctttctgtttgttagttttccttctaacagacaggaccctcatctgcaggtctgttggagtttgctagaggtccactccagaccctgtttgcctgggtatcagcagcagtgtctgcagaaccgcggattttcgtgaaccgcgaatgctgctgtctgatcgttcctctggaagttttgtctcagaggagtacccggccagccgtgtgaggtgtcagtctgaccttactggggggtgcctcccagttaggctgctcgggtgtcaggggtcaggggcccacttgaggaggcagtctgcccgttctcagatctccagctgcgtgctgggagaaccactgctctcttcaaagctgtcagacagggacatttaagtctgcagaggttactgctttgtttttgtttgtctgtgccctgcccccagaggtggagcctacagaggcaggcagccctccttgagctgtggtgggctccacccagttcgagcttcccggctgttttgtttacctaagcaagtctgggcaatggcgggcgcccctcccgcagcctcgctgccgccttgcagtttgatctcaggctgctgtgccagcaatcagcgggactccgtgggcataggaccctctgaaccaggtgcgggatataatctcctggtgcgctgttttttaagcctgttggaaaagcacagtatttgggtgggagtgacccgattttccaggtgccgtctgtcacccctttctttgactaggaaagggaactccctgaccccttgcgcttcctgagtgaggcaatgcctcaccctgcttcggctcgagcatggtgcgctgcacccactgtcctgggcccactgtctggcactccctagtgagatgaacctggtacctcagatggaaatgcagaaatcacccgtcttctgcgtcgctcacgctgggagctgtagacaggagctgttcctattcggccatcttggctcctcccacagtagctcaccatcactggccatcagagaaatgcacatcaaaaccacaatgagataccatctcacaccagttagaatggcaatcattaaaaagtcaggaaacaacaggtgctggagaggatgtggagaaataggaacacttttacactgttggtgggactgtaaactagttcaaccattgtggaagtcagtgtggcgattcctcagggatctagaactagaaataccatttgacccagccatcccattactgggtatatacccaaaggactataaatcatgctgctataaagacacatgcacacatatgtttattgcggcactattcccaatagcaaagacttggaaccaatccaaatgtccaacaatgatagactggattaagaaaatgtggtacatatacaccatggaatactatgcagccataaaaatgatgagttcatgtcctttgtaaggacatggatgaaattggaaatcatcattctcagtaaactatcacaaggacaaaaaaccaaacatcacatgttctcactcataggtgggaattgaacaatgagaacacatggacacaggaaggggaacagcacactctggggactgttgtggggtggggggagggatagcattaggagatatacctaatgctaaatgatgaattaatgggtgcagcacaccagtatggcacatgtatacatatgtaactaacctgcacattgtgcacatgtaccctaaaacttaaagtataatttaaaaaaaaaaagtcatctctccatcttcttgtgtattgtctctgtgaagataatatgttgttttctctggctgcttttaggattttctctgtcgttttattttttgcggttttagaatggtatgattatatgtatttgcttgcttgctctcataattattttttgtggattcgctgagcttcttgattctgtggattaatatcttcagttttggaaattctttacaattatgtcttcaaaacttgcttctggcccatttctctcccttctctttgtaggaccttaattacatgcccattcacctttgacagtgtctcacattgtcaggttttttcccccactctttttttcctctctgttccttagttttgacattttctattcacctgtcttcaggttcactaatcctgccttctgctgtgtccagcctgttgttaaactcttacatagagttcttaccttttaaaatgcaggttcaatttatcttttgaatgcctgtatctttaaatgtagttgaactgtctttacctctcttttcttgactatatgaaccatagttaacttttaaatcctcatctactgattccaatatcacggtcacttgtggtctgtgttagtctcctttttccttttggtttgaatatatggtgctgtctctctgaatgcatagtaatctttgaaaaccattgtttagaaaacaaaactctagagtctttaagtgatcttgagaaggttcatcctttcctctataataatatacacaattgtaggggtgtgaggaaggggagggtaatgtagtgtacttcagtcacagtctgagctgagtcaagtctaggtcggtgttctaaggtatattcactggcatcatagaaaaaactttcctcataccttcagtaacactttttaggatgtccacacctgaaagcttggttagtatgttattcaccatagagattattgtctgcaaattatgcaaaataaggcaaaataaaatttagctaagctcgactttatggaggcttcacaaatacattatcttgattgagaaagttgtagtaaaatacaaaatatctattagtctaccaaataaaataaatgtcattatttaatgtttttaattttaaagttttaggatatgaacactatagacattataaagtgccattttagtattcagcaaagttatttatgttactgtatattttactttgttgtttttttgaatgtgtaaataaaagtctcctaatccattttatatttcattgcattttattagatttacattaaaaaataggcattaaacattttcctgcttcatatccttttattgtttaaattcatttttgagggtatctggctgtttcatgatttgggttagctaaaatttgggtggtactacagttgttttcaataaagtcatttttaaaatttatcattttgtatgatatataagtctctttaaatgaagagaagtttcctggatttcatgaggctgttttcaaagactgactcattgtgaataattcagaaattgtgattagaaggatttattattaatgaagagagtatttgttattatttcctctgagcttattttttaatttgttagtaacttagttgagtacatattcatgatagagtttgtattataaaatttcccatattttagcaagtgacaattgaaaaatattactcataagctgtttgcatattcaatgtatgtaaatttacctgttgcatatttgagtacccttactttgattattctcccttcccatggagaggaagctttccatgataagtatttttaaattttttttctttgtggttattgtcttttttcctcttagaattaatacaattttatctgttgtttttatgaattgtccttttgcaagttggtaagaaaaagatttcctttttgaaatctgttctatctgaataatagtacttgttttttctttttgtctattcatgataagttttatttggcatataaaccatttgaaactcgtaattctgttgcagatggtttgacattggttgtttggtggttgaagatcctgtccatggcattcatctagaaacatttacacaagccacaccagtgcctttggaatttgtacagcaggttggttttctcctttgctttttcattatgctccagagaaacttacactattgttttcagaataaaaatttgttcggtttttttgttagaaatatgttcttgattttgtttcagtcatttttcttttagtatttttctttgctttttaatttcctgatccttccatgttgttttagtaccttcctccttttgttttccaggtgtctttgaaaggtaatacattacatggttaatcattatttctctcatttttttctttgtttttactctgagttctggaaaagatttaccttttctagttgttttatgtccgcctttcgtttgctttcccttttatctcacatttcatttccactgttatctccatttcccttttccttgattgattgtcctcctgttcatctttagtgaaatcaacattagaaaccttataggcacgtgtctttaggtttttggctgaaaaatggacctaatagtgtacctatccacacagtttccaggagaatgtaagtataaatgataatccttattcctcttttttttttttttttttggtgtgttttctctaatcctttcatgaacaaaatggaatataaatatatacttgcattggaatctctgtgctcttaagtggtattctattgacttttttctgtcaatttcataaaatttttgttacagttgtagtttgtacattgttaaatatcatttcaaaactgcctttcaaacttatttgggacatgaagacatttgagaatctaagaaaactattgggctgtctcccaagaaaaatgcgtgtatgtgtactttcatagaactttggcatatgtgttcacataatccctaaaagtaacctctggcctacttattacagtttagaaagggggctaagaattgatgcttggaatttgaaattttactgaaacttttatttataccgtaatttcttttcataagttcaagaaaacctttttatagatattaacattacactcatttcaatatgaaggtgattaaaagactgtaagtgaatactatgcatactattatgccaataaattagaaaaattaggtgaaagagtggattttctaggaaaatagaagttttgccatagttaagagtattaggttgaaccaaatgacgttgttgcctttgatggtcagaaatagttatatattgtcagtttcatatgattcagcttaattgaagcattaaaatggaagaactttatgtaactaaaaaaaaaaaatcactgagtaccaatggtgttacaagtgagttctacaaaatgttcagagatgatttgctgtatgaggtatcaaaaatagaggtagagagttttccagttcattctgtgagactagcctcttttaactttaaatgaaattatagtccaaagaactaaatgtcaaaaccattggtaaaattaataaataaaattcagaaatgtattagatgaacattgtatcctgaccatgaaaaatttgtcccaagaacagcagaatggttcaacaatagtaaatttatgtaattcagtacatgatctgcattgaaaggagaaaaaagattttgataagagttgaaggtatttgctagaaataatcatactaatagctcttagtattagacgggtatgtgtgtactacaaaatcaaagcaaacttcagatctaataaataaaacactgaaaacgttataattatgaggatgctcctgtcactgccactgttaacattgctgtagatctggggtcagcaaacagtggctcacagccaaatctggcctgtcatctttttgtaattaagtttattggaacacacccatgccagtttgcttacttattgtttatagctgcttttgtactatagcagcagaaatgaatagttgcaacagagaatgtctggcccacaaagcctaaaatatttaccatctggctcttttcagaaaaagtttgctgacccctgtgttagatatctgaccattgcaaaggacaatttttatgttgtttttaggaatatatactggaaagaagtagacatgaaagaatgaagtggactcgtgtgtaccagtaccaaaagatagctattacatattgctgagtaaaagtcaaaaacagcacatctagtatgatcccatttactagcaggcgtgtgtatgtgtgtgctttaaaattttaataagaatagggaaaaaggcctggaaagataacatagcaaactgttaatagtggttaattctgaataatggtatttaaagggtgttatttgctttttactttgctttttattctgtttgttttattttgtgtcatttggttttaaaatttagaagatacaaaactgtgtgcattgaaatgtcttctttttatcctcagctattcagctctcctccctgtttctttttattcattctaaaatgttttatgcttttttattgttggaattttttaatttaaggtaatggaaatcagcccttcaggtaattagaattatcagtatatattagtaaaaatctggaaataaatttcatacaatttgtacttgttaaacttaaatataaatgattcctcacccccataaaaaaccccagctgttctggatttttgccaataatatagaataccttgtttctaaaaagtgtggtccttggcttaacatcataagcagcacctagaaatttgttaaaatgcagattctcgggtcctaacacaggactagtgaatcaggagctgcattttaacaagatattcaggggattcataggcatgccataatttgagaagcacagtgttactggtgtctctgaggacgttagtagtatatctgctgtttctctttgaaatatagtgaaatactgatactgtagtatacacattggaagagagtacttagagcaggggttcccaagtgctggactgtttgcatcagattgacttggaagctattttacgtacgtaatactgtactgtttctcttggaaccagctgtagagtttccaattcagttatcttggtgtctcagttatcttagtgggatgtgagaaactggatatcgttaaaaaagaaaaaagaacaagagctcctcaggtgattgtaatacatggcacatttggtagtcatgtataactgtatagatccgttctagatgtggctatacttctctggactatacctaacaccctaaaacagaaaaaccacatcagtcttggatatcaagcaatgagtttattcttctgtcattcctttgtagatgaataaatgatttgaataggagcaaatatgagttgggtcaattaggaatgttgcatcagtggttgatgttgtccaggactggatattacttgatacatattaacatgtgaatcacatttccagagagaatttccataattgagcaattcttttctgaatggatttaagccttaattttcagttttcctctttctggttgaaattttactactataaaagataactttagcactgattttagtaccaatcttattattaacctgaagtgacacttaatttagaactagaactcaaaccttccgactgttagcctcgttaatggggatattttttaaaaaatagatgtgtgtaatgttacattgattgtgttctagccttgtaagttgatatagttggcagcctagctgtatttctcagagtttgtcataatctatatttaaaataacatgaaacactttgaaatgtcacttatagctagttccaatgatatttttaaatgtattataagtaatatcaatttcatctttccacaggctcaaagtctaactccccaggactataatctgaggtggtcaggccttttggtgacagtgggtgaagtcctggaaaagagtttactgaatgtcagccggactgattggcacatggcatttactgggatgtcccgtcggcagatgatctacagtgcagccagagcgatagcaggcatgtataaacagcgcctgccacccaggacagtgtgagaggagacctacctgggagactgagactttcccccacttttagcttgatgttaaagaagtggttgtaccttcctaaatcgaatagtctaaatgaatccagtagtttttatcattttcctgtagcctgcaatttttctttctctagaaaggcatcatgtcattccaggagacaaaaagaaacaaatcctttttatagtcataccatttcacctatcatagtactcaaaaaagaaaatatacaaatctatttacagcacaatttaatataccagatttataaggtggaaattcatgtgcagagacatttaacttaatgccatgtacttgattattttgttctttaaagaagagattattaaagaacatgttggttgaatgtttataaaagcatgatttgctttggcttcatctcttttctgtcagtctttgactacttttgtatgtgcacacgatctcagggctggtgctgagcagcctgctcaacagtcactataagacacctacttgtcgggagatgttccacatttctgtgcatgttttcagtaatatgggccaaaataatggaattgattattttcctttttggccatcacgtacacatgtaatctggaaaatcatacctttgtcaattttaaacataacttttggcatttcccagatttatactatgaacattggggtaatacattttattttttcattgctatatgacagctaaggggcaaatgattcaagtatattttaaatcagaagtattcaagttatttttgtataatactgttcagtacttccaagaataagctctgacaacagccattgtttctgcttccactcatattctctacacattttaatacagaaatttttgagagggggttactttattgcttgtgggttagtatgtctcttacttcaattaaggttacttatttggtttgccttaagcattacttttttaactttgtgccatttggtctttactttttatggatgttttcaaggaaactattttatattcaatctagtttatttagtctactgtatttctatttagtggaagccttttcccctcaaataatatattttatcatttttggacttatataaatcataattaaataaatttttttcttaatactgttggactttgtatatacaagttcagataactttttcgaagatagtttcttatataaatgtaatttaatttttttactcttctatacagttctttagatgtaaaggaattagcacaatctctggcagttttataaaagctgttgaagctcttgtcctgcactgtctttaggtatcataggtatcaggtttgctttgtgttaatgccacttcaagtcattatttggtttctgctatttttttacctgaggataagaagaatgaatattaaatttgaatattaaatatatgttactttccaagcactgtataatgactgttcagtgaatatcagacttccgtgtcattaaaagtcatgagagacagcacagagaggttataggttgccttggtgtacttttgtccaggagtaacagggacagaatactttctttccttccttcaagtacaagaaggctttctctaccatttgcgtctacactttattttaaaagctatccttttctagtagtattttatcatggcaatggcatgatgacaacaacagtctttcattacagactgaagggaagcatgtccttacttaaaatagttctgctactttccctcctattataaggaaattttacagattctaaaaataccttaatttttctttgatttttattttaccaagtcacaaatgtctttttgatgttttgagaattgttctcatagaatcacaaatactgacatttcattagatgattattttcctagaatccccaaagagcagtggcagtccatggcttggttgaagctagaaattttcctgcccctggtgacctggtaagcctcctgctcggaaccgtgtgagtgggtgaggaagatgagagatggtcagatggaagagaggaatacatgaactgctctggcctctctggttctgttcttggcccagagtttttgaaaagcagcggagcatgactgacttcacatgctcagctttctcagccttttgtttattttgttgtccttagatttccctgttgtaaaaggggcaagaaaagtaactcatcatctctaacacaccatggcagcttagccaggtagtcttagtggtggtgtttaggcataagatatgctgatcatcagtctcaggccacagtttccttcactaatcgtccagcttgagtgttctgttctcttcctgcccatttccttgaacctcctgctctagccttggcggagggagagtgctgtttgcttttgttctccctctgtcttaggaaaagccatctttaatatagttcttcaccaccgttggggttgttttgtgattttttttttcttccgaagaactcctggttgttattggattttgtattttaatacaaattattgaattttataagcttgtacacaatatttaattagtgtgaaaggaaacaaagaatgcaggaaaaataatttaatcaacctcagttgacaaggtgctcagattattcaattcgggatcctccttttgttaggtttttgagacaaccctagacctaaactgtgtcacagacttctgaatgtttaggcagtgctagtaatttcctcgtaatgattctgttattactttcctattctttattcctctttcttctgaagattaatgaagttgaaaattgaggtggataaatacaaaaaggtagtgtgatagtataagtatctaagtgcagatgaaagtgtgttatatatatccattcaaaattatgcaagttagtaattactcagggttaactaaattactttaatatgctgttgaacctactctgttccttggctagaaaaaattataaacaggactttgtagtttgggaagccaaattgataatattctatgttctaaaagttgggctatacataaattattaagaaatatggatttttattcccaggatatggtgttcattttatgatattacgcaggatgatgtattgagtaaaatcagttttgtaaatatgtaaatatgtcataaataaacaatgctttgacttatttccaaa

SEQ ID NO: 9957 - DNA, 37442 bp, Homo sapiens
atcttgtaggcggggacacgccgaggtaacttccagggtgcgccttcgttgtcttctccaagctgtagttctacgtcccgacctccctatcataccacactcttcagcgaccacgcaggcactttcccggtccccaggtgagcgccaggtggctccgaggggcgtgtatgaggggggtggcatggcatggcatggcttgcaggcgccagagccagaccccgagggacggtgtccctggaaggtgggcgggccggccggcgccactggacgccgatgtcgtttgcgagccccctagtcccgtggtccaggctcagctgtggcggcgtgcggggtgcagcaggcaggagtgcacatcgcaaggtgagcagtttccgctggggatggcacggtgggcgcggttcgagggtctcgccccgcgacactttgctcctgtccaaggaccaaggcaggagcgctctggccccaccttccagggcgctgactttaggggagactggcgggagcgccggcggaccttagcccggccctgtctggcctggagacgtggcagagcctgaggggaagccgctgtctcctgaaacaggatttcggccgctctggccctggagaggcccaggaggctcgagagtcatcacaccaggacctgcaatgaaaggaagcttattttccctgaggttaccccatcggtgcttagcgccgcttgggagagtttttgcattctctcgtttctttgtttggtcttgggacctgcttcaggcaaatttgcagatagcacgtttcctagattgacagaatttatagccaatagtgtttttgtcattcgaagtagttattttgagagacaacatgtgcatttctgcgatcgtgacacatcttggcattcagtctttctcctgtgcagccagtgtttaattcagtgaaaatttataaaattttatttcggggtcagattaggctctaactagcgctcactgtttggtagtagagacaatcttgtggcacgagtaggtcagcaataattgctcttaatgctttaaagtttatcagagcttcactcttccatttcttgtaaacttgtaaatagacatccactttttttttttttttttaacagaaaaaccaaggcacaagcaaattggaacaacagggtctagccggactgagaactcagttttccaaaccattttcttcactttttctttagtgttgatatatgaatagtacttttcgtgacaagacttgagccctaaaacagttaccaactctgacacttcagtattgttttatcataataggtttttttagtagaaggcactatgtttatgcatgtaaaatttacctcagtattgccattacggcagttttcatataaaaagccattaaagacaaagaaattgattatttattccacttaatgactttgtattcattgtacagtttcttttgcagacacatttgttaatgttagggattctcttacaataggacttctactagtcattgtaaggattggggagcatctgtagtagagggtgaatgaccaataaaaaattaaatgaagaaaagagggagctttggttgaggagtggtaaaatctccaaaggggcatttctatctcaggttatttaccttcgatgtataggtactgaatgaaaggattcagcctccccggatccctgttctctgcttagtgccatagatctttcctacgttcacagccaaactttttgaaagtgtcatgcgtgttagtctcacctgccactgctcgattcagtttacactggaatctttctccactctttatatgaaaaccgttctccctaaattcatctccagtttggcagatccattgaacttctcagatagtatcctatttggcttctctgcagcattaatactgttgcccattcatactgcgaaactctggcttttggacaccacagtctcctggttttcttcctttcttttagctcatctcttattctctgcaaacttgtcttccatcttactaaaccaataattggtttaacatcatattctcttttctcttggtattctcttacgtaatctcatctcaaaacatgacgttagactatcagtacactgatgacacccacatttatgtggttgctaagctccagaccaagtcagtgtctctacttagatgtttgtttcaaggaacttaaacagcatgtcaaagactaaacattttatgatttcccccatccgactcccccagaaagaacatcaaacacattggccttctgcagtgtttcctatctttgtgcatggcaccaccatctatctagttgtgcaagtcatgcctcctttcccttcctccatacccagtcactgaattttgccacctaatcttgtcttgaacttatttacttttctccatctccactatcatcacttgagtctaggtcagagtttttcaactttggcactattgaaatttggggccacttaattcttgtgtgtaggctgtgcattggaggatttttagtagtattcctaacctcttcatgctatatgccagtagtagccctctagtagtgacaataaaaaatgtcttggacattgccaagtgaccccttgggggcataatcagcccttcccactatgaaaatcattagtctaggttgttacttacttctgatggaactacttctatatcttccttaatggcctgtctgcatctgctctgtctgcccagtggcccaggctgcatactttgttcagatcttttcaaaaaataaatatgaattgctaataactggaatcagcctaaatgtccttcagcaggtacatttatacaatggaatactattcagcaataaaaaggaaccaatttgatatatgcagcagcttggatgaatctcaagaacattatgttgaatgaaaaaaagccaacttcaaaaggttatatgctgtatgattcgatttatgtaacattcatggaacgagaaagtgatagaaaacagagcagtgtttgccagggcttatggttgacgggaaggtagataaaggaacaacatgaggaagtttctttttagtgatggaatggttctatgtcctggtcgaggtggtggttatacgagattgtgcatatgatgaagcttcatagaactatgcacatacacacacacagtaaatgtaaaaacatgtgaaatacaaataagatctatagttaatagtgttgtaccaatgtcagtttcatggttttgatcattgtagtgtagttatgtaagatgctgttactgagagaagctgggtttggggtactcaagaactctgctgtttctacattttttttttgaacctaaaattccttcaaaacagttaaaacaaaagacagttatgctaccctcagcttgaatgccttacagttgtaggatatgataaatttctcttcatagattttagcctgtaaattgttaagtacaatgagttctgagatcctctccaaagaaccagtgtatcagtatgttcagctcccctgttctttgttcttcattttaaagtttaaattcctagttctttatttctccttgcccccagtttcagtaaacaatccccttctagcctctatcaactgctctgaccttagtcacccttggtcacctgctctgaccttagtaatccttggtcatctgctctgttcttagtcatcctggatcacctgttctgtaaccgtccttcccgccaaactactcaccctgctgctctggctcatacccctgctctctttaaaatagccagttggaattagcttagactgcgtggtccaaccctagccaatgggggaaagacacagcagtagggactagctgcgttaggataagaaccccttcccctcccttgttcaggtgtgctcttgacattgctccatctgtgagacacacccttctatagaagtaaaattgccttgctgagaaaattaaatttatgttcgagtgctatttcttttgtggcaccgaaaatttatttctaacacagtgacactctgttctttaaaaacccaagttttttaacctggtttatgaggctgaacaccttctgggcttctgtctgtccctccagtcctgattcttctttctctcccttcacatggattttattgaatgtatcttgttcttcccagctcagttggtatatatatttgctatatattcactttttctggactctgcctttcttcccttgcctaattaagttcttatccttcaaatctcggtttatctgtgacttatttggggaaccctttccttacctccaagtcaaaatcatattcctgtcaaacaaaactgtgttcttaccctcagagcacataattcagctaccattcattgtaaattggtttattatttgattgtttcgtgtactagactgtaagtatcctatttgtttttgctaatcattgtcatttccaaaggcatcagtatagtgctcgtcaagcagttgaccttcgctaaaaacttattaaatgaataaaaatattaaaaacaaatatagcatatttagaagttggttctgtacttgagatacacttcaggatttgtaattttaaagaaagttttctcatattttataatccattgttgtctattaggatgctgctatctaatggcatttttgctatagttaacttttctaaaacctcagatatacaatttatctgttactggatatgctttaaaatgtgaactaggaaaattgtgaattaatgcttttatcaagtgaagcacattttattttattttattgagacaaggtcctgctttgttgcccaggctggagtacagtggcattctcactgctccctgcagcctcaacctcctgggatcaggtgatcctctcacctcagcatcctgagttgctgggaccataggcacatgtcaccctgcctggctaattttttaatttttttgtagagatggagtcttcctatggtgcccaggctggtctcaaactcctggtctcaagggatcctcccacctctacctcccaaagtgtaggtttacagcggtcagccactgtgcctggctttattttttttttatgttaatggggttatcttatacacagtactttatgagagaagaggaagggcttcaaaaatacattaaatattttatttatttatttttagagatcttgctctgtcacgcaggctggagtgcagtggtgcagtcatagctcactgcaaccttgaactcctgggttcaaggcatcttctcatcacagcctcccaaagtcctgggatttcagacgtgagccactgtgcccagcctcatttttattttaaatttaataatgactgaaatttatattatttacttattttattttttagaaatgagatcttgctatgttgcccaggcttgtctacaactcctagcctcaaatgcttcccgtcttggcctcccagagtgctgggattataggcatgggacaccacacctggcccagacataactatctctaacatgcattcatgtggcagaaatcaaattagtaatttactatttgaaatgtagtagataattagttatattgttattataacatgaaattatttcccacttataaagtatctacatgggaatgttacagattgtttgatattaaatattctcatagattgctttcttagaaatttggacaaactcttcgtctggaaataagttgcattataaacagtaaaggtggacatctatctcttgatgattttttttttagtcgttctctattcaagctttaaaaatatacttttggttactgtgtaatatttgttacatttttgtgtttttatagtataccataattgaagaaaaatgatggaagagagtggaatagagacaacaccacctgggactcctccaccaaatcctgcagggctggctgctactgctatgtcttctacccctgttccattaggtacatgtagttgtctaacatctcgtgtgttttgagaatagtgaagatactatcatcttttctcagagtcaattaagaaaagaatgcatatattaaaacttctctattatttttcaggatgaaaggaaatagcctttttaatttaaagaatagaaagaaagtcttgtgtatttaaagtaagaaaacatcagtgttttgctttaggtggacttttgttctttatgttcataattttaccatcatttatattatggcagaaatatcctaaaaagcatgtgttagctttgtcttctgttctttttcttttttttgagacggagtttcacttgtcacccaggctggagtgcagtggtgcgatctcatctcactgcaacctccgcctcccaggttcaagtgattctcctgcctcagcctcccaagtagctgcaattacagcactcaccaccatgctcagctaatttttgtatttttagtagaaatgggatttcacaattttggccaggctggtctcaaactcctgacctcaggtgatccacctgcctcagcctcccaaagtcctgggattacaggtgtgagccactgcgctcggcctactgctctatgactttgtggtgattaacctttctgagccttcagggcataggtttttatgctcaaactagggatgaaaaatcgctttattttattaaaaatacaccaaaacaaaccaaaaagcaaaaatgaacaatgccataggttcatacagctgcttcttttacttatgggagttgaaagtcatttacactcaattatatttgttgtatattttaaattacacattttaaaataattcttgggatatgcttggtaagttaaaaattttgcaagaagaaagtaattagacagtttgaaaactaaataaaaaacatttctaattctgtgcttttatcctctccacttttttctagcggcaaccagttctttttcttctccaaatgtatcctccatggagtccttcccaccactcgcatactctactcctcagccgccccttcctcctgtgaggccttcagcaccattaccttttgtgcctcctcctgcagttccttctgtcccaccacttgttacttctatgccacctcctgtttctccatcaactgctgctgccttcggtaatcctcctgtatctcacttcccaccttcaacttctgccccaaacactcttttacctgcacccccttcgggtcctcctatatcaggattttctgttggttcaacttatgacattacaaggggacatgctgggagagctccccagacacccctgatgccatcattttctgcaccttcaggaacaggtaattctttctgatactttgaaatacatggctattaattaatgttttattcttttttaaaataatagctttgttgagatataatttatgtactctacaattcacccaattcaaagcatacagttccatagttagtttacatcagaattgtgcatcccttgtcgcaattttataaccttttcatcactttaagaaagaaaccctataccttttagcagtcagcccctactgtcccccaaatcctcacagctctaggcaactactaatctactttctatgtatatggatttgcttatcctggtcatttcatatagatggaatcatataatacgtggtcttttgtgactggcaactttcacttaaatattttcacttaaatatttaacttaaatattttcaaggttcatccatgttgtagcatttgtcagtacttcattccttttcatggctgaataatattccagtttatgaatatgtataccacatttcatttattcaattaatcagttaatgttgggttgttttccactttttggctatttagataatgctgctataaatatttgtttacaggtttttatatggacatgtttttatttttcttgggtgtctacctaggcatggaattgctgatttacatggtaattctacaccaaactgttttctaaagcaggtgtaccattttaccttcttattagcagtgggcggggtcccactttctctgcattaatgttcttctctttattcatttctttggtttccagagttacctatttcacatttttgccatttaaattattaaaataaggctggtataatttagtatatgatttttttatgtgatatacaactcagtagatgattagtatatgggatgtcagaaaattccaaaattttgtcctaatatttgtgcatttatagagaaatttaaaggtgaagtctgagtttttttaagttttactgaaaaaattatcaggactgactgttccagggagtagtgtttttttagccaggtaaaaagtcagaaacaaataaaacctcatgtatgccaaaagtttgtgatactgggtcatttcctttccctaggtcagttaaatctacttgttttgtttctttggaataattgttgcaaatgagttatcaaaacttcgtccttgtcatcctctgcctgttgtttctcattttagggaaaagcagtagctttgctgtgctttttattatctatctttccctgtctacctttacaaatgaaaattattgcagagtgcaagtactatattcatgtctatgtatatgtgaattttctttctgagttaacatgaagtatatagagtatgtgtaataattgtgtgcttttttgtgatgaacttcagtgctcaattaattttatggattaaagagacctgaactacagccgttcatatccaagtgctgaataggacagacctgaagaacttttggatatacgcttttgtccattttcaggatacttggtttaagactatataaagggaaataaatttcttttgaaattctgtttaatttgcgttttataaaggtttgtgttaatctttgattgtataactcagtcttcaaatgcctgaatattaatattaaagttgtttgagccactcctttttataggaaaaagtttatggaataaattatacatatgaaaatttttgccattgattaggtcttttgccaactcctattactcagcaagccagtttgacatctctggcacagggaactggaaccacatcagccattactttcccagaggagcaagaagaccctagaattactagaggtcaggatgaagcatctgctggtggaatctggggttttattaaggtaagacgtgtttaaaaattatgtttaattttctaattataaaactaatagatattcattagagaaaatattgaaaatacaggatggcacaaggaaaaataaaattcttttttattagcagttttctgtagctgctctcagtctctgcctatgcatatctgtgtaaacgttcctttgaattaaaatcaaattgaagtagtgacaggtcagatggatactatttcatgttttctggtctttactgagcatatatcatggatatcttcctggccgtaaaatatttttttcagaaatgtattttggtttctcttatggctgcttcaccatacatgctgttgcatttatttcccgtgttttattttgctaatctgcctattggcattttctaattgtaattattttttttaaattagttaatttattttaattgacaaaaattgtatgtgtttattatgcacaacatgatgtatacatgaagtgtgtatacattctggaatggctaaattgagctgattaacatatgcaatacctcacatatttaccatttttttgtggtgagaaaacttaaaattttgaaatataaaaccttatatttcaagaatataatacattgttcctaactatagtcaccctgttgtacaagagatctcttctaattgtaattcttatcaataaatcatcatcatgattaggtctggcatggtgcctcatgcctgtaatcttaacactttgggaagcccaggcagggggattgcttgagtcgaggagttctgtatgagaccagcctgagcaacataatgagacccagtctctaccaaaaacttaaaaaaattagccaggcattgtagcgtgtgcctgtggtcccatgtactcagaggctaaggtggtaggattgtttgagcccaggaggtccaggctgcttgagctgtgatcatgatactacattccagtctaagtgacagagtgagacactgtctcaaaaaaaaaaaaaaaaaaaaaccaaaaaactatgatgagcactgttgtatgtaaatctttatggacatctttttttcctccgaattaattcctgatgaacatttgagtgaacatttgaagaaattgatacctattccacttcaggaggtttataccaaaatacactggtataacatttttcacttgccagcagtagttattaatttggactagggtattttctgatttgacaggcaaaaaataataccacattttaatttgctttcctttgctactgaatttgaacattttctcgtatgatttttagccatttgtattcttcttttgtgaaatatcggttatgttctttgcctagttttaaattgggatgattttcttttcttatgaatttgtaagagctcctaatacagtaagaatacttttctatatgctctcatatgttgcagttttctcaatttttagtttacattttcattttaataccctttttgacagaaaagttcaatttcaggagtcagttctgtcagtcttttcttttcttttttcttttcttctcttttcttttctcttttttgagacaaagtctcgctcttgtcgcccaggctggagtgcagtggtgcgatcttggcttactgcaacctctgccttctgggttcaagcaattctcctacctcagcctcccaagtagctgggattacaggcatctgcctccatgcctggctaatttttttgtatttttagtagagacgggggttcaccatgttggccaggctggtctcgaactcctgacctcaggcgatctgcccgcctcgcctcccaaagtgctgggattacaggtgtgagccaccgcaggcagcctctccttttctttacatttttttttaatgctaaaaaagaccttttctcactacgatactgtgataaatgttcttctgtgatccctttctagttcccttaatgtttaattttttagacacttagcgtttaatatagttgatatttctttactatatgaggtagagatcaaacttaattttcttccagctactcaatggagtatttcaatatcatatccccattgatttggtatgatccctatattatcttccttaagaaattgtgtgttaaaatcagcttctggcctctgtattctagtccactgctgtttccctgttcttgtagtagagcacactgttttaattacttttactttgtgttcattgtactaacgtgtactgaggtggggatgtggaacattcagtgataagtaagataggacagttcaagtctgcatttataaatgtatatcagtatttagttgtgtaagttgtataagctggctgatttttcttttaaatttttctttactcatctttcccaattttttttgcaatgaattttgaaatcattctgccaagttccaatattctgctaagggtttgtttgcaattttattattataattataatttattattatattaaagatttaaaattggtagatgattggctgatttgtagtatttgagcttcatgtttcaggaatgtggcatttttctaagcttgtttattttttaatacccctctgtacttttttaaaaagtttttttttgcatacagactacaacattttgtccctcgttaagagcatgtgtcagtgtgtttgtcatgagttgtaatacccagttcaactctataggtcttgtaaatagtaagtcatgatgtttcagcatatggttggttggcagtcttaaatttcaattttatgaactcatcttttcctgagtcaccttagtttaatggcagattggaagatggggaatcatggcaggttagtcagatgccatctcaggaggcactgctccctggagtgtcttttaccctttgtgaagtatcgcacaagaaggaatactcaagacttggttccttttagtagtaacggctctaagaatccagaggaatagatctgaatataaatggcgagtttgggaatgtacaaaacaagaaacaagaagtaggaaaaagaagaaactagtagaagatagcaaaatgttgtacgttaaggtaataagtaactgttctgcccccagacgagaggtgtttttactctttttattttttttattagggaacaagtatggacttacgtagacacctgattgggacctttatttgggaccctaagggacaagttttgcccaatcttttatataaataagtagaagtgaaattatatatatgtatatacacacacatatatatgtatatatagtatagcatcctttccatacccatgctactcaaagcgtgatctgtagattgctgctggtctacacactgctgagtcaggaaaaaaaattgagagtatcatttagaaacttaatagcaatttgatattgtcatgaccttatatatcttacaaaagtactggtttaggatgcattggaaacttttaaaaaagttttcttcacaatcatgaagatcatggtgttcctcacttagagtgaatacttacatattgatttgttttatgcagggtgtggctgggaatcctatggtgaagtctgtgcttgataagacaaaacattcagtagaaagcatgattacaacgctggaccctggcatggctccctatatcagtatgtacataagttagaccggtatctgccattttttttttaagggtatgtccacatcagccactaattgtaattctctgttcgtttccactgattgtgtaatcagtggaaattcttattatattcttgcattaatttaattgtcagtcttattttttggtgttactaattcatcttttttaaaagtcattaaataaattttgaaaatcccacagaatgatcctagaaggagtaaaaaccatgaattattggtatacttgctgattttaattttaaatataggttagcattgctttatatgaattttactttattcactactgacatttgaagtgatgtttgtttcatacttttttttttttttacatttctcctgttatctattttaattaaatgtttgtgtgtaattgagggataatatttttggaggaagcaaatctagttaataatatctaatgactgggtatattgggaaagctatttttaaccacctctgaacactaatcatccagaatcatccagacagttgatagatactgtctgctatttaatttttatgtacatatccaatatgtgaaaaaatatcacaaggcttagtgaccaattattagtaattctgtaaaagataacttttaagtcaaaattgtgcagcaggtacctgaacagcgatttcagtggcaataaaaagccaatagctttcacaagtctgactatgttggtagtttactgtctagtaaatatcaaaagataaggcctagcaattgttaagtgtctttattgaatgcttctgccaggcactttctcataagagctctgcaaggtaggtattttcctcaagttttggacgaggaatctaggtttggagggatgtaagttatcaccctagatcacacaacttggtggagctgtattgaactcatgctcaatttttttacacttagccactttgcttcccttgtagtagaaaattgaatcaagcattaaatcaactgagttgttctttgtgtttgtaactgtccaaagaattcaaaattggagtccaccatatatgttcttttctttgcaagtacatattttgaatgaaggaaaaaaaggaattaatatttttggagcttttgctgttttaatggctgtactatgttagactatgaaagcaattaccttatttaatccttagagcaaaccctatgaggtgccaggtgtttttattcttcttcttctttttttttttttttttttttttgagacagagtctcactctgtcactcagactggagtgcagtggcgtgatctcagctcactacaacctctgcctcctgggttcaagttattcttatgtctcagtcttctgagtagctgggactacagccgtgtgccaccacgcccagctaatttttggtagagacggggtttctccatgttggccaggctggatagcaggcatttttctacaaagaaacaagctcagtgacttccacaaggtaaagaagctagtaaatgataaaggtagagccatcaagaaaaatgtgtaacaccgaaggggaaaaaagaaaggtacagaaatgaaatttctattattagcaaatgtcataactttatcagctttaaaaagtaataaaatcgaatttaagaaagctgacatctttactgacagcaaagcatcaccattctgatctaacaaaacaactcaaagtaaatcttaaggtttttttttttgttgttttttttttgaggtggagtctcactctaccgccaggctggagtgcagtggtgcaatctcagctcactgcaacctctgcctcctgagttcaagcgattctcctacctcagcctcctgagtagctggacctacaggtgcacgccaccatgcccagctaatttttgtatttttagtagagatggggtttcaccatgttggccaggatgatctcgatctcttgactttttgatcctcccgcctaggcctcccaaagtgctgggattacaggcgtgaaccaccgcgcccggccatcttaaggtatttttacacaaatattctagaaatcatttgatgtaacaatttcgtatgtgtcaagaaactcaaaaagtattagaaatggcaggactactcatcacaagctgaaaagccattttgagctgaagcttaatggagcagtacttagctaaggtcgagagatgtgtcccatgtggaggaaaaaagtgaaaaaaaaagtatattcttcttctcttttatgtcctagtaacttctgaagtatccagtacagatgtgatctgtgagacattatgtcagtcaggaaaaagggatccattatttttaaaacccaaatatttgaaaatatctttccctgttccacatgatatttattagggaaaaacaaccttgtttctagggcaaaatgttttacattataaacaattttcatgaaaaatctcttttgccggtgataactattaatgccaaatatcaaaatgtgctgtgtttagaacaagggctttgaattcattatatcacagaaatgtttggttaagatttttaaaaataatgaaacatttggtcaaattgatctgtctagaaatagtagtacttaggttgtttaagtaattgaaaaattaaaaatatttgaaaatatttttatttcgtattactcttaatattttaaattttaagttttatgtgttatttcaatttcatatatgcttgcatatttatattagggcagtagtacatgtataattgataaatatctatttgtggtgtatgctcagaacattgtggggatatttaataaaaagcttgatgaccccatatttaaactattttctaggttaaaaagtatatttcatggtagtgcttgtttagtacataacttctctgcaactcattgacaaatcacttactatcagtaagtctttattttaattttccgtggagtatactaaatatgtaacttacacttcacaagccagatatgtgatttctggcttgtgatatgtaatgtcagttttgagtcctgacattagtgctaagtagatacgttaccttgggcaaaactttgttggcctcagttttctcaagcatataaaaaagataatgatctatatcttgcatggttttatgaaactggtaataattatgtatattagatgttagcacctggtatggtagtaattatgagaatttcattattttaatttgaaagttaaattttcctctggtctttttagaatctggaggtgaactggatattgtagtgacctcaaataaagaagtaaaagttgctgctgtccgagatgccttccaggaggtctttggcttagctgtggttgtaggggaagctggacagtccaatattgccccacaaccagtgggctatgcagctggattaaaagtgagtaacagaacaccattttcaggacatggaaactggcatttaattttttcacaattctgataatctgttgtctctatggagctaatagacttttacatactgaaataacaatgaactttgcttttagtagacagccctatcgtattatgaagatatagtggagttttaatttaaagaaatttaagataggttttgattattgtgggagggaaagaaacattgagagagcacaaaaggaatagttagtcctaaaagagatcttcttaatccagcattaacattcaaatcaattactgagatgataatatcccttgaatcccataagcttttattatccctattgataatgcttaaaaatatgtaagttccaggaattccgtcctctctttcatactttattttcctctctttgtgttattaccagcatacagtcatgcaagaacaaattaacagttcattggcatacaaacatctttctcaccttgaaaaaaaaagaaaaaaccaaaggaaaccccaacaaattctttgacctcccttcctctataacttaatgacctattttgcttccttttgcagctaaactccaaggagttggcagcacttttctcatatccttttcacattcagttaagtctacctcagttaggctttgatgtccagcactctactgatagtgctttcaggctcgtgctaatgttctccatcttattggacttaccagaggcttttgagacagttgatcatgcacttctctttaatgcttttttcacttgatttctaggattccacactttagtttttccctccttcatgtattgctcactccttctgtacttcctttgctgattcctcctcttctctccagtcttctgacggtcaccttctcatcaattcactctcagactatcccatggctttaaatactgtctctgtgctaacagttccaaatttatatctccacctgagaccttcctgtagactcttgatttatatataagttgcctttttgacaagtttacttgaatatctcaaacttaatatgtctagaactaaacttctttcctccacacttgctccctctagccttcttcaccttaattgatggcagttctagccttccgttttctcaggcaagaaaccttggagtcagccctgacttctctcattacccacttctaatccatcaagaaatcttatttgtaagacagacagttcttgtttttcaacataattgtgttccataaagttgctacagactgaatttgtgaatactgagccattgctcccaggggagatacgatggttaggatactgtgggcctctggtcacattttgccaacctgtcaatacataactttgttttatgcctctttctgtttaaatacatttttatacacatacatgcacatatttttgattcattaatattgaactctcacagtcaacagtactgtaactcatgcttgaatgcagcttatttaacacactcgttttctcattaaggcacatcattgtcttcttgtgcttaggaacactacagcactccagcactacacttgggggccatttgaaaacagcagttaacatcaacaaacacaaagatgcaaaaaagaggtgctaaatagatcccaaaaaggatacctgtttacattgtgtcagctgaaagaagaagtcagggcactgccttgttcagcctcagctaggagtgtatgcatcaggcaactcaaatttctcatagctctgtgcatgtccgattttgagattataaataaatttcatgtgtagtcaatggaatccacaaaactaataggatcgatcaactgtatttatgtttaaggagaaacacattttcatatatgacattctgttgttttatttgaaggagcttataatagcctgcattttttgagaacatcccctgagccaggcacatagaccctttacctgcattcatttgatgtgtgtaaagcattagaatgaggtaattgacatatgcatatttcattgggaaaaagtctgttgcattaattataattagtcactaaacacaaacccacactgacactagattatttttaattctactaggtagtgctacataagtttgaggtgttctttgagttgtatttagtactttatttaaatagaatatgaagcccttttcttttacacatatgcatactcacataccacaaaccacttttctatattaggggctattaggcagtagttataccctatctaaatgtaatgcattatatataatatgaattaaattacatgttttctgccttttcacttttcacagtggtctgtccttacacacagagcaaagctgccaaaagcacatgcactttgaaatgcttcttttctctagtaggtttctcttgaatttgagccctagtatacattgccaataagagtttctttggtggtaggtgtttggacttaataaaatttagcaaaggtaactgacggctgtagggtttgaatttaatctagaaatgaaaaaaaaaatacagcaaatgggtaaaataagtatgtatacatgataattgtacattaaactagttgtatatatataagataaaccataagcattcatacgggcgatttttacttgaaaaactggaacaagtcacatacttagattgagaatgtatttgaagatttcccaagaggttttgcaagttggagagagtttataggtctgagaaagaagacttttcaagatttagttgcagagagtaaactgaggaaaatcctaagtagaaatgattattagacaaaatggtgagtacatttcactgaaattagagactaaaacaagggatttctgtaaattgtgaagcattgtataaatgtgatatggaagttggtaaccttatttgatggaaattattgtagttgcatttatctttttataatagcatttgacagattatttttgctgctgatttttatccttcaaatttacaaatatgaattcattttccacaattttcagttcaagctcaaaactaaaattcattgaaactaatatataagaaagtgatttgtaaatttgtcggctttttattttttttcagaaacagtagagggagctaatgagaagaaaaataatgtagagtcttagagtataaaatggtaacctgtttttgttctccccaatcagattttatttgaagtaaatgggttttctgaactaaacttacgttaccttttaaaaataggaaattatttaaggaagtaaatcagttcagccaaaattaaagttaggaagcttctagaacttttatgccaagtattaactttattgaaaagccagttgtagttatgactactgttttatatagttttatattcaacaaatataatatctataagcatttatgaaaatattataaaattttaactattcactgaaccaagttgcttagtataagctcttagagtacaatattgttcttcagttctgaaatgattattttaatatggtctctaaactacctaattcttgatctcttatattgctaaaaaataaaatctccttctcaaaacattggtagggactaatattaaaatgtctgtatttgtaactccaaaagaggccacatttaattaatgtagtggtcagaggaaaaagaaaggccagatataaccccattttcattttcttatggattttataaacaaaaaagaaatttgtctacctagcttattatcctgtttcttgcaggaactaattaattttaattaaatgttttgtgaatcctgtgaaatataaagctctgtgctgtaggatagtgaaaaatgaacaaacttagtctctgttccctggaagcataaaatctaggaatattttgttgtagtgcatagctgagatatcacctgcaaagagttaggggatgaatctctgtacatcttactaatcccttaatagtttttacggaatgaatgtttacttaagctttttaaaaatcaaactttagccataactgcttcctgggaggagtgaattaggcaaatttgtaacatctggtataaataactaagttcatcttatctgttaatactgctttcaaaatcaacaggtgcctctttaagtgttattagatttggtgatgccatatttacactatttgtattcttaacattgaccacataggccttcagaagcatttatttttttctttgttcagttttttatgtggtaagttcttattgaacacctattaagttaggcactgtgctggaaactagagatagaagagtgagcaaaaatatacaatcttggttttattgtactttaaatcctatcatcttcatctttacaagctagtatcttaaattgtcttacacgttctcgcacagttgtcactttctctttttcacttcagttgtctctgaaataaattgagttttctcgagatgtgtcctagccttcttaattttcatttggataagaatttaccatttaatctgatattgtctgtttacctctgctgtccttataaaaattatccatggctacttctgttcagacttcttatcttgcgttttgaacacatattcatcacattgttcatggtcaccttttatgaaaggattcagataaaagcaataaacagaaaccttttccctcagtcatccagcttttagttttctattacatataatcagttcatgtcttcaatggtaattattttgttgaataagctgtggtgtaatgtatacatttgcagctttttattttaagtaactggtcattttggtgcatgtatatttaaaaggaatcagaagaaagagaaaaacatatttattattgatatgattgcctacctgaaaaattcaagagagaattaactgcaaaactgccagaactgataaaaactttgtatgtagtaagatggtctcttgccagatcaacattaaaaaatacagttttcttaaattatttaacagtaacaatcaatgagaaaatgtaatataaaaataatccacaatagcaaccaacatcataatgcatatggaataatttggaaggtgtaccccaaactgttgatactacggaaatgtaattgtattttgtcattttttactctacatttttgtattgtttgaacgtttacagtgagtatatatatgtgtttgcatataaatgtatgcatgtattgtgtaatcataaattagtatatttaatatgtaataatttgaaatggtctctaacctctgccattgttgtttagggtgctcaggaacggatagatagcttgcgtcgaactggggtgatccatgaaaaacagacagctgtgtcagtagaaaacttcattgcagaattgctgcctgacaagtaagtgtattatgtttctcttggaagcaaaatataattgggtctgggagttgacactgaatacttagcaaaaagtgtctcctgttttataaccagagagaaaagtatattttgatgctggctatatcacttaactagctgtgtgtcctgcatggcttagctggcatttctatccttgtgtctcttttttaattataaaatggagatggtcatgcctgctttctgagatcatgctaataattaataaaatggcactaagtataagatgatagatttggtgtggatataattgaccatgagtagcaaacacaattattctcatagttattcaaagtcgtggaatatatgggcaagaaggcctgatggcattctctaggtttgagtttctagtgagcagtatctctcctgtactcataatagtttagaaaaacctccagacagcataatttatcattgtttttcaggtggctttttatgggaaaaatttttaatttgcttaattgatttatattagaataacttccctttgttgaaatctaccttcttttgtatttgcattatggttttgttgtttttattttttatttgtttgttcagtgttgaataacaatgggcatagcattttgtggcttgtaatatgcaaaatatatcctccaactttgaggcatattataggccagtgggaaagaagatatatgtagtacacagatgagcagttttaagtaattgtaaaaaggaaacataattttttgctgacaggaaatatataaaatttcagtggaggtaactctgtggagatagtgtcaggtgaaattcatgaataattagggcttgaactggattttgaagaagaggtgaaacttggccaaatggaacaaaggaagtaggatgttctgggtggagaaaaagtttgaaggtaattgaaatgtattcttgggtcagtgattatatcaacttggctgaaggtttgttggatgggaaatcaagaggtgacgggacaaattgtgaagagctctgaattctaggttgataagtttcaactttctatgtaagcactgagaaaccgtccagtgattgttgtgtcatttttttttattaacctgttactgttcatttaataattaacattagaaattacaatatgcctttttgatataacaaaaattataacttgtgataatactagtactacttttaatactattcactcccttttcaccttttgcggtatcattgttaagtattttaattctgcatatattttaagctcttaagacataactggtaatgttctttgcagtcagtatttgtttattctctgaattctttcttgcatttctgtttttctgtctggggtcatttttcttcgaaaggaagcctaaagtacttcctttgataatacattatagttcagagctgctcactaccaattctctcagcttttgtttatctgaaagtgctttaattcacctttatttttgctggatgtagaagtctaggttggcagtttcttttctttcagcactttaaaaatgtcatggtactgttttctggcttccgtcatttctgttaaaaagtcatctctccataaatgttttcttttgagaagtgtctgttcatgtccttcgcccactttttgatggggttgtttgtttttttcttgtaaatttgtttgagttcattgtgattctggatattagccctttgttagatgaatatgttgcgaaaattttctcccattttgtaggttgcctgttcactctgatggtaataggagtggtgagagagggcatccctgtcctgtgccagttttcaaagggaatgcttccagtttttgcccattcagtatgatattggctgtgggtttgtcatagatagctcttattattttgagatacgtcccatcagtacctaatttattgaaagtttttagcatgaagagttgttgaattttgtcaaaggccttttctgcatctattgagataatcatgtagtttttgtctttggttctgtttatatgctggattacatttattgattttgtgtatattgaaccagcctttcttcccagggatgaagcccacttgatcatggtggataagctctttgatgtgctgctggattcagtttgccagtattttattgaggattcttgcatccatgttcatcaaggatattggtctaaaattctctttttttgttgtgtctctgcctggctttggtatcaggatgatgctggcctcataaaatgagttagggaggattccctctttttctattgattggaatagtttcagaaggaatggtaccagttcctccttgtacctctggtagaattcggctgtgaatccatctggtcctgtactctttttggttggtaagctattgattattgccacaatttgagatcctgttattggtctattcagagattcaacttcttcctggtttagtcttgggagagtgtatgtatcgaggaatttatccatttcttctagattttctagtttatttgcgtagagttgtttgtagtattctctgatggtagtttgtatttctgtgggatcggtggtgatatcccctttatcattttttattgcgtctatttgattcttctctctttttttctttattagtcttgctagcggtctatcaattttgttgatcctttcaaaaaaaccagctcctggattcattaattttttgaagggttttttgtgtctctatttccttcagttctgctctgattttagttatttcttgccttctgctagcttttgaatgtgtttgctcttgcttttctagttcttttaattgtgatgttagggtgtcaattttggatctttcctactttctcttgtgggcatttagtgctataaatttccctctacacactgctttgaatgtgtctgagattctggtatgttgtgtctttgttctcgttggtttcaaagaacatctttatttctgccttcattttgttatgtacccagtagtcattcaggagcaggttgttcagtttccacgtagttgagcagttttgagtgagtttcttaatcctgagttctagtttgattgcactgtggtctgagagacagtttgttataatttctgttcttttacatgtgctgaggagagctttacttccaagtatgtggtcaattttggaataggtgtggtgtggtgctgaaaaaaatgtatattctgttgatttggggtggagagttctgtagatgtctattaggtccgcttggtgcagagctgagttcaatttctgggtatccttgttaactttctgtctcgttgatctgtctaatgttgacagtggggtgttaaaatctcccattattattgtgtgggagtctaagtctctttgtaggtcactcaggacttgctttatgaatctgggtgctcctgtattgggtgcatatatatttaggatagttagctcttcttgttgaattgatccctttaccattatgtaatggccttctttgtctcttctgatctttgttggtttaaagtctgttttatcagagactaggattgcaacccctgcctttttttgttttccatttgcttggtagatcttcctccatccttttattttgagcctatgtgtgtctctgcacgtgagatgggtttcctgaatacagcacactgatgggtcttgactctttatccaatttgccagtctgtgtcttttaattggagcatttagtccacttacatttaaagttaatattgttatgtgtgaatttgatcccatcattatgatgttagctggttatttttctcattagttgatgcagtttcttcctagttttgatggtctttacattttggcatgattttgcagcagctggtaccagttgttcctttccatgtttagtgcttccttcagcagcttttagggcaggcctggtggtgacaaaatctctcagcatttgcttgtctgtaaagtattttatttctccttcacttacaaaacttagtttggctggatatgaaattctgggttgaaaattcttttctttaagaatgttgaatattggcccccactctcttctggcttgtagagtttctgccgagagatctgctgttagtctcatgggcttccctttgtgggtaacccgacctttctctctggctgcccttaacattttttccttcatttcaactttggtgaatctgataattatgtgtcttggagttgctcttcttgaggagtatctttgtggcattctctgtatttcctgaatctgaatgttggcctgccttgctagattggggaagttctcctggataatatcctgcagagtgttttccaacttggttccattctccccgtcgctttcaggtacaccagtcagacgtagatttggtcttttcacatagtcccatatttcttggaggctttgttcgtttctttttattcttttttctctaaacttcccttctcgcttcatttcattcatttcatcttccatcactgataccctttcttccagttgatcgcgtcggctcctgaggcttctgcattcttcatgtagttctcgagccttggctttcagcttcatcagctcctttaagcacttctctgtattggttattctagttatacattcgtctaaatttttttcaaagttttcaacttctttgcctttggtttgaatttccttctgtagctcggagtagtttgatcatctgaagccttcttctctcaactcgtcaaagtcattctctgtccagctttgttccgttgctggtgaggaactgcgttcctttggaggaggagaggcgctctgctttttagagtttccagtttttctgctctgttttttccccatctttgtggttttatctacttttggtctttgatgatggtgatgtacagatgggtttttggtgtggatgtcctttctgtttgttagttttccttctaacagacaggaccctcatctgcaggtctgttggagtttgctagaggtccactccagaccctgtttgcctgggtatcagcagcagtgtctgcagaaccgcggattttcgtgaaccgcgaatgctgctgtctgatcgttcctctggaagttttgtctcagaggagtacccggccagccgtgtgaggtgtcagtctgaccttactggggggtgcctcccagttaggctgctcgggggtcaggggtcaggggcccacttgaggaggcagtctgcccgttctcagatctccagctgcgtgctgggagaaccactgctctcttcaaagctgtcagacagggacatttaagtctgcagaggttactgctttgtttttgtttgtctgtgccctgcccccagaggtggagcctacagaggcaggcagccctccttgagctgtggtgggctccacccagttcgagcttcccggctgttttgtttacctaagcaagtctgggcaatggcgggcgcccctcccgcagcctcgctgccgccttgcagtttgatctcaggctgctgtgccagcaatcagcgggactccgtgggcataggaccctctgaaccaggtgcgggatataatctcctggtgcgctgttttttaagcctgttggaaaagcacagtatttgggtgggagtgacccgattttccaggttccgtctgtcacccctttctttgactaggaaagggaactccctgaccccttgcgcttcccgagtgaggcaatgcctcaccctgcttcggctcgagcatggtgcgctgcacccactgtcctgggcccactgtctggcactccctagtgagatgaacctggtacctcagatggaaatgcagaaatcacccgtcttctgcgtcgctcacgctgggagctgtagacaggagctgttcctattcggccatcttggctcctcccacagtagctcaccatcactggccatcagagaaatgcacatcaaaaccacaatgagataccatctcacaccagttagaatggcaatcattaaaaagtcaggaaacaacaggtgctggagaggatgtggagaaataggaacacttttacactgttggtgggactgtaaactagttcaaccattgtggaagtcagtgtggcgattcctcagggatctagaactagaaataccatttgacccagccatcccattactgggtatatacccaaaggactataaatcatgctgctataaagacacatgcacacatatgtttattgcggcactattcccaatagcaaagacttggaaccaatccaaatgtccaacaatgatagactggattaagaaaatgtggtacatatacaccatggaatactatgcagccataaaaatgatgagttcatgtcctttgtaaggacatggatgaaattggaaatcatcattctcagtaaactatcacaaggacaaaaaaccaaacatcacatgttctcactcataggtgggaattgaacaatgagaacacatggacacaggaaggggaacagcacactctggggactgtgtggggtggggggagggatagcattaggagatatacctaatgctaaatgatgaattaatgggtgcagcacaccagtatggcacatgtatacatatgtaactaacctgcacattgtgcacatgtaccctaaaacttaaagtataatttaaaaaaaaaaagtcatctctccatcttcttgtgtattgtctctgtgaagataatatgttgttttctctggctgcttttaggattttctctgtcgttttattttttgcggttttagaatggtatgattatatgtatttgcttgcttgcttgctctcataattattttttgtggattcgctgagcttcttgattctgtggattaatatcttcagttttggaaattctttacaattatgtcttcaaaacttgcttctggcccatttctctcccttctctttgtaggaccttaattacatgcccattcacctttgacagtgtctcacattgtcaggttttttcccccactctttttttcctctctgttccttagttttgacattttctattcacctgtcttcaggttcactaatcctgccttctgctgtgtccagcctgttgttaaactcttacatagagttcttaccttttaaaatgcaggttcaatttatcttttgaatgcctgtatctttaaatgtagttgaactgtctttacctctcttttcttgactatatgaaccatagttaacttttaaatcctcatctactgattccaatatcacggtcacttgtggtctgtgttagtctcctttttccttttggtttgaatatatggtgctgtctctctgaatgcatagtaatctttgaaaaccattgtttagaaaacaaaactctagagtctttaagtgatcttgagaaggttcatcctttcctctataataatatacacaattgtaggggtgtgaggaaggggagggtaatgtagtgtacttcagtcacagtctgagctgagtcaagtctaggtcggtgttctaaggtatattcactggcatcatagaaaaaactttcctcataccttcagtaacactttttaggatgtccacacctgaaagcttggttagtatgttattcaccatagagattattgtctgcaaattatgcaaaataaggcaaaataaaatttagctaagctcgactttatggaggcttcacaaatacattatcttgattgagaaagttgtagtaaaatacaaaatatctattagtctaccaaataaaataaatgtcattatttaatgtttttaattttaaagttttaggatatgaacactatagacattataaagtgccattttagtattcagcaaagttatttatgttactgtatattttactttgttgtttttttgaatgtgtaaataaaagtctcctaatccattttatatttcattgcattttattagatttacattaaaaaataggcattaaacattttcctgcttcatatccttttattgtttaaattcatttttgagggtatctggctgtttcatgatttgggttagctaaaatttgggtggtactacagttgttttcaataaagtcatttttaaaatttatcattttgtatgatatataagtctctttaaatgaagagaagtttcctggatttcatgaggctgttttcaaagactgactcattgtgaataattcagaaattgtgattagaaggatttattattaatgaagagagtatttgttattatttcctctgagcttattttttaatttgttagtaacttagttgagtacatattcatgatagagtttgtattataaaatttcccatattttagcaagtgacaattgaaaaatattactcataagctgtttgcatattcaatgtatgtaaatttacctgttgcatatttgagtacccttactttgattattctcccttcccatggagaggaagctttccatgataagtatttttaaattttttttctttgtggttattgtcttttttcctcttagaattaatacagagtaattttatctgttgtttttatgaattgtccttttgcaagttggtaagaaaaagatttcctttttgaaatctgttctatctgaataatagtacttgttttttctttttgtctattcatgataagttttatttggcatataaaccatttgaaactcgtaattctgttgcagatggtttgacattggttgtttggtggttgaagatcctgtccatggcattcatctagaaacatttacacaagccacaccagtgcctttggaatttgtacagcaggttggttttctcctttgctttttcattatgctccagagaaacttacactattgttttcagaataaaaatttgttcggtttttttgttagaaatatgttcttgattttgtttcagtcatttttcttttagtatttttctttgctttttaatttcctgatccttccatgttgttttagtaccttcctcctttgttttccaggtgtctttgaaaggtaatacattacatggttaatcattatttctctcatttttttcttgtttttactctgagttctggaaaagatttaccttttctagtgttttatgtccgcctttcgtttgctttcccttttatctcacatttcatttccactgttatctccatttcccttttccttgattgattgtcctcctgttcatctttagtgaaatcaacattagaaaccttataggcacgtgtctttaggtttttggctgaaaaatggacctaatagtgtacctatccacacagtttccaggagaatgtaagtataaatgataatccttattcctctttttttttttttttggtgtgttttctctaatcctttcatgaacaaaatggaatataaatatatacttgcattggaatctctgtgctcttaagtggtattctattgacttttttctgtcaatttcataaaatttttgttacagttgtagtttgtacattgttaaatatcatttcaaaactgcctttcaaacttatttgggacatgaagacatttgagaatctaagaaaactattgggctgtctcccaagaaaaatgcgtgtatgtgtactttcatagaactttggcatatgtgttcacataatccctaaaagtaacctctggcctacttattacagtttagaaagggggctaagaattgatgcttggaatttgaaattttactgaaacttttatttataccgtaatttcttttcataagttcaagaaaacctttttatagatattaacattacactcatttcaatatgaaggtgattaaaagactgtaagtgaatactatgcatactgttatgccaataaattagaaaaattaggtgaaagagtggattttctaggaaaatagaagttttgccatagttaagagtattaggttgaaccaaatgacgttgttgcctttgatggtcagaaatagttatatattgtcagtttcatatgattcagcttaattgaagcattaaaatggaagaactttatgtaactaaaaaaaaaaaaatcactgagtaccaatggtgttacaagtgagttctacaaaatgttcagagatgatttgctgtatgaggtatcaaaaatagaggtagagagttttccagttcattctgtgagactagcctcttttaactttaaatgaaattatagtccaaagaactaaatgtcaaaaccattggtaaaattaataaataaaattcagaaatgtattagatgaacattgtatcctgaccatgaaaaatttgtcccaagaacagcagaatggttcaacaatagtaaatttatgtaattcagtacatgaacatctgcattgaaaggagaaaaaagattttgataagagttgaaggtatttgctagaaataatcatactaatagctcttagtattagacgggtatgtgtgtactacaaaatcaaagcaaacttcagatctaataaataaaacactgaaaacgttataattatgaggatgctcctgtcactgccactgttaacattgctgtagatctggggtcagcaaacagtggctcacagccaaatctggcctgtcatctttttgtaattaagtttattggaacacacccatgccagtttgcttacttattgtttatagctgcttttgtactatagcagcagaaatgaatagttgcaacagagaatgtctggcccacaaagcctaaaatatttaccatctggctcttttcagaaaaagtttgctgacccctgtgttagatatctgaccattgcaaaggacaatttttatgttgtttttaggaatatatactggaaagaagtagacatgaaagaatgaagtggaactcgtgtgtaccagtaccaaaagatagctattacatattgctgagtaaaagtcaaaaacagcacatctagtatgatcccatttactagcaggcgtgtgtatgtgtgtgctttaaaattttaataagaatagggaaaaaggcctggaaagataacacagcaaactgttaatagtggttaattctgaataatggtatttaaagggtgttatttgctttttactttgctttttattctgtttgttttattttgtgtcatttggttttaaaatttagaagatacaaaactgtgtgcattgaaatgtcttctttttatcctcagctattcagctctcctccctgtttctttttattcattctaaaatgttttatgcttttttattgttggaattttttaatttaaggtaatggaaatcagcccttcaggtaattagaattatcagtatatattagtaaaaatctggaaataaatttcatacaatttgtacttgttaaacttaaatataaatgattcctcacccccataaaaaaccccagctgttctggatttttgccaataatatagaataccttgtttctaaaaagtgtggtccttggcttaacatcataagcagcacctagaaatttgttaaaatgcagattctcgggtcctaacacaggactagtgaatcaggagctgcattttaacaagatattcaggggattcataggcatgccataatttgagaagcacagtgttactggtgtctctgaggacgttagtagtatatctgctgtttctctttgaaatatagtgaaatactgatactgtagtatacacattggaagagagtacttagagcaggggttcccaagtgctggactgtttgcatcagattgacttggaagctattttacgtacgtaatactgtactgtttctcttggaaccagctgtagagtttccaattcagttatcttggtgtctcagttatcttagtgggatgtgagaaactggatatcgttaaaaaagaaaaaagaaacaagagctcctcaggtgattgtaatacatggcacatttggtagtcatgtataactgtatagatccgttctagatgtggctatacttctctggactatacctaacaccctaaaacagaaaaaccacatcagtcttggatatcaagcaatgagtttattcttctgtcattcctttgtagatgaataaatgatttgaataggagcaaatatgagttgggtcaattaggaatgttgcatcagtggttgatgttgtccaggactggatattacttgatacatattaacatgtgaatcacatttccagagagaatttccataattgagcaattcttttctgaatggatttaagccttaattttcagttttcctctttctggttgaaattttactactataaaagataactttagcactgattttagtaccaatcttattattaacctgaagtgacacttaatttagaactagaactcaaaccttccgactgttagcctcgttaatggggatattttttaaaaaatagatgtgtgtaatgttacattgattgtgttctagccttgtaagttgatatagttggcagcctagctgtatttctcagagtttgtcataatctatatttaaaataacatgaaacactttgaaatgtcacttatagctagttccaatgatatttttaaatgtattataagtaatatcaatttcatctttccacaggctcaaagtctaactccccaggactataatctgaggtggtcaggccttttggtgacagtgggtgaagtcctggaaaagagtttactgaatgtcagccggactgattggcacatggcatttactgggatgtcccgtcggcagatgatctacagtgcagccagagcgatagcgggcatgtataaacagcgcctgccacccaggacagtgtgagaggagacctacctgggagactgagactttcccccacttttagcttgatgttaaagaagtggttgtaccttcctaaatcgaatagtctaaatgaatccagtagtttttatcattttcctgtagcctgcaatttttctttctctagaaaggcatcatgtcattccaggagacaaaaagaaacaaatcctttttatagtcataccatttcacctatcatagtactcaaaaaagaaaatatacaaatctatttacagcacaatttaatataccagatttataaggtggaaattcatgtgcagagacatttaacttaatgccatgtacttgattattttgttctttaaagaagacattattaaagaacatgttggttgaatgtttataaaagcatgatttgctttggcttcatctcttttctgtcagtctttgactacttttgtatgtgcacacgatctcagggctggtgctgagcagcctgctcaacagtcactataagacacctacttgtcgggagatgttccacatttctgtgcatgttttcagtaatatgggccaaaataatggaattgattattttcctttttggccatcacgtacacatgtaatctggaaaatcatacctttgtcaattttaaacataacttttggcatttcccagatttatactatgaacattggggtaatacattttattttttcattgctatatgacagctaaggggcaaatgattcaagtatattttaaatcagaagtattcaaattatttttgtataatactgttcagtacttccaagaataagctctgacaacagccattgtttctgcttccactcatattctctacacattttaatacagaaatttttgagagggggttactttattgcttgtgggttagtatgtctcttacttcaattaaggttacttatttggtttgccttaagcattacttttttaactttgtgccatttggtctttactttttatggatgttttcaaagaaactattttatattcaatctagtttatttagtctactgtatttctatttcgtggaagccttttcccctcaaataatatattatatcatttttggacttatataaatgataattaaataaatttttttcttaatactgttggactttgtatatacaagttcaaataactttttcgaagatagtttcttatataaatgtaatttaatttttttactcttctatacagttctttagatgtaaaagaattagcacaatctctggcagttttataaaagctgttgaagctcttgtcctgcactgtctttaggtatcataggtatcaggtttgctttgtgttaatgccacttcaagtcattatttggtttctgctatttttttacctgaggataagaagaatgaatattaaatttgaatattaaatatatgttactttccaagcactgtataatgactgttcagtgaatatcagacttccgtgtcattaaaagtcatgagagacagcacagagaggttataggttgccttggtgtacttttgtccaggagtaacagggacagaatactttctttctttccttcaagtacaagaaggctttctctaccatttgcgtctacactttattttaaaagctatccttttctagtagtattttatcatggcaatggcatgatgacaacaacagtctttcattacagactgaagggaagcatgtccttacttaaaatagttctgctactttccctcctattataaggaaatcttacagattctaaaaataccttaatttttctttgatttttattttaccaagtcacaaatgtctttttgatgttttgagaattgttctcatagaatcacaaatactgacatttcattagatgattattttcctagaatccccaaagagcagtggcagtccatggcttggttgaagctagaaattttcctgcccctggtgacctggtaagcctcctgctcggaaccgtgtgagtgggtgaggaagatgagagatggtcagatggaagagagaaatacatgaactgctctggcctctctggttctgttcttggcccagagtttttgaaaagcagcggagcatgactgacttcacatgctcagctttctcagccttttgtttattttgttgtccttagatttccctgttgtaaaaggggcaagaaaagtaactcatcatctctaacacaccatggcagcttagccaggtagtcttagtggtggtgtttaggcataagatatgctgatcatcagtctcaggccacagtttccttcactaatcgtccagcttgagtgttctgttctcttcctgcccatttccttgaacctcctgctctagccttggcggagggagagtgctatttgcttttgttctccctctgtcttaggaaaagccatctttaatatagttcttcaccactgttggggttgttttgtgattttttttttcttccgaagaactcctggttgttattggattttgtattttaatacaaattattgaattttataagcttgtacacaatatttaattagtgtgaaaggaaacaaagaatgcaggaaaaataatttaatatcaacctcagttgacaaggtgctcagattattcaattcgggatcctccttttgttaggtttttgagacaaccctagacctaaactgtgtcacagacttctgaatgtttaggcagtgctagtaatttcctcgtaatgattctgttattactttcctattctttattcctctttcttctgaagattaatgaagttgaaaattgaggtggataaatacaaaaaggtagtgtgatagtataagtatctaagtgcagatgaaagtgtgttatatacatccattcaaaattatgcaagttagtaattactcagggttaactaaattactttaatatgctgttgaatctactctgttccttggctagaaaaaattataaacaggactttgtagtttgggaagccaaattgataatattctatgttctaaaagttgggctatacataaattattaagaaatatggatttttattcccaggatatggtgttcattttatgatattacgcaggatgatgtattgagtaaaatcagttttgtaaatatgtaaatatgtcataaataaacaatgctttgacttatttccaaa

SEQ ID NO: 9958 - DNA, 3825 bp, Homo sapiens
ttgatacatattaacatgtgaatcacatttccagagagaatttccataattgagcaattcttttctgaatggatttaagccttaattttcagttttcctctttctggttgaaattttactactataaaagataactttagcactgattttagtaccaatcttattattaacctgaagtgacacttaatttagaactagaactcaaaccttccgactgttagcctcgttaatggggatattttttaaaaaatagatgtgtgtaatgttacattgattgtgttctagccttgtaagttgatatagttggcagcctagctgtatttctcagagtttgtcataatctatatttaaaataacatgaaacactttgaaatgtcacttatagctagttccaatgatatttttaaatgtattataagtaatatcaatttcatctttccacaggctcaaagtctaactccccaggactataatctgaggtggtcaggccttttggtgacagtgggtgaagtcctggaaaagagtttactgaatgtcagccggactgattggcacatggcatttactgggatgtcccgtcggcagatgatctacagtgcagccagagcgatagcaggcatgtataaacagcgcctgccacccaggacagtgtgagaggagacctacctgggagactgagactttcccccacttttagcttgatgttaaagaagtggttgtaccttcctaaatcgaatagtctaaatgaatccagtagtttttatcattttcctgtagcctgcaatttttctttctctagaaaggcatcatgtcattccaggagacaaaaagaaacaaatcctttttatagtcataccatttcacctatcatagtactcaaaaaagaaaatatacaaatctatttacagcacaatttaatataccagatttataaggtggaaattcatgtgcagagacatttaacttaatgccatgtacttgattattttgttctttaaagaagagattattaaagaacatgttggttgaatgtttataaaagcatgatttgctttggcttcatctcttttctgtcagtctttgactacttttgtatgtgcacacgatctcagggctggtgctgagcagcctgctcaacagtcactataagacacctacttgtcgggagatgttccacatttctgtgcatgttttcagtaatatgggccaaaataatggaattgattattttcctttttggccatcacgtacacatgtaatctggaaaatcatacctttgtcaattttaaacataacttttggcatttcccagatttatactatgaacattggggtaatacattttattttttcattgctatatgacagctaaggggcaaatgattcaagtatattttaaatcagaagtattcaagttatttttgtataatactgttcagtacttccaagaataagctctgacaacagccattgtttctgcttccactcatattctctacacattttaatacagaaatttttgagagggggttactttattgcttgtgggttagtatgtctcttacttcaattaaggttacttatttggtttgccttaagcattacttttttaactttgtgccatttggtctttactttttatggatgttttcaaggaaactattttatattcaatctagtttatttagtctactgtatttctatttagtggaagccttttcccctcaaataatatattttatcatttttggacttatataaatcataattaaataaatttttttcttaatactgttggactttgtatatacaagttcagataactttttcgaagatagtttcttatataaatgtaatttaatttttttactcttctatacagttctttagatgtaaaggaattagcacaatctctggcagttttataaaagctgttgaagctcttgtcctgcactgtctttaggtatcataggtatcaggtttgctttgtgttaatgccacttcaagtcattatttggtttctgctatttttttacctgaggataagaagaatgaatattaaatttgaatattaaatatatgttactttccaagcactgtataatgactgttcagtgaatatcagacttccgtgtcattaaaagtcatgagagacagcacagagaggttataggttgccttggtgtacttttgtccaggagtaacagggacagaatactttctttccttccttcaagtacaagaaggctttctctaccatttgcgtctacactttattttaaaagctatccttttctagtagtattttatcatggcaatggcatgatgacaacaacagtctttcattacagactgaagggaagcatgtccttacttaaaatagttctgctactttccctcctattataaggaaattttacagattctaaaaataccttaatttttctttgatttttattttaccaagtcacaaatgtctttttgatgttttgagaattgttctcatagaatcacaaatactgacatttcattagatgattattttcctagaatccccaaagagcagtggcagtccatggcttggttgaagctagaaattttcctgcccctggtgacctggtaagcctcctgctcggaaccgtgtgagtgggtgaggaagatgagagatggtcagatggaagagaggaatacatgaactgctctggcctctctggttctgttcttggcccagagtttttgaaaagcagcggagcatgactgacttcacatgctcagctttctcagccttttgtttattttgttgtccttagatttccctgttgtaaaaggggcaagaaaagtaactcatcatctctaacacaccatggcagcttagccaggtagtcttagtggtggtgtttaggcataagatatgctgatcatcagtctcaggccacagtttccttcactaatcgtccagcttgagtgttctgttctcttcctgcccatttccttgaacctcctgctctagccttggcggagggagagtgctgtttgcttttgttctccctctgtcttaggaaaagccatctttaatatagttcttcaccaccgttggggttgttttgtgattttttttttcttccgaagaactcctggttgttattggattttgtattttaatacaaattattgaattttataagcttgtacacaatatttaattagtgtgaaaggaaacaaagaatgcaggaaaaataatttaatcaacctcagttgacaaggtgctcagattattcaattcgggatcctccttttgttaggtttttgagacaaccctagacctaaactgtgtcacagacttctgaatgtttaggcagtgctagtaatttcctcgtaatgattctgttattactttcctattctttattcctctttcttctgaagattaatgaagttgaaaattgaggtggataaatacaaaaaggtagtgtgatagtataagtatctaagtgcagatgaaagtgtgttatatatatccattcaaaattatgcaagttagtaattactcagggttaactaaattactttaatatgctgttgaacctactctgttccttggctagaaaaaattataaacaggactttgtagtttgggaagccaaattgataatattctatgttctaaaagttgggctatacataaattattaagaaatatggatttttattcccaggatatggtgttcattttatgatattacgcaggatgatgtattgagtaaaatcagttttgtaaatatgtaaatatgtcataaataaacaatgctttgacttatttccaaa

SEQ ID NO: 9959 - DNA, 2168 bp, Homo sapiens
tgattccatgttcttggccatgttagccataatatcctgtgcagtatgtttttcctgtgcagaggcaaaaacatattgggcatatgttcccaagcccccagcagtatgacccatactttggagtgacactcctcctaagatttatcatgattaaggagcatgggctccaggacccctaactccacctgacatagaacagttagactctcagaataatgtcattaattataccgctccattggaaggacttcctttgtgtgtcaccacaaagacatcactcagccatagctgtcttacagttcaagctcacacatggttgagtcactatgggaaaatcatgtacttattaagtcttggttatattaatgtaaccggtgtgctaaccaaccattcctggcccagtcgccttcattgtgctgactatacagaatggattcccttcaatagttcctacccccctccatagacccagtgtcttagcccactggctagaaaacaatctatgttaactggagacattgtggattggggacctaaaggccaattagatggaaaagaagaaaatcagaaatcatggcacaaactttgctggcattggtggcaagcttttaatgcttcttctttatataacactgggatccaatcccagtcggccgcccagattgcttggcatggagcaggctttagcccgcctcttcctcagtggcattatctagggaggaaaggaccaattcaaaagatgatatggaaggcagcattcccatttatgaatggcaacatctgggttgtaatactatccaataatagcaatagtaagcaacacagtcttaatgttacatttgtaaagaatatcaccactcaatttacagtttgtgtttttaatccttatgtgtttttggcagctaagaaggaccagctccaggtaaacaatacccaattgacctgtaaatcttgccagttatatcactgcattaatcatagcacattgcaaacacataatatctctactttgatgattttaggttgcatccctgggctatggattcctgttaatctgtctgatccatgggctgccacaattgctttacattttgtgaaacttcttctaactcagtttactcattgtgtccgtagaggcttaggcatgataatttttgctattgtttacttggtcacactaataatttctgttgtgatgtcctctgtagctttgcatagttctattcaaacagctcagtatgtggagaactggacacgcacagtcaaccaagggtggctacttgagaataaaattaacactgagttacaaactgaagtggcagtgttataatccacgattctatggttaggggaacaagtacaaagcttgcaattgcagcagtaattgtgttgtcattttaatcacactcatatttgtgtaaccaacttagaatataaccaaagtgagtatccatgggatctcttgtgaaagcccatttgcagggagctttcacatccgacatcacctttgatattggtgaattacaaaacaaaattcttgatttaaataaacaaattccagagtttcagccttctttagaagactggactgaattccagcaaggcctggagagcgtcaacccttggacctatctaaagcaccacattaacatcttatatatagttcttggaataatgttgttttgtctctgtcttctgttcatagtctgtaaaatcggatggactgccaatcggagaatgaaagctacccagcctggccttacattctttcacttaatacataaacaagaagggggaaatgttgggagccaaaaaggccaaagggatggtgaccaactcagcattccactggaggctacatgatcaaacagcaaactgtttatcatgaatacagaatgtgggcaaactcgcttctgtgcctgcccagaaggtttgctgagggccatcgctccctggccccggctccttgaggttatctactgggacatctagagcctattgtttgaggaatgcagtcttgcaagcctactctggaccgagcagctgacctcttcttccacaccccttctcactatctcttttgcctaataaatatggagggctgtgtaaagctcagggcccttgtccactagatggcaaggtgtcccctgacccttcttccaaacata

SEQ ID NO: 9960 - DNA, 2170 bp, Homo sapiens
cctgattccgtgttcttggccatgttagccataatatcctgtgcagtatgtttttcctgtgcagaggcaaaaacatattgggcatatgttcccaagcccccagcagtatgacccatactttggagtgacactcctcctaagatttatcatgattaaggagcatgggctccaggacccctaactccacctgacatagaacagttagactctcagaataatgtcattaattataccgctccattggaaggacttcctttgtgtgtcaccacaaagacatcactcagccatagctgtcttacagttcaagctcacacatggttgagtcactatgggaaaatcatgtacttattaagtcttggttatattaatgtaaccggtgtgctaaccaaccattcctggcccaatcgccttcattgtgctgactatacagaatggattcccttcaatagttcctacccccctccatagacccagtgtcttggcccactggctagaaaacaatctatgttaactggagacattgtggattggggacctaaaggccaattagatggaaaagaagaaaatcagaaatcgtggcacaaactttgctggcattggtggcaagcttttaatgcttcttctttatataacactgggatccaatcccagtcggccgcccagattgcttggcatggagcaggctttagcccgcctcttcctcagtggcattatctagggaggaaaggaccaattcaaaagatgatatggaaggcagcattcccatttatgaatggcaacatctgggttgccataatactatccaataatagcaatagtaagcaacacagtcttaatgttacatttgtaaagaatatcaccactcaatttacagtttgtgtttttaatccttatgtgtttttggcagctaagaaggaccagctccaggtaaacaatacccaattgacctgtaaatcttgccagttatatcactgcattaatcatagcacattgcaaacacataatatctctactttgatgattttaggttgcatccctgggctatggattcctgttaatctgtctgagccatgggctgccacaattgctttacattttgtgaaacttcttctaactcagtttactcattgtgtccgtagaggcttaggcatgataatttttgctattgtttacttggtcacactaataatttctgttgtgatgtcctctgtagctttgcatagttctattcaaacagctcagtatgtggagaactggacacgcacagtcaaccaagggtggctacttgagaataaaattaacactgagttacaaactgaagtggcagtgttataatccacgattctatggttaggggaacaagtacaaagcttgcaattgcagcagtaattgtgttgtcattttaatcacactcatatttgtgtaaccaacttagaatacaaccaaagtgagtatccatgggatcttgtgaaagcccatttgcagggagctttcacatccgacatcacctttgatattggtgaattacaaaacaaaattcttgatttaaataaacaaattccagagtttcagccttctttagaagactggactgaattccagcaaggcctggagagcgtcaacccttggacctatctaaagcaccacattaacatcttatatatagttcttggaataatgttgttttgtctctgtcttctgttcatagtctgtaaaatcggatggactgccaatcggagaatgaaagctacccagcctggccttacattctttcacttaatacataaacaagaagggggaaatgttgggagccaaaaaggccaaagggatggtgaccaactcagcattccactggaggctacatgatcaaacagcaaactgtttatcatgaatacagaatgtgggcaaactcgcttctgtgcctgcccagaaggtttgctgagggccatcgctccctggccccggctccttgaggttatctactgggacatctagagcctattgttcgaggaatgcagtcttgcaagcctactctggaccgagcagctgacctcttcttccacaccccttctcactatctcttttgcctaataaatatggagggctgtgtaaagctcagggcccttgtccactagaggcaaggtgtcccctgacccttcttccaaacata

SEQ ID NO: 9961 - DNA, 2169 bp, Homo sapiens
cctgattccatgttcttggccatgttagccataatatcctgtgcagtatgtttttcctgtgcagaggcaaaaacatattgggcatatgttcccaagcccccagcagtatgacccatactttggagtgacactcctcctaagatttatcatgattaaggagcatgggctccaggacccctaactccacctgacatagaacagttagactctcagaataatgtcattaattataccgctccattggaaggacttcctttgtgtgtcaccacaaagacatcactcagccatagctgtcttacagttcaagctcacacatggttgagtcactatgggaaaatcatgtacttattaagtcttggttatattaatgtaaccggtgtgctaaccaaccattcctggcccagtcgccttcattgtgctgactatacagaatggattcccttcaatagttcctacccccctccatagacccagtgtcttagcccactggctagaaaacaatctatgttaactggagacattgtggattggggacctaaaggccaattagatggaaaagaagaaaatcagaaatcatggcacaaactttgctggcattggtggcaagcttttaatgcttcttctttatataacactgggatccaatcccagtcggccgcccagattgcttggcatggagcaggctttagcccgcctcttcctcagtggcattatctagggaggaaaggaccaattcaaaagatgatatggaaggcagcattcccatttatgaatggcaacatctgggttgtaatactatccaataatagcaatagtaagcaacacagtcttaatgttacatttgtaaagaatatcaccactcaatttacagtttgtgtttttaatccttatgtgtttttggcagctaagaaggaccagctccaggtaaacaatacccaattgacctgtaaatcttgccagttatatcactgcattaatcatagcacattgcaaacacataatatctctactttgatgattttaggttgcatccctgggctatggattcctgttaatctgtctgatccatgggctgccacaattgctttacattttgtgaaacttcttctaactcagtttactcattgtgtccgtagaggcttaggcatgataatttttgctattgtttacttggtcacactaataatttctgttgtgatgtcctctgtagctttgcatagttctattcaaacagctcagtatgtggagaactggacacgcacagtcaaccaagggtggctacttgagaataaaattaacactgagttacaaactgaagtggcagtgttataatccacgattctatggttaggggaacaagtacaaagcttgcaattgcagcagtaattgtgttgtcattttaatcacactcatatttgtgtaaccaacttagaatataaccaaagtgagtatccatgggatctcttgtgaaagcccatttgcagggagctttcacatccgacatcacctttgatattggtgaattacaaaacaaaattcttgatttaaataaacaaattccagagtttcagccttctttagaagactggactgaattccagcaaggcctggagagcgtcaacccttggacctatctaaagcaccacattaacatcttatatatagttcttggaataatgttgttttgtctctgtcttctgttcatagtctgtaaaatcggatggactgccaatcggagaatgaaagctacccagcctggccttacattctttcacttaatacataaacaagaagggggaaatgttgggagccaaaaaggccaaagggatggtgaccaactcagcattccactggaggctacatgatcaaacagcaaactgtttatcatgaatacagaatgtgggcaaactcgcttctgtgcctgcccagaaggtttgctgagggccatcgctccctggccccggctccttgactggttatctactgggacatctagagcctattgtttgaggaatgcagtcttgcaagcctactctggaccgagcagctgacctcttcttccacaccccttctcactatctcttttgcctaataaatatggagggctgtgtaaagctcagggcccttgtccactagaggcaggtgtccctgacccttcttccaaacata

SEQ ID NO: 9962 - DNA, 6181 bp, Homo sapiens
gggagatggacggccgccgtgttttgggccggttctggagtggctggcggcggggcctgggtgtccgcccagtgcccgaggacgcaggctttggcaccgaagcccggtgattaagtaccccctctctcatgcgggacggaggctagggcagggggaaggcacgtgcgggatctggatcaggtagatgttacccgaaaacagccccgttggcctctctgagcctcggtgccctccgctgtagaatgggaccggtcgtacctgaattttcgaggtcagcccagacattgtgaggcatttgtcagaggccgcaggatttgggaagaggcgtccggagataggaatgggtggcacctcgggatggaatgactcccattgcttctccctccttgtccaggcatcagaggcaaccccgcggctcctgccaacggtcggggcccctcggggaccagcccttcgcggggctgctgccaaaaaacctcagtcgggaggagctggttgatgcgctgcgggcagccgtggtggaccggaaaggtgaggggtgagaggcacggccgcacaaggaccgggaggggactgcctcggcgtgcagttgggctctccattgaagccacgggatcagccctgcttctgcctcccactagcagcatgagctgggacaagccacctaatttgcaccctctccccgcttttaaccctactgccatgatgcagtagggttaagagtggggagaagatgcaaataactaccgagccttgcacatagccggcgctcagttacgggagttgctatactagattattgtttattggccgcggtggctcacgcctgtaatcccggcactttagggtgctgacgcgggcggatcacctgaggtcaggagttcgagactagcctggccaacatggtgaaaccccgtctctactaaaaacacaaaaattagccaggtgtggcggcgtccgcctgtaatcccagctactcgggaggctgaggcaggagagtcacttgaacccggatagcagaggttgcagtgagccgacatcgtgctactgcgctccagcctgggatgacagagcaagactcagtctaaataaataaataaataaataatgattatttatcgacggacaaaacacaggctttggagtcagacatacctaggctctgtgatcagcttgctgtgcggctttaggaaaataactgaatttctctgaaccccactctctattcagtgatttattccttttctcaactatttcttgaacatatgctatgttccaggcactgttctaggcaggctatacagtgctgaaaaagatagatatggtttctgctctcaggggagaaatggatttctctctaacgggagaaatggatgtcagaaaataaatgaacaagttactagtggtaagtgctatgcataaactaaaacagggtgttatgatggtgaggaactgcaggaggaaggcagacattagattggagattcagacctctccgtgatgtgacatttgagccaagatgatagggagccagacctgggaaatttggggacaggaaacagcaagtgccgaggctctgaggtggcagaggaacagaaagaagttgaatttggtgtggggtagttaactcatgtctgagagtcatgatggggacatgtgctaagatgcgtgagaaagtgctctggaaactctttagtgctgcataaagggttaccgttgcttttgctgatgttcgtgtgatgtatgtttcaggacctctagtgacgttgaacaagccacagggtctaccagtgacaggtatgggccggggatgtgggaagggaatgcagcggaagggggtttcgtgactgagggagggaaaagtgaaggcatgaagctttggcctcttgtaatttttctttcttactttccaggaaaaccaggagagctgacgttgttctcagtgctgccagagctgagccagtccctagggctcagggagcaggagcttcaggttgtccgagcatctgggaagtaagtggtaggggtgacaggaagctaggagtacaggcatccatctgtggtggggaaacagctgcttggggataagctgagacattttccatgggaaggtttgagatcatagaggtggatacaagtactgtgaagaagaggaagccgatggctctgggttcaaatcctcaagtacaaatggtgtgataccaggcaaagcatgacacctccctgacgctgggcacagtgactcacacctgtaatcccaacacttctggaggccaaggcaagaggatcacttgagcccaggagttcgagaccagcctgggcaaaatagaccccatctctggaaaaacaacaacaaaactttccgcgtggtggctcatgcctataatcaataggactttgggaggccgaggtgggaggattgcttgagtccagaagttcaagaccagcctgggcaacatggcaaaaccctatctttacttaaaaaacaaaataaaacacacacacacacacacacaaaaacctagctgggcagagcagcacatgcctgtagtgctcgggtggctgagatgggagaatcacctgagctcagaagatggcagctgcaataagctgagatcccgccactgtacgcaagcctaaacaacctgaatgagaccccgtctcaaaaaaacaaaacaaaacaaataccctccctgagcttcagttcccctaatggtaaaatagagaaaataatacctatgctcagtgtgcagtcatttctccatgacggtactcgtggcaggcattgctagtcgatccatgatactctttcctctaactgccatcaattaaagatggtacttgagatgaaatatttctgcagttccacaaactcatgagcttttttgtagagaacttatttaagagctaatatgtacagaatttctagtagaattctggcacatggtagacaatcgttacgacatttggctctgagttccctgggggccggggcaaaatgagaaacacattaagctacatagtcttgttatcaaagaaggggaaaccttacttgtttctcaggagttggtctaggttatagtcctggtgttagtgtttggcctgaagcaggtcagtgttcctaagagtttcctttttagtgggcgagttcaagggactttaacttgtgtgatttgtctgcttattccagagaaagctctgggcttgtactcctctccagctgtccccagacagctagtcgcctccagaagtacttcacccatgcacggagagcccaaaggcccacagccacctactggtgagaggtgctgggaggttcctagagtggtggggaggtcccagcaagccaccctgtgacctcctcctgcccctttctcagtgctgtcactgatgggatcccagctgcttctgaggggaagcttcaggctgccctgaaactggaacacattgatggggtcaatctcgtgagtccgggtctgggaagaggaggggtgcttctagatatagtacccctacagagaggagtcaggggtatggatttgggatggctggctctcctgtcccctaaaacaggcaagtgaccactgcctatactgtggccctgcccggagtctattgggagcagggagggtctgggtatagctcccagacctgtgtaaggcttgttcactcttggctggcaccacagacagttccagtgaaggccccatcccgaaaggacatcctggaaggtgtcaagaagactctcagtcactttcgtgtggtagccacaggctctggctgtgccctggtccagctgcagccactgacaggtaggtctggcaccctagccagcctttaaaactgcacttgatttgggaggctgaggcaggtggatcacgaggtcaggagttcaagaccagtctggccaagatggtgaaaccctgtttcaactaaaaactacaaaaattagctgggcacggtggcaggcgcctgtaaaaccagctactcgggaggctgaggcaggagaatcgcttgaacctgggaggcagaagttgcaatgagccaagatcatgccactgcactccagtctaggtgatagaggagacttcatctaaaaaaaaaaaaaactgcacttgagccaggcgcggtggctcacgcctgtaatcccagcactttgggaggccaaggcggatggatcacttgaggtcaggagttcgaaaccagccaggctaacatggtgaaaccctgtctctactaaaaatacaaaaattagctggagttggtggcacgcacctgtaatcctagctacttgggaggctgaggcgggagaatcgcttgaacctgggagacagaggttgcagtgagcgaagatcacaccattgcactccagcctgggagacagagtgaaacgctggctaaaaaaaaaaaaaactgcacttggcttagggaggcaaggagctggggagacagtggtatcagcagcagcctggggagcatttgatggcccccagaggtgtatgtgaccaggcccagctagaggaggcagcttcaggctagcaccccaacaggaaagaacagtccttaggcccggtggcttcagcaattaaatcagggttgcatctcatcatgagtggatcccacagccaggcagattgatagctgtgatcgtcctgacgtgttatgtgtccctctctggatgcaggggccatagtactgacctcactgaaacatatgatctgagaaagggggtggtgtttccccaaaggaaaaggggaggagtgatactgggtggcacagaacgagtagctgcccactgtctctcctggctttcctgttgcccagtgttctccagtcaactacaggtgcacatggtactacagctctgccctgtgcttggggaccacatgtactctgcccgtgtgggcactgtcctgggccagcgatttctgctgccagctgagaacaacaagccccaaagacaggtactccagcccacctgcctgctgctttctgaggggtggagggagaggtgagcatgggcagcatctccagaccttatctgtgcagcttgggactactgggaggcagcccttttggctcccaaggctgtatccgtacccacatcttggtgtgtggccttgggcaagtaacactcactctcttgggcttcattctgtccatgtgttcaataagggagttgatgtggctaatttctaaagccctcttaagtctgccattctttgagtctggtacaaagggtcaaaggcatgcgtgtattaggacaccagatgcctctacctgctctaacacactaagcccagactaccagagtcttcacacaagaactgtgccctcatgttaaggtcaaataatgggagtgggctctgcttcaagcactaagtactcagggacccaggctgttgatacccagccagatgaggggagacagtgtaggttcaagtggataaggtttttctgggccaggtgtggaagtggcatacatactgccacccacattcactcagctagagctcactcacgtctcaccaagctgtgagagggctgggaaatggagttgaggtgtgtgcctaggaggaaactgattgggtgaccccctagccagtctctgctgcagtgtgagtgcctgtgtgaatgtgcacatctgtgtgcaaagaggaaatgattaacagttgcagaacagtggggaatggaggaagcgcccgccttactcccatttcccttagagctgggtactcagctgcttggaaaatgtggggctgaacacaacgtacctctcccgctccaggtcctggatgaagccctcctcagacgcctccacctgaccccctcccaggctgcccagctgcccttgcacctccacctacatcggctccttctcccaggcaccagggccagggacacccctgttgagctcctggcaccactgcccccttatttctccaggaccctacagtgcctggggctccgcttacaatagtcctccctctgttcctgaccccctcacacacactggaaagtgagggtgggggctctgcagtcagacaaacctaagatcacatcctggacaggccacttgcttgctgtgtggcattgggcaagtaactttacctctctggacttgtgataataaaagttcctacctcatgttatggttttgaggatttgctaagaaagtaaa

SEQ ID NO: 9963 - DNA, 6195 bp, Homo sapiens
cgggagatggacggccgccgtgttttgggccggttctggagtggctggcggcggggcctgggtgtccgcccagtgcccgaggacgcaggctttggcaccgaagcccggtgattaagtaccccctctctcatgcgggacggaggctagggcagggggaaggcacgtgcgggatctggatcaggtagatgttacccgaaaacagccccgttggcctctctgagcctcggtgccctccgctgtagaatgggaccggtcgtacctgaattttcgaggtcagcccagacattgtgaggcatttgtcagaggccgcaggatttgggaagaggcgtccggagataggaatgggtggcacctcgggatggaatgactcccattgcttctccctccttgtccaggcatcagaggcaaccccgcggctcctgccaacggtcggggcccctcggggaccagcccttcgcggggctgctgccaaaaaacctcagtcgggaggagctggttgatgcgctgcgggcagccgtggtggaccggaaaggtgaggggtgagaggcacggccgcacaaggaccgggaggggactgcctcggcgtgcagttgggctctccattgaagccacgggatcagccctgcttctgcctcccactagcagcatgagctgggacaagccacctaatttgcaccctctccccgcttttaaccctactgccatgatgcagtagggttaagagtggggagaagatgcaaataactaccgagccttgcacatagccggcgctcagttacgggagttgctatactagattattgtttattggccgcggtggctcacgcctgtaatcccggcactttagggtgctgacgcgggcggatcacctgaggtcaggagttcgagactagcctggccaacatggtgaaaccccgtctctactaaaaacacaaaaattagccaggtgtggcggcgtccgcctgtaatcccagctactcgggaggctgaggcaggagagtcacttgaacccggatagcagaggttgcagtgagccgacatcgtgctactgcgctccagcctgggatgacagagcaagactcagtctaaataaataaataaataaataatgattatttatcgacggacaaaacacaggctttggagtcagacatacctaggctctgtgatcagcttgctgtgcggctttaggaaaataactgaatttctctgaaccccactctctattcagtgatttattccttttctcaactatttcttgaacatatgctatgttccaggcactgttctaggcaggctatacagtgctgaaaaagatagatatggtttctgctctcaggggagaaatggatttctctctaacgggagaaatggatgtcagaaaataaatgaacaagttactagtggtaagtgctatgcataaactaaaacagggtgttatgatggtgaggaactgcaggaggaaggcagacattagattggagattcagacctctccgtgatgtgacatttgagccaagatgatagggagccagacctgggaaatttggggacaggaaacagcaagtgccgaggctctgaggtggcagaggaacagaaagaagttgaatttggtgtggggtagttaactcatgtctgagagtcatgatggggacatgtgctaagatgcgtgagaaagtgctctggaaactctttagtgctgcataaagggttaccgttgcttttgctgatgttcgtgtgatgtatgtttcaggacctctagtgacgttgaacaagccacagggtctaccagtgacaggtatgggccggggatgtgggaagggaatgcagcggaagggggtttcgtgactgagggagggaaaagtgaaggcatgaagctttggcctcttgtaatttttctttcttactttccaggaaaaccaggagagctgacgttgttctcagtgctgccagagctgagccagtccctagggctcagggagcaggagcttcaggttgtccgagcatctgggaagtaagtggtaggggtgacaggaagctaggagtacaggcatccatctgtggtggggaaacagctgcttggggataagctgagacattttccatgggaaggtttgagatcatagaggtggatacaagtactgtgaagaagaggaagccgatggctctgggttcaaatcctcaagtacaaatggtgtgataccaggcaaagcatgacacctccctgacgctgggcacagtgactcacacctgtaatcccaacacttctggaggccaaggcaagaggatcacttgagcccaggagttcgagaccagcctgggcaaaatagaccccatctctggaaaaacaacaacaaaactttccgcgtggtggctcatgcctataatcaataggactttgggaggccgaggaaggaggagtccttgagcccataagttcaagaccagcctgggcaacatggcaaaaccctatctttacttaaaaaacaaaataaaacacacacacacacacacacaaaaacctagctgggcatagcagcacatgcctgtagtgctcgggtggctgagatgggagaatcacctgagctcagaagatggcagctgcaataagctgagatcccgccactgtacgcaagcctaaacaacctgaatgagaccccgtctcaaaaaaacaaaacaaaacaaataccctccctgagcttcagttcccctaatggtaaaatagagaaaataatacctatgctcagtgtgcagtcatttctccatgacggtactcgtggcaggcattgctagtcgatccatgatactctttcctctaactgccatcaattaaagatggtacttgagatgaaatatttctgcagttccacaaactcatgagcttttttgtagagaacttatttaagagctaatatgtacagaatttctagtagaattctggcacatggtagacaatcgttacgacatttggctctgagttccctgggggccggggcaaaatgagaaacacattaagctacatagtcttgttatcaaagaaggggaaaccttacttgtttctcaggagttggtctaggttatagtcctggtgttagtgtttggcctgaagcaggtcagtgttcctaagagtttcctttttagtgggcgagttcaagggactttaacttgtgtgatttgtctgcttattccagagaaagctctgggcttgtactcctctccagctgtccccagacagctagtcgcctccagaagtacttcacccatgcacggagagcccaaaggcccacagccacctactggtgagaggtgctgggaggttcctagagtggtggggaggtcccagcaagccaccctgtgacctcctcctgcccctttctcagtgctgtcactgatgggatcccagctgcttctgaggggaagatccaggctgccctgaaactggaacacattgatggggtcaatctcgtgagtccgggtctgggaagaggaggggtgcttctagatatagtacccctacagagaggagtcaggggtatggatttgggatggctggctctcctgtcccctaaaacaggcaagtgaccactgcctatactgtggccctgcccggagtctattgggagcagggagggtctgggtatagctcccagacctgtgtaaggcttgttcactcttggctggcaccacagacagttccagtgaaggccccatcccgaaaggacatcctggaaggtgtcaagaagactctcagtcactttcgtgtggtagccacaggctctggctgtgccctggtccagctgcagccactgacaggtaggtctggcaccctagccagcctttaaaactgcacttgatttgggaggctgaggcaggtggatcacgaggtcaggagttcaagaccagtctggccaagatggtgaaaccctgtttcaactaaaaactacaaaaattagctgggcacggtggcaggcgcctgtaaaaccagctactcgggaggctgaggcaggagaatcgcttgaacctgggaggcagaagttgcaatgagccaagatcatgccactgcactccagtctaggtgatagaggagacttcatctaaaaaaaaaaaaaactgcacttgagccaggcgcggtggctcacgcctgtaatcccagcactttgggaggccaaggcggatggatcacttgaggtcaggagttcgaaaccagccaggctaacatggtgaaaccctgtctctactaaaaatacaaaaattagctggagttggtggcacgcacctgtaatcctagctacttgggaggctgaggcgggagaatcgcttgaacctgggagacagaggttgcagtgagcgaagatcacaccattgcactccagcctgggagacagagtgaaacgctggctaaaaaaaaaaaaaactgcacttggcttagggaggcaaggagctggggagacagtggtatcagcagcagcctggggagcatttgatggcccccagaggtgtatgtgaccaggcccagctagaggaggcagcttcaggctagcaccccaacaggaaagaacagtccttaggcccggtggcttcagcaattaaatcagggttgcatctcatcatgagtggatcccacagccaggcagattgatagctgtgatcgtcctgacgtgttatgtgtccctctctggatgcaggggccatagtactgacctcactgaaacatatgatctgagaaagggggtggtgtttccccaaaggaaaaggggaggagtgatactgggtggcacagaacgagtagctgcccactgtctctcctggctttcctgttgcccagtgttctccagtcaactacaggtgcacatggtactacagctctgccctgtgcttggggaccacatgtactctgcccgtgtgggcactgtcctgggccagcgatttctgctgccagctgagaacaacaagccccaaagacaggtactccagcccacctgcctgctgctttctgaggggtggagggagaggtgagcatgggcagcatctccagaccttatctgtgcagcttgggactactgggaggcagcccttttggctcccaaggctgtatccgtacccacatcttggtgtgtggccttgggcaagtaacactcactctcttgggcttcattctgtccatgtgttcaataagggagttgatgtggctaatttctaaagccctcttaagtctgccattctttgagtctggtacaaagggtcaaaggcatgcgtgtattaggacaccagatgcctctacctgctctaacacactaagcccagactaccagagtcttcacacaagaactgtgccctcatgttaaggtcaaataatgggagtgggctctgcttcaagcactaagtactcagggacccaggctgttgatacccagccagatgaggggagacagtgtaggttcaagtggataaggtttttctgggccaggtgtggaagtggcatacatactgccacccacattcactcagctagagctcactcacgtctcaccaagctgtgagagggctgggaaatggagttgaggtgtgtgcctaggaggaaactgattgggtgaccccctagccagtctctgctgcagtgtgagtgcctgtgtgaatgtgcacatctgtgtgcaaagaggaaatgattaacagttgcagaacagtggggaatggaggaagcgcccgccttactcccatttcccttagagctgggtactcagctgcttggaaaatgtggggctgaacacaacgtacctctcccgctccaggtcctggatgaagccctcctcagacgcctccacctgaccccctcccaggctgcccagctgcccttgcacctccacctacatcggctccttctcccaggcaccagggccagggacacccctgttgagctcctggcaccactgcccccttatttctccaggaccctacagtgcctggggctccgcttacaatagtcctccctctgttcctgaccccctcacacacactggaaagtgagggtgggggctctgcagtcagacaaacctaagatcacatcctggacaggccacttgcttgctgtgtggcattgggcaagtaactttacctctctggacttgtgataataaaagttcctacctcatgttatggttttgaggatttgctaagaaagtaaatgtttattacgga

SEQ ID NO: 9964 - DNA, 130 bp, Homo sapiens
ttttttttttgagacggagtctcgctcgtcgcccaggctggagtgcagtggcacgatctcggctcactgcaaactccgcctcccgggttcacgccattctcctgcctcagcctcccgagtagctgggact

SEQ ID NO: 9965 - DNA, 10468 bp, Homo sapiens
ttgggattatctcatttaagatcttaaatttatttacatctgcaaagacctttttttttttttttgatttagggtttcactctgtctcccaggctcagagcgcagtggcgtgatcacagctcaccacagttttgatcttcccaggctcaggtaatcctcccacctaggcctcccgagtagctaggactacaggtgtgtgccaccacacccagctaattttctgtagaaacggtttcaccatgttgcccagactggtcttgaacttgcgggctcaagcgatctcctgccttggcctctcaaagtgctgggataacaggtgtgagccaccatacccagctacaaagactcttttcccacataaggtcacattcacagggtccaagtagacatctcttttcaggggaccacagttcaacccactacaactaagcagtgccacacttttcttcaggtgggtgtggcttattggatgtttcatttttaggtgaccttggccccttgctgaagaagggatagacccatgccctctgcagaagggctgaggtttaggcaaggccaattccttcccctgtctcatggcattaacgttcctatgcccggtaggtgtcattctgctagcttggcttgttctctggggttggggggctcccagtgctcggcagttctggcaatatgtccctgcgtcgactcactgccacgtgatcttgggtaagccatgcctcctctttcagactcagtttcttcatctgtaaagtgaaggctcacgctccccacccctggatcggagatgctgggggagtccctaaataggaagccccatgtctgtccttaggtgggaattctgggcctcgctgcacggaggagctgctgatggcctcaggctcttgctgtggaccctggggtacacggcctcgccccatccactcttgaccctccaacagcaatggagtcaagccccaaatacttcacttgtttctttttatttggtgttggatccaggacaagggcagtggggaatcgaagcaggggcttccctagcttcatatcccccaggcccctgcgcctctggaatgtaccaacaaggggcaggggtttcagggggctcagcctcttcatggggcaggcctcagccctgggtttgtcacagtctggccttgaatttgcctttggccttgaccttccgacaggtgctaggaattgttccgacttcaaagggcagaggcaacaaggcacttccagctgggggcctcggaggcacaggagagcaggagcctcggtgtgaaaggaggggagaagagggagatgatcagaagtctgtggaggaaggggcttctgagggagaccagctcttcccttggggtgccagccagcctgggagctgccctctgcctgtgccctccagccctgaccccgtgctcagcactgtccactgggtgtgagtcacaggtcgaggcccacctttcttggcttcaggatgctgggtgccaccttgaaatcaaggttcggtgggagggaaatgaagaccttagccgtgggtagagtcctcaaggccttgcctgtggtcgacagggccttagtgcccaccagcttgctgtgctgtcgtctgaggacctggccctggtgtcggagtacatggggagaaggcagctgggccttggtgtggaggctggggaagtggtgacgggctgtgggagcaagagaagctgtgaggccctggggtggggcccaaggtggcctagctgccctaacaggtacgtgtggaggatggggggatatggagggaatggggtgaaggccgacggagccctcccggttcctcctccagaggcagtgagaagaaaacagggtagagtccaacagacctgggtctgcatcccagctgtgccccttctgagctgtgcaaccttgggcaacttccttaaacttcctgatacctcggctggaaaatggggataatagcacctaccttgctaggttggtgtaaacactaaaggagctgggcaggtagcggtatggggcaaactgttaagtgctggacatgtgttagttctttccccgagaggtgactgcttgaaggcaaaggcagaatactgcagtgggaaaagcgtgggcgctggagagagcaacctgggcttaagtcctggcatctttgaaatcaggtcatctttgaaataagtcactctgtgaggcagagtgactactttggaggagacaatactcatttggctgggttttttttttttttttttttttgagacagagttttgctcttgttgcccaggctggagtgcaatggtgcaatctcggctcactgcaacctccgcttcctgggttcaagcgattctcgtgcctcagtctcccaagtagctgggattataggcacctgcccctacactcggctaatttttgtattttttagtacagatggggtttcaccatgttggccaggctggtctcgaactcctgacctcaagtgatctgcccgcctcggcctcccaaagtgctttttttgtgtctttgtttttaagacagcatctcgctctgtctcccaggctggagtgcagaggtgcgatcataactcactgcagccttaacctcccgggctcaagcgatcctcattagcctcgcgagtagcctggaccacaggctcacaccaccgtgcccagctaatttggctgtgtatttttaaacaatactttgtgagtagtggcttttacttgctactggtggctctttggtggggtggctgatccaggtggttgggaggggcctggagagcaggaataaatcgccttggaacactcgggtgttttgggggaatggtcttacccagggcccgggggttcttcggactcagtggcaatctgttcaagtggtggggttgcctgtccccactagaaaaggtcatggtgaaaatgcagcccatcctggtgctgggggcatcccactcccagagattggggcagaccagggctgtggcccttttcgccttgcctttcttcccctttccgggggctgaagtggtggcagtggagactggcttctcactgtgccccaggctcctggccccagtgcctttcctagaagctgacctgtgggtaggggtccccgagtccttgccttccccagagcctcgctgggtcagcagagggactgctgggcggacccccatccgccgatgacacatcgccatgggcttcttgatggtgaagccctctaccaggagccggatgcccacatattgaggcacctccacagcaggctgtgggcaagaagaggagacaaggcccactcagtcagtggtactggaatccttggcccagcgggacccagagtagagatgggtggaattactttctgaggcacctggtcaaagaggcgtttctgagctgagaaatggaaagcccacctctgagtcagtacctagagtcacagagctccaggaattgctagcccagaggaagggggaatcctagccatgtcccaccagcacccctcagccacatttccctcctaagctgcccccagcccctgctggaatgcgtgtggctccactgcacaggccactgctggtggacagcttcctgagctgagccaatcagattctctgcacagagaatttgagttacgccacccaacaagtaagaggtttggagcctgcctagagcctcgtgtgaatccaggttatggggtagcagaaactaagaaccttaaagaagacagtctgtggagagaatgaagtaacgaatatgcagaggaaggcagagagaagggtccaggagagggactcccttacaactctcagttcctatcaggccaagctgtatgtcctgccctcagctgggctccaggagagctccctgtgccttgctagcaacctggagccagttggaggtatcttctgtgccactgaaggatcctgatcagaatctatctaaacatcagaattacttggagcttgttaaaaatacagctattggccgggcatggtggtcacacctgtaatcccagagctttgggaggctaaggttggcagatcacttgaggtcaagagttcgagatcagcctggccaacataaccaaaccctgtctctactaaaaatacaaaaaaattagcaggtcatggtggcaggcacctgtaatcccagctactcgggaggtcgaggcaggagaattgcttgaacccaggagacagaagttgcagtgagccgagatcgcaccattgtactccagcctgggtgaaaagagcgaaactccgtctcaaaaaaaaaaaaaaaaaaaaaatgcagctattgccgggcgcggtggctctctgggaggccaagacaggcggatcagctgaggtcaggaattggagaccagcctggccaacatggcgaaaccccatctctactaaaaacacaaaaattagccggccatggtgggcgcctgtaatcccagctactcgggatctgaggagaatcacttgaatccgggaggcggaggttgcagtgagccgagctagcaccactgcactccagcctgggtggcagagtgagactctgtctaaaaaaaaaaaaaaaaaaaaatcaaataaaaatgtagctatcagcactcccaagtagccccagatgatgagggaaagttcatctttacagaagaatctcagctaataaatgcagaaggaacaacagaattagacatttgccattttgcaactctaataaaataggcaataatcaaaactggtatcaaaacaattagatgaaaggatgacaggaaaatgtgtaatctggacagagccaacacagcaccttacagaaaaattaattgcaaaggggagatgtagcttataatggagagaatctggtagccaccactgtaacccacagtcaaactcagcagcactaactgtgagacactctcacaggatgtgccttgtgatgccacatgaggtacgcggcatcacctctgaagtgctcttgggaaaaatgtttaacctcatcaaactatttgacctaacttctagttcctgagacaatcagctaacagaagaccaaggtaaatcacaccataaggaaacaatcagataaatccagaatgtgggacagttctacaaaacaacccgcctggcccctcaaaagatcaaaactatggggtcaaaaggcactggggctggcctagatgaaaagagacaaaaaaaaacagtgcaaggtataagcctttactatgtgctggcctaaaaacaaaaacaagaacaaatcagcaataaaagacatttagagggcttggcgcggtggctcatgccagtaatcctagcattttgggaggccgaggcgggcaaatcacgaggtcaggagatcgagaccatcctggctaacatggtgaaaccccatctctactaaaatacaaaaaattagccgggcatggtggcaggcacctgtagtcccagctactcagggggcggaggcaggaaaagcgcttgaacccgggaggcgcagcttgcagtgagccgagatggtgccactgcactccagcctaggcaacagagcaagaccccgtctcaaaaaaaaaagatatttggggggcatttgaaaaatgcagatatacatagtctcctccccaagctagacattttgggtcaatctctgggggtggagcctcctcacatccatacctttagaagctttcagatgcttctggcctgggcactggcattgggagcactgcactacaatggcaccttttccctcagcttgctcatattttcctgcccatgtatttccccgtttacattttttgaaaccaaaacgccaatatattaatttaagaaatgatcaataacaactgtaacaaaggcgaggtcacttaggtcatgtgatcagtacgttctcttcctgtaaccaaaccttgacagaaaccggaggctaatcagaagccacttaaactgccacaagaaattctatccagaactcagaaagccttgcaatcaattttctgactgattttttaaaatgctgttctattttacaagtagactccaatctctttttggagcaagacgagtgaaataattataatactactaataatagtagctaccagtaattgcctattactatacattcaggcactttacaggttatacatgatgaaactcctaaccttattaggtaataataacattagctaaaacttagtagcatttactacgtgccaggcactattctaaagtactttactggctgggcacggtggcttctgcctgtaatcccagcactttgggaggccgaggtgggcggatcacctgaggtcaggagctcgagaccagcctggccaacatggcaaaaccctgtatctactaaaaatacaaaaattagccaggcgtggtggtaggcacctgtaatcccaactacttgggaggctgaggcaggagaatcgcttgaacccaggaggtagaggttgcagtgagccaagatcatgccactgcactccagcctgggcaacagagcgagactctgtctcaaaaataaataaatgaagtactttacttatcaactcatttaattctcacaactcatagtacctaactttgtgagttaggtactatttttattcttacggacaaggagacctaggggttaggaacttgtccaaagtcacatagcttgttgtcactgaacaggaatttgaacccaaggagattccagaatctctgctcttatggctatgctatatgcctctctagaaatattatcctcatacatgaattcattttattctcccattcccatgagaaagatggtaataatatccccatttcaaagatcaggaaactgaggctcaaggaagtgaggtcaccttagcaggaccaggacttgaatctgggtcttaaactgggtctgactgcagagtcctatgctccactgcagggctgcctggaagagggtgcagactctctggggtcctgcctgggcccaacctcctcacctgcttatagatgagctcaaaggctcctgtgtcacagttgcggtccagcatccggtcaatgaccacgcgcagggtgtcagcttgcacgccagcacagagccgggcagtgactgctgtggagggtgccatcgtggggctggcgttgatctcaatcagccagggctggaagtcctccccgaacacgaagtcagcgccatagagctcaaagctggccttccgacactgcacggtgtcctgggaggtctgaagtgcgtggatcacagcatccttcatgccaggcacgatgatggtggaccaagcatttggggcacccatctcctgcaggtgggcctggaacctctggctagaccacatgttgtctggcggaagcagtggatgccgatggcatgagttctccaggtgcttctggatggagttgttgcacaggtgcactgagctggggcagagaacagaaaactgaggtccaggcccttgtgtctctcccatccaaactcagggaggacaggcaagtcctggaagcagccctgggccaccctgcactattcaacttgagatggggccctactgggaaggacaaaaaggacagaggcctgggccccaccacattcttctagggccagaaccactcttatctctcagggctgctctgagggcgctagttacgggggccgcagtagtaagtgctttgtgcatagtctcagttaaccatcccagtgtctggaagataagagggtgggtaagggtatggccccgtcatcgccaggacgtgttcaagcgccatctccacactagttgtgagaccttagggaagtcatctaacctgtgtgctcttcacatctgcaaaatgggggtagtaacagtacccacttcactgttttttatatttttcttcagacctggtgaacaagaagtatgcactgggttcttattaagaatgagatcatgtatacaaagtgctcagcactatcacatatgaagcactcaataattgatagctatgaatttcatactactgcctccattcttcagatgtggaaaccaaggcttaaataggttttcacatgaccagattcaaacaacttggaagctgcagagacagaattggaattcaggctttaacaaggctttctctcaccctagaagttaacacgacatcttagttttcaaaactcctgacctcctttcccctgctctacatttgcttccctttttcccccaacgacaaatataatctttttttttttttttttttttgagacagatccttgatctgtcacccaggctggagtgcaatggcacgatctcagttcactgcaacctccacctcccaggttcaagcaattctcctgtcacggcctcccgagtagctgggactactggcgcccgccaacacgcccggctaatttttatatttttagtagagacggggtttcgctatattggtcaggctggtctcgaactcctgacctcaggtgatccacccacctcggcctcccaaagtgcttggattacaggcatgagccactgggcccagcccaaataatcttttaacctgttagataatttcacttgtgttcttgcttgcctgtttctccctgctagaatgtaagcccttgagagctgggatcttgttttgttcactgctataccccaagtgcccagaacagtgcatggcacaaggtacacactcggtcaaatctgttggaggggccaggcatagtgtaatcccagcactttgggaagccaaggtgggatgatcgcttgagcccaggagtttgagaccaacctgggcaacatagtgagaccccatgtctacattaaaaaacttaaaaatcagctgtggtacatgcctgtggtctcagacacttgggaggctgaggaggaaggattgcttgagcacaggaagtcaaggctacagtgagccgtgaccatgccactgcactccagcctaggtaacagagtgagaccgccccctgtctgttaaaaaaaaatctgttggatgcaaggacagctggcaggatgagggcctgcctgcctgcagtctgtgtgtggagcctagcgctgctgcgcgagtcccctgcactgtaatcgcctgtttgcttgccagctccccaactaggcagggagctcgtgggaggcgagcagaggggctcacttgtccaggttcttcagggagaagggctgcgtggaaaagcggatatagctgtcgcggtagaaccacacggtaagtgggttccagtcagttaccaggaaccactgtctgaggtcaaacttggtgccaaagatgaggaggggccgctcaatatacttctgcaccacccacttgccgtccttcatcaccacggggttgccgttcaccagcttcagcatctcctccaggtggtccatgcacatgatgcctacgggggaagagggcagtcagggattggaaggtcaggcgtgggccaggagaagggccagcttgtcatgagctcttgtcccctcggagctgatagggctgagtgggtaaggctgtctccctcaatcagaacccagttccctttgggaaagccaggaatttgctaaggattttaaatttttcctaattaaccagttttgtttgattaaacaggaatacatacatggatacaaatttaaagtgctggactttttttttttttttttttttttgagacagccctgtcacctaggctggagtgcagtggcacgagctcagctcactgcaacctccgcctcccgggttcaagtgattctcctgcctcagcctcccgagtagctgggattatgggtgcctgccaccacacgtggccaatttttgtatttttagtagagacagggtttcaccatgttggccaggctggtctccaactcctgacctcaagtgatccacccgcctcggcctcccagactgctgggattacaagcatgagccactgtacctggccagtgttgggggcttttttaaagtatgtgcacctattacgttcctaccaataataaatagactataaaacaaaacaaaaattaggcagtacgaaagggcatacaataaaaaatgtatctccttgtctagaggcagccaactgctgcttccaggaccttatggatatccttctggatcatgtgaaagcctacacgtgcctccgtttcccaggattgcataaattgaagcacgttgaggatttggaatagtgctttagctgcatgactgcatttaatcctcacctcacaggaggtattatcatcctcctcatgtcacagatgagggaactgaggttcagggaggcgctaaaacctgctcaaggtcacgaagcacattagtagcagagctaggactcaaacccaggcaatttggcttcaatagacctgcactattaacttccttggcctctactggtagatgcaggtggtgaggtgccagtgcaggaagcaggagctgacccccacctcgtccgcgggacttggctcctggcttcacgatccagatgttgcgatcccc

SEQ ID NO: 9966 - DNA, 710 bp, Homo sapiens
cctgagctcaggagttcgagaccagcctgggcgacatggtgaaaccccgtcactaaaatacaaaaaattagccgggtgtggtggcgggcaccgcacctgtaattccagctactcaggaggcaaaggcaggggaatcgcttgaacccgggaggtggaagttgcagtgagtcgagatcgggccactgcagtatagcctgggtgacagagcgagactctgtctccaaaaaaccaaaaccgaaacacattaggaaaatgttcacaacaaactcaaagtggagactggggagggagtgaaaactggaagcacgcagtaaaggggaatttacttttatccctttcatttcttaaacaagaaaaacaggaaacctatacatatatatattgtttcacaatgactaattctgatggtaggaatgtgggcagtcattatattattcttttttttctgtgttcttctactttctttttcttttttcttttttttttttttttgagacggagtctcgctcgtcgcccaggctggagtgcagtggcacgatctcggctcactgcaaactccgcctcccgggttcacgccattctcctgcctcagcctcccgagtagctgggactacaggcgcccgccaccacgcccggctaatttttttgtatttttggtggagacgtggtttcaccgtgttagccaggatggtctcgatctcctgacttcg

SEQ ID NO: 9967 - DNA, 1148 bp, Homo sapiens
gcaattccttctggcttcctgtgacctcacgcaagaaaaagttgtgtactaaatgaatctgctttaacttgctctccttcctcggggatcacacctttttaagaaagcctgtcccttaccttgaagcacaaacatattctcatttttattctcccaataccttgaaggttttcttctgcacatgtatttgtttgatctgccttttgtgcgtggggtgggagttaggtaggaatcttaaagtggagagccagtttcttcccaaattactgacctaacccatccttaacccccagttcaaggccacctttgtgatagtgaagcttccacatgctcactcagccccttctgctctctcttcttctctactgtgcatgtcggcttgtacttttgccagtttctctaaagacacaaccagaggtggggtggctgtgtgtgcacaacttcaactttacatgtggggctgagtccctatgttgtatatccttgtgcaaaagcacaatatgttaattgctatagcttttaaaaaaataattaatagtttttcataatcaaattttcttgcttttttgttttttcaaaaaagcatacttttattgaagaataaaccccttatatatgtacacttatttataactatgaaccatgaactaggatagaaatgcattgtgtatattacaaaacataacaaaaataataggggtagggaggtgcagatgttggtcaaaggatataaacctgcagttctatgatgaataagttctggacatctggaatacagcatggtgactatacttagtaatactatattgtacacttgaagcttactgaaagagtaaatctcaagtgttctcaccacacaaacccaaaggtaactatgttctcaccacacaaacccaaagggaactatgtattaattagcttgattgtggtaaccatttcacaatgtatacatttgccaaaacattatgttgtatacctggaatatataattttatttatcaattatacctcaataaagctgaaagaggggattactaattcccacaaaatacagatttaacaaaaacttttattcaacaaacagtgctatgaagttgtaaattggaaacaaaagaaataaaatttcatccacagtcttctcatcaaaa

SEQ ID NO: 9968 - DNA, 2131 bp, Homo sapiens
tgcagcagaattcattccatgtcccctctggatattagactgataatttggatcaggtctcagcatgggccattgaggaacactacagccctgctgagagataaaaaggattatccactcaaggagttcacacctccgggccgacatggagaacgtgcctagaagcagacttggagggtgctcagtggtgggttgtggaatgtaagcctgaagaagcagagtttaattctacgggggtgctttcataatttagtaccctgacagggctcctggtgttggtccttagacactcctgggatggctccctggaaacatggaggaaaccttggtcgcatgacatgatacggagatgttggagctgcctggacacagttacagagggaggcattaaaaggcttcgagaggtaggcatgctagagtggactttcccactaaacctgagaactcactggataactgtattccctgcgagagcccagagaaccctctgaattaggaaagaagggcatgttctgaaatgggaggaatcagcgttcttgagagtcttggtggaagctgtgccctgtggggcagggttgactataggagacgctgttaaggaattagctcccaagggtcaatggagatgatgtaatttcaaaataagagtccaaatgggcagaattagtgtgagaagacataaagccagaaaagcagccaaggagccctgctctacagaaatctggggtgacagctaataaaccacagtgttcctaggggtaaggaaattgggctaccacagtggtattccacatatgtattccatatatacatatatatctctcccatatatatatatatatatatgagatatatatatgagatatatatgggagagatatatatgatatatatgagatatatatgagatatatatgatatatatatgagatatatatgagatatagatatgtatatctctctcatatatacataatacatatctctctcatatatatatatatatatatatatatatatatatgtaattggaacgtattaagagaagatgaatgaaagaatgatgtcagctcctcctgttctccaactcagagtcctttgaatgaaggggaaggcagattgccttgagggagaaccttgtaatgttctagcaagtatatatggcagtgattctccgagccttttcccccaaaagatcgaagactagttacctgagaaatttgtacacctagggaaggggaataactaggtctttcaaggctgttggagacggcatctgagctaactttgataccaagaaatgcatactgtcaacgtggtcccccattagagtgaggacacatagaagctccccctctaatgctagttttaaaggcccaagtctatctaaaagggcagtcccataggtggatggactgactgtggtctctaccctgtgtctgaggatatcagagtggatatgatgaatggacataaaataaggaggctgcccccctacccccggatagtccaggcagccttcattcctttatttcatttggaacccatatggcttattctctttcactgactggagctcacagtctggctattgtaacctgtcttaaatctttttctctttaaaatatcttgactttgaggcaggtcttagaaaatgactcttcctgtctcaaaatgcagtccttcattctgattgatgaattggaagcacatggctggtgtaaagaataagaaactaattataagccaggaaacagcaggagaagaaagcagagaagcaacgcttaccctgaagaattaatttccgtttagaaaatatcacagctgatgtgtcaaaggccccggtatgcaggaatgagattaaacaaatgtggtcatgaggaagaggtttctgaataatgatagagaagcttgagtctacaagaaatccagagtccagaatactgcaggggagcagtgctgggttcatgtttatctggtctcttgtctattggatcctctttcttccagaaccctaaaccttgaatcagccttatagtcctggctcctagaagagtgtttctcaaagtgtactccacggaccacctggataagaagcacgtgaggcttttaattaaaaaaaaaaaaaaaa

SEQ ID NO: 9969 - DNA, 6321 bp, Homo sapiens
aggcagaggttgaaaagataattgcagttgcctgggacatttttcagccccttctttttggactaattggagcagaggtatctattgcatctctcagaccagaaactgtaggtaagaatttcaaaatgtgcttttgttaaaattcactttttttggtcagcctactcaccaataaagtctactttttatattcattgaaatatctccagcaggtatgtgtacagtggttactattgtcacaattatataaaaagttaattatgatgtaagttttttagagtagttggttagaaaataatgcttgttcatctaagatggtatattttacacatttaatattgttccttgtatatgaaagtgacactgctgaccactacccagaaaattcaggccttaacaattctttttccaagggtaagaatattcatctagccttgtcctgaacaagagcgagaattttaaagacaactagttagttctatagtttgtacccatgggatagaaatgccttgttgttcattaattattttatttattcctacattcaaaagccatcatattaaaactctgttgattcaaaacactgcacttaaaaattaatttgtatatatgtactcattatttccttctttccttccatcacagtattcttccatccatactaggaatcccatctcccgctactccttctgaatcttgcatatggattctttccttttctcatacatcttaaatatccatgtcgcaattttcttctcttcagaatttagtctccaatctctcttatcttaaaaaaaaatgcttctcttctgacacatgctgcaacatggatgaaccttgagaacattatgctaagcgaaataagccagtcagaaaaagactaaccctgtatgattccacttacatgaggtatccagagtagtcagactcataaatggtacttgccaggggctgggagtaaagggaaattgttgtttaatgggtatagagtttaaattctgtgagatgaaaaaattctggagattggttgcataatagtgtgaatatacttaatgatactaactatacacataaaaatggttaagatggtaaatgttatgtgtattttactacaattaaaataatgtatattaaaataatatgttaaaattatatatatataaaattcctctatttcacttccccccgtctctaccatgctacctctcttgtcttcttttcggacttttcaaaagaggtcactacattcccctttccacttcagttcccatttcctccttctatacattttagcccagcttctgcctatcacacaacctgccaacctctcacacaacctgccagcctctcaccaaggtaatattgctaaatccagtctttgctttacttgatctgtcagcagcatttgctgcttttgaccctctaacactcctttatattaagttcttaaacttcctatttcccagtgctgtttgagcctttccttacaccatatgtagcttaaatgctgccctttatcaaattgctttctaactttgtgcctctggctctatataacttctctaaccttatctatactagtgacatcaactataaactgtataattccaaactatttatctctaaatcaatatatccaattgttgattggacagcaccacttgtatgtcctgttaacgttcaaactcaactaaaacttccttctcatcctcttctcaaactttcaatgtttccttctgggaatgatatcaactctttatcttgtacttcaggctacagatatttttgaatactttccaaccttgaagaaatacctttcaacaaagaaccacaaaactttcccataaaaaagccatatggcagatttacaatagatcctcccgctatgtctgtctgatgttttacccgccctttgaatttgagaaaactacttatcctttctgagcttctggttttttcaactataaaataatacttactccacgggttgtaaggactaagtaaaataatacatttaaagcttagtacagcatttggcacagagtaaacactcaacaaatgttactttttaaaaaatcaccctaatactcaggagtcaccttagctgtatcattcttaggtccagtagcatgtagcagcactactcacaatcccttgtttggcaaatgatgatgaacttgtctttatcagcaaagaattctacaggactaaatggagtagctgtgtatgttaaccagggataattgggaccagtacgaccagtacacatcagtatggtgaaacagtggtagactgccagtgtctattctgattggtcagtgcccagccagctctgattggctaattccctccatactggctcataaatattttagctatcacttctggtcttataccctgtaaagaattattgactttttgggttaaaatattgtttttccctcttttatgcccttagtttgtttatacctcacttactgtatagtctatgaattggttgtttatgtgtctttctctgactttgaggcaaagtctatacattgtacatttatgtgtacacagtacttagtttaaagcttattacttatcatttaatcatatcatttaataaattcttcttacacacatgaacaagcatggttcttgctataaagcataagacatatataacattcaaatctctacataagaattcaaatatgcttaatttctggttttaatctacagaaacaccttattttaaacaaatagcctgattgatccttaatattgattgtttttatatattcttcctaaacatttttgtatttgtaatttttaatgctttaaaaattatttctgttgatggttattttgaattagtaaccatgagatgcagtttctctcctagtattttattatttctaaaaattgaatatttcttacaggcctttgtgttgccaccgtaggcattgcagtattgatacgaattttgactacatttctgatggtgtgttttgctggttttaacttaaaagaaaagatatttatttcttttgcatggcttccaaaggccacagttcaggtatgatggataggatggcttagcattttaactgctatttctgcatgacaccttgaaatattgaataagagggcttgtttaaatttagtgaaaataaataattgaagtggatttatgaaaagagtttatcctaatctattctttaaaacctgtatttttggtatattcattccttaaatgtgatagctcattaaatttccttagatcaccagggtataagtaaaaatccagtaaatccctattctactagaaagcagtagtaacaggagagaagagttttcatcagtcggcactctgtaagtcacccaaggaaagagttcttaactcttttcatgttaatagcttccaagaagagagtaaaatagaaataacatggttcccttaatgtttggagatattttaatgttaatatgattgatgatcagttgagcttgaccagagtctttgtatgtaatggagaaaagatttattgaaaaacaactcagaaagcactttattgatttcctagattattagttggtattaattattcaaaactcactgaacttcctggcaaatgtctcaatcacttaaccgaaaatttgtgcattctaataaacgtgataaataaagctattatagataggtgcttgaatttgttgaccatgcatttgttagaatatctatgattgctaattaagttagaactgtatagattatgatttgttgcaaatgtgatgtatctttggttgtatattttcagactaattacatcaaacaacatttaactgttttgccccagattattttataattaaatattccaatttctgttattaaggaattaaaatcaagtgtttttcatttaggaggctttgggggatgtgtatgctcagcagttatattccagatttcaattatgctctttgcatttgggcattactccagaattcccctcacccctatcagactttcaaaaatgtctaaaacataatggctaagagttctataaaaaggtctctggacagcaatgtgaccagccaaactccaggagttctattatagaagggaaaggggtcattcatgtttttgtgagcaactagtagtttctgccattgtttctgatgcacatttttctttttcattgtcttagaggcttacattgttctctgtggaataagggataaccagattaattaatacatttttcccatctgcactgataatattgcattttgcctctaaaagaaactgagaattttcataatgttttccaacagatgcattccaaataaaacatttcaccaaattctgtggcaaggagttgaccaaatacctaataagatcaacttcaagttgtcaaggtgtccactattttcatgtttcatgacgtttgacaatgagtttaagctctaaagtaatatatatttatttaaaatttaacagttttcagtaggtatcactgcatgtttttcatcttattttttagttccacattcctaaagataaaaggagatgaccagtaatttccatctttattcaggaaaaatttagtacatagaactttatgttatatttaattaatattgtgattctggatttgctttgtgttttgaaatgtattttactgatatttatgtaaccctaccttacacagataagtacaaatgagtcatcagtatgttcccatgcaagggcagagtttttagatcatcagaaccagctgggctgggcacagtgacttacacctgtaatcccagcacttgggaggctaaggagggaggatcacttgaggccaggagttcaagaccagtctgggcaacacagcgagaccctgtctctaaaaaagtaaaaaaacaaaacaaaacaaaacctgcaatacactttgaaagaatactaaaacaactttctttttttttattttattattattacactttaagttttagggtacatgtgcacaacgtgcaggtttgttatatatgtatacatgtgccatgttggtgtgctgcacccattaactcgtcatttagcattaggtatatctcctgatgcttacaactttcttagttgagcaaaagaacaagcaatttgcttttgcaaacaataaaaaactcactttttttatatgtgcttatctcatcatgattccatttttacccttaaacttttataggctgcaataggatctgtggctttggacacagcaaggtcacatggagagaaacaattagaagactatggaatggatgtgttgacagtggcatttttgtccatcctcatcacagccccaattggaagtctgcttattggtttactgggccccaggcttctgcagaaagttgaacatcaaaataaagatgaagaagttcaaggagagacttctgtgcaagtttagaggtgaaaagagagagtgctgaacataatgtttagaaagctgctacttttttcaagatgcatattgaaatatgtaatgtttaagcttaaaatgtaatagaaccaaaagtgtagctgtttctttaaacagcatttttagcccttgctctttccatgtgggtggtaatgatctatatcaccaaccttaatctctctgccttttttttcaaacaccccttcatcatccatcttaatttgcataaggacatatctactttaatgtactaccacagtttacagttaatgtgggaaagaccagcttcagtatcctcttcagctaggattgccctaacttttaactttcacagtttcctgattcatatttgcccaggctctgatgccttgaattggttttggctctcttttttggatctgtttttgttgttaaacatcataatgcagtctctcattaatttttaccatcatttaccctgataatctgcctcttctccatttctccttcccttactacctttctttgaattactgtaactgattggtcccaccaaaattttaaagtacatgaagtatcttcattggttcatcctcttgccccctccagatgtcaaaaaactttatcctgccccctagctgaccacccaggttcctttatttcagtggcccatgtgagtctaccttcccctaaggagtgccctaatccagccctttttttgtttcttatgacccatatctttaggctcttcccatttctaggtgggagataggtaagtttcaaatctatgccagtcttatgaatattacattagggtaatgtgctataatgaagaaataaaaaatacagtgcttaaaagaaaataaaattctatttctgtctaatgaaa

SEQ ID NO: 9970 - DNA, 410 bp, Homo sapiens
ctcagagtcccatgtctttctgtcctgaagctctgccattccctagcttaggacatggcttaacctatttatgccagaggttgcaaaaattttttgtgaaaaatcagaccttggcaatgaccttgagcagtgggatataaataactcccacaggcttagcattctaataatggaacactaggcataaatgggttaaaaatggatctctaccatatctccattctatctctcaaggaaaatgcaagtatagcaatttatttttgaggaagtgatgtggaagttggacacatctcttttcctacatttattgggattgatcatatccggctgtgaggcagctaagtgttgtctctagctaagcattcacactcctaggaggaacggaacatcagattttcggggccagagct

SEQ ID NO: 9971 - DNA, 11150 bp, Homo sapiens
  SITE (3131): n equals a,t,g, or c
acttatgaatgtttaggaaacaacatgaaagctgaaaatttatttcactaatatacataagaagttcacaacaatgaacagacagaaaatagcagtatatacagaatttcactacttacagtacattacaatagagaaagcattttataaacagttcagtattggattaaaatcttttaaggatggctaattctattcagcaggaatctaacttctagacacccagcaaacccattcctatcagggtgagagagggcttttgctgttgctatagtgtactgtaaaaatatttgttccttataaatgaagtggaccacagcaacttctaaatgaacattatattcagtgtaagtctcatattattaaatttcagatttttgactttttagatcgcaattgtttttaaaaagcaatttaaatgtaacagtgtttactttgaccatagatgaagttttataataaaagtaaaacttttttttttctgtttgcaaaagtatgaagcattaagaagcatggtgctatatatctctttatctacatttaccctggcccctctagttctgcatctaaacagaacctgtaatgtagaagttatgattatttgaacactttttgttttccttcagcattatacaatataatttaataagatacaaatgcatatttaatgtttgttaatgaagaaagttgtgtgagggtgggcatatatctaggaaaacactactggttactggcttctcatcaataactacaaagtaccacatacctttgtttcagaaaccacccattctacattaaaatctaattcctttatcatctatggctctttgttattatagaatgtctacataggtatttatttgcctttcttcctatcaatcagatttatttattttaaaagcccttgataagtagtaaaatatttaactgcttttcttaaccatacaagtcagaattagattttaaaattctatgaaaaattttaggataacaaatctaactagagacttaatgatttgtgttaggattctgtgagccatacttcagcttattattgttctcagcaatccccagatttgattgtctgttctaccagagtaagcttaaccagttttattatctaaaatgcttaataagtgccccctccccgccaagtgatgatggaattgaggatttattctttaaaaatacctataactccaagtttctttgactagcctccttaagttcatactactactttcagcgtacttggaaaaatcacaggaagaactaatctcttagaaaacatataacaagtgactgttaacacagagccagatatgtttacaagaattctaggatgtgtgtggctggggcagcggagacccaagcagaggctgggaggttggactagccctttccagtgctgctactctgtaaaatgtatgtctcaatcagactcacaggcccccatcccaaatactcaagacatcttaaccatttatcttgtaagatttcaagtttgatagttacttaacagtaattactaaattttagccagttaaattcttgtttggatgtgctcttttagctcaaaaaacagatttgtttttctttttatatccctgaaggacatactcctcaactttgcatgattactatagttggcttcttaaggggaagtgaagaaacaaacttctgtatcacaatgacttactatgaataataattgtgatccatgacagatacccataattacactgtatggctacattctaaaaatataccacaataaatacttggtatttgtagagctcaaagcactcttttacagagttttggttagtttggttttttctttttttttttttttcgagacagggtcttgctatattgcccagaatggcctcaaactcctgggctcaagcgatcctcctccagcctcccgagtagctatagtttggttttaatcagtaaatatttatttagcacttggactgctctaggcactatagggtacaaaattagttgtattttatcctctcatcccagctgtgaggtaggtttgctaaagctgtaataccactaagcagttttttcaatactgttcccaaggacagataatattagcaaatcccagaagcatttctaaacacttgtaggaaaaataaagtcggacttaaaatttttagtatctttgcctttttttttttttttttttacataagttttacaagataatacatttttacagtgacctgatgtggatacaactttgcaacttggcaaaaagcaaatcttaacttacattataattaatttgctgcattttacacatctctgattctcaattttggcaagtacaacaggttaagggttctatttagtgtccccttctgatgaatatgatgatcttgaacccattcttcctcctcaagcacggtcatcctcctctgatggcaacagcagaacctctgggaaaggaacctttcggtatccagaactcccaggtggcagcccagtgtgggatttggagcatgacaacaaaggcattttctcaacatttagtaaaggagagtggggtgttctatacgctactgatggggactgtacatgaacacatttaaattgaattacaacaacattttagataggaaatatagaatcttataagaacataatctaaattataaccaattttaaatagcaaagtttaacaataaagctacttaagtgtttgaattagaaataaacagtaaaacatctgtattaattataacagagttgacatttgtttatattttatcttcagtattaaccaaaggagtggaatttagccagggttgcactttttaaaagttgtatatacttttatttattttacaaaaggaaaaaaaaagacatacttttcccataaaattccaggtcttactatgtaaaataaccatgcactacttcatgttataatcataattttagactatttccagtaggtaagtgtcataaagaaggaagagatatggcttccacagcttcaatgaggtgtaaggctagaccatattgcccatgtttttctggtaaaagctcaattactttatttactagtttagctgttgttgcaattggcacttcaggtgttttgaaggtcntgggggtcctgcaaatgggacacaaaaataacctattatagacaactaaacaataattgttattgacttaagagttattacataaaaatgcttttctttgtaactaggtgaattaaacttgtcaaattttcttcataactgttattaagcaggcactcaagaaaacatccaatgaccttttgcctgatctcgttctattgtactgaccattgctttcagccaagtacacagtgtgggtggaagtctggcaagcagctccattccttcttttgtctgggtgtggagaagcgcatgagccagcctttgccccgtgagcaccagcagctgagaggcaaggacctctttgtcatgaacctgtagaatggcctgaagataggaacatggagaaataatacagtcagagtgagcagatttgtttattctataggaaaggggttgccagtgaagagattctagttgatttttgaactgtggccatttatcttttgattgtatacaaccaaagataaatccaaatcaaacttagcatttaaacccaaatttctgttccttggttaatttttttttctctcatcacctaatctttcaattcaatgtggctactcagtgtgctgttttcaaacttttggcaaataaaaggagtttcatgtcatgtctatttgaaaccctctaatggcttttttttgttgttttttgagatggagtctcactctgccacccaagctggagtgcagtggtgcaatctcagcttactgcagcctccacctcctgggttcaagcgattctcctgcttcagcctcccaagtagctgggattacaggcacatgccaccacgcccagctaattttttgtattttcagtagagacagggtttcaccatgttgcccaggctggtcttgaactcctgacctcaagtgatccacccaccttggcctcccaaagtgctaggattacaggcgtgagccaccacgcccagcccctctaatggcttctgaatacacttagaataaccatgggctccgagacctaggatagggccatggcccgggccagcctccctgcctcatgccatacttctttattccttgcttactatgtttggtcagccatactggcctttctagtcctggacctagtcattctagtccccacctcagggcctttgtaattcttgtctcaagcactgttcccccagtttctgagtagctggctgctgcttctccttgggggctcggttcaaatgtcaccttctctgaccactctactgtagtggctcctgtttattcatatgatcctgtttctttctttttcaatttaaaaataaatatttttttcctttttagagacggggtctcgctatattgcccagattggtctcgagcttctgggctcaagtgatgtgccacctgagccttccaaagtgctgggattacacgtgtgagccacgacacccggccctctttattttcttcatagcacctatcattcaatgcaaaatttagcatgcttttctgctcctaccagcagactatcaagtccatgatgaaggaaccttgtctgttttgtttactgctatatccctgtgcgtagggcaggcctggcacactgtaggaattatttgattataattttatgttttaaaaaatattctattgttctatttttatacctagatgttctaataaaaggaagagcaaaaggcttcattggaaacttaactgattctttattccaactatcaattttataacttgagcccaattaacattcaaagggtcatgattacctcttctcctaagtggtcaactccatagttgtatagttcccccacataatgccttctaacaacatcttcactaacttgaaggtgatgggctaaatccacagctagagctggccaatcttggtctttcccaaaaggagtgggtgtggcctcttctgtgggatctttgacctttgtggctgaatgttgggcctggacagctgcactgacaactttcaataagaacttgaaaatggagaaagagatagagcaatgcattgttactgtttcattttaaaatacctaaaccaagtattgttagcttttctgtcacttatagtggcttttccattaaattgtttagttatcaaaaaaggaacacatcatttaaacaactagctctcaagaatactttgaaattggtcttttttaaatattattattattttttattattatactttaagttctagggtacatgtgcacaacgtgtaggtttgttacatatgtatacatgtgccatgttggtgtgctgcaccccttaagtcatcatttacattaggtatatctcctaatgctatccctcccccttccccccaccccacgacaggccctggtgtgtgatgttccccaccctgtgtccaagtgttctcattgttcaactcccacctatgagtgagaacatgtgctgtttggttttctgtccttgcgatagaaagtagtcattcttttcaaaagccagctagatttttcccttatgtttttttttccaagaaacaaaaacaaaatccaatagctataatttacctgttgtcgtacagaaataaaatttggatccatttccccactaggtaataactgaattgaagttaggtctttgaaaaatgcattttttccctaaaaagaaagagagcaagaaaactgatgagtgtggattattaaggggggagagggagaaagatttgtttaaaacttaataataacttatggttgatttttatttctccttgaacagtaagattttagaataatttttataacaattatctagtatatagtagacagcctttaagatgaaacccagtgatcccctcctcctggtattcgtgtttcctatagtctcctctccttgcatggaggctgatgacttgcttctagcaacagaagcaggtagaggtgatacatgttacttccaagaccacgttccaaaagactgcttcttctgccttgaggcactcatattcactctcacttgttctgcaggaagccaggttccgtgttgtgagctgctgtatggagaggcacatgtggcataactgaatcttgccaacaattgtgcttagaagtgaatcaccctgtccccatcccagttgagctttcagatgcagcaccttaactacagcctcatgagagactaagccagaggcacctagataaggagaacacagattactgacccacaacaactgtgagataataaatatttgttattttcagccaagttttgggatgatttactccgcagtaatagctaagtaatacatatatgtaccctgaatcctttttttttttttttttgagacagagtctcactctgttgcctaggctggagtacagtggtgtgatctcagctcactgcagcctccaccttcctggttcaagcgattctcccacctcagcctcccaagtagctgggactacaggcgtgtactaccacgccaaggctaatttttttgtatttttagtagagacggggttttcaccatattggccaggcaggtctcaaactcctgacctcaggtgatctgcccgcctcagcctcccaaagtgctgggattacaggcatgagccaccgcgcccagcctctgaatccttttaaaaacacttgttgaattgtttaaaaacaccttatttaaaagaacagatgtgtgtctaaagagtaaaaacagaatatcaggaaacaggattttagaagttccttggaaggaaatgtaatacagagcaaagaacattggcctttaagttgaaagacctgggtctagtccaaggctcaccacttccatccaggttgccttgggtaaatgacccacaatcttgggttaccgtttcttcttctgcaagcaggtcatcctaggtatcttccaatgtgccttccatacctaatcatctgtgattctaggtcatctgttgtgactgccaagtagattaaagctactcatcctttagtgataagaaaaaccggacttacagggcaacccatgacattttggacatcactgagagaagtatttaaagatttagcatacactcacaatctgttactcgatagttcccacctggtggtcctagctatagcatctataatagcaccacttattatttactacattccagatgctgctaagtacttcatgttgaatacaaggaacccttacaacaaccatgaggctggcactgctactttctgaatgagaaaactgagagtaagaaaatctaaataattctagttagcaaatggtagcaccgggattgttttcactagccactcaaccatactagctctctgcagatgagtgtcacccagctgtctcaggtagtcttggcatgacatgggttgaaactaaacattattgtgctaatccaattctggatgtgttctggtttcacaaaggccttttctgatgggaatactgagctaggcactttattttggtatttctttctcttttttaacttttaagtactcttatcgcttatattctcaaagatatactaactcattcaaaatctatacttttttttttttttgagacagagtctcactctgtggcccaggctgaagtgcagtggtgtgatcttggctcactgcaacctctgcctcccaggttcaagcgattatcctgcctcagcctcccaagtagctgggagtacaggcacacaccaccatgcctggctagtttttgtgtttttactagtgacagggtttcaccatgttggccaggctggtctcaaactcctgacctcaagtgatctgcccaccttgtcttcccaaagtgctgggattacaggtgtgagccaccatgactgtccgggagtctctcatttaagggtgaaataataaacccactttcccacaagcctaagctgtgttctctaacccagcttctatcagtaaaaagctaagtaataatgttgacgtttttgtctccaacagtttgtcctgtctctcaaaatttgacacctgcgtggggaaggaaaggattttactatccactgcagctaaactgtgaaggttacaatagaatatgtaaaaacatattctactcacaaatttggacttgatcctgcagaggagccaaaaaaaatcttaggtatagaactaatacaattaaacctgtctcttaggaagacagctcttgcagcatgggactggagagagagaaactggaggcagcgtgattaagaaagggctgttgtaatagccgagggaaagatgattatgcctgaactagggttatagtcatggagagaaacggacaggcatgatctatggcagaatttacaagaatgaatttacaatgaagaaaattggcttgaagtaaggaattggtgagataacttcaaagtttctagtttttgccagggcaaaaatgatgacatcgttaataaaataaccaagtcagggaattcagaaggaacagcaaatttaggttaggggcaggatgtgggtattggtttgcagatatattttagatatgaggtgtctgaagtcctataagacactcaaagagagaagttcaaaagaaatgaatgcctcaaactctagggattggtcaggcctagagatatataagagggagaaaatgagtctgtccaggaataatatggagaatgagaagagcagacagctgagagggcaaaactccaaggggagcagtacagaaggtaaataaaaagaacggaatcaagcagggaatgagggagttggaacctcacaccaaattataccagtcacaaaagtactggacagcttctattaaatatgaaaatccatgtgtctgctaagcctgcaactccaaaatagctctgaaatcctgtgaggtacttaccttactgtcaaaaagtgaaagtggcttcacggtcttcagagaaaacctcatgactgcatacaagatggagcacaggatggagtggtgctccaccagtgggtagtggatgtgcttctgttcaagggccagttccactatggagattggtccttccacggagagccacgcatcctcagtatccagcacaggcacctgtatttcatccctgctaacatctgcctaagggttttgagaatggaggactgtgttcagtaatggaaaaataatagcttacaaatatcccaatgagtttattagcagcaaagtgcaaattcatattgcacactgtcccaaattgtaataaaaaaacacaaagtctaatttcaataagaatttaataagaaaacatcactaccttctgggctcaagtcaaaatttagaaatgaatgaatgaaaaacaacctcattaaaatagtcatttattaaatgcaatggtttgcagaatatgtaatatcttaggagcagttcagaatgaaaaatacacctcttttacctccattaagatctgaagaagatccaaacaggagccgaggaaagatgtcattgctgtgtcactcattcccacatcctgttttttaaaaaggaacgtaattaggccctgcaggaaaactgctatagttactgtcagccaaacaagaaccaggatacaatacactggttcagctgactttccacactgaatagacaggcaagaatttgaaagtcaaggcattagcatatttaagttccttcttttagatttactgtcaaccaattttaaagtcaagctttacaaagtggtataaatattgacttttaaaaagtagtgttctttgtgtattgtaaagaaacagcctcattagttactatagatggtggcacttctgagctcactgttcagcttgctaaggcatctggtagccaaataatcgtggtagatggaagatacacacatgagaatctaacctgaaaagctccaagaaaacagcctggtctgctttcagagcgtcttttagagactgaacccaaccctctgagcaaaactagaatcctcaagcttgagaactaaataccagattgatgctgtgagcaacagacgattctcaatgactcctttaaagggcttgtccaagggaccactgcatttgtgtataatctttttttttttttgagacagagtttcattcttgttgcccaggctggagtacagtggcacgatctcggctcactgcaacctccacctcccaggttcaagcgattatcctgcctcagcctcctgagtagctgggattacaggcgcccaccaccatgcctggctagtttttctatttttagtagagatggggtttcaccttgttggtcaggctggtctcaaactcctgacctcaggtgatccaccagcctcgcctttccaaagtgctaggattacaggcgtgagccaccgcgccctgccatataatctttttaaaaccaacaatctataatttcctcacatccccaaagcaaataattcagtgtttgtgggtacatgcacacacacatgcatgcacacacacgtacacactctagtcatacaaccattctcaagaacacatcagaaaaagtcttcaacaatggaagctagtactattaatttcttgggtcaaatacaagtcccatatccatggattagaatattagttaagactaatgttgtatttgtatacttatgttattatatatatcatatatataggtagatcaaattaactacttcatttgaacctgcttcaatttgatgttggatgcttccattataaatgtctaatcggaatatgcagcaatggtagcatgttaacctgttcacagttcaaagctgaacaacatcttataaaaacctagtttaatatgctatctaacaatctggaaaagtaaattaaaattggccatagttcatgaccagtttccttaatgcagtattctcttttcatttttcttatctccttctgatacgtcatcacaatgataaaaggcaaagttcacctatacagttaataaagtactacataaaagtgtggaattaacaaccataattctagctatgggagattcacttacccttcggcataacctatcttttggtgattttcc

SEQ ID NO: 9972 - DNA, 560 bp, Homo sapiens
tttataggtggtgatattcgtgaagagtcttcctataaagtaattgtcatgccgactacgaaagaaaaatgcccccgttgttggaagtatacagcggagtcttcagatacactgtgtcctcgatgtgcagaagttgtcagtggaaaatagtattaacagctcactcgagcaagaaccctcctgacagtactggctagaagtttggatggattatttacaatataggaaagaaagccaagatttaggtaatgagtggatgagtaaatggtggaggatgggagtcaaaatcagaattatagaagaagtatttcctgtaactatagaaagaattatgtatatatacatgcagaaatatatatgtgtgtgtgtatctgtggatggatatatgtatatctcttcctatatatatccatagtggacttattcagaacatagatatgtattcagcttgtcttcaaatacggccaagcagaaaatgttttatattttataaatcatcttttgactctgtatttaaattctatgatactgaaaataaaggcattctggaaaaatactga

SEQ ID NO: 9973 - DNA, 2832 bp, Homo sapiens
ataatatataaaaagtaataaatataataataaagttttttaactttaaaaataaaacacgctttaaaagcaactgctacctcccctcccccccactaataaaattctagtatgataaaaatgaataccctgctttcattggaaatttctagcttacactttctctctcactccgtttctccttttctgtctctctctactccttctccctccctccctccctctctctctctgtctatatcaattttgctttaagaggaaactgggaattaaacaaactgggatcaatgatgtaatgtatctttagtactttggattttctaaacaatttcctgtagtttctgagagttgtattttaatcacattcatagaaactcagtcagtctggccaatggaggagaatagtatagtcctgctctttcaaattatgttaagcaaaatggctttcttctctgggaatgcactgtactcaaagatataaggtattagactagaggctcccttaagttacggctagttctaacgttctaaagctctaacacagaatctttcttctgttggattgttagttctttgaaactagacagtgtgttctaaatactaaccctcataataccctgaataatacagttagtatgttaaaaattaattaaaagaatggtcatcacaactttgaattccatggtacactttccacaaatgcttctgtttgtaccatgttgattagtaatgtgaccctttctttcccatgtttagtgatttagaatctagaagagaagtaaaaaaagaagaaggtgaagcttttgcacgagaacatggactcatcttcatggaaacgtctgctaagactgcttccaatgtagaagaggtaaataagaggccctttaaaatcttcatctttatacttaatagaaatgttttatatatcttcattttacttattatttaagtttttagtcggatggtctttgaacatcataaagtaggaaagtttcttccctttgaaatcccttgtaacattcaccttctgtcagactcttaaatcatattgagccttctaaagcctgaatgttttcttacatttttgtacgtattttcactccctccctttttctaaacaatttcctatagtttctgagagttatattttaatcacattcatagaaagtcagtctggccaatggaggagaatagtgtagtcctattctttcaaattatgttgagcaaaatggcttctctgggaacccactgtactcaaagatataaggtattggacttcttcgtgttgcatggtagggaaatcttttttgtgttgcatgggagggaaacaaggaaccacactaatgaaatttggaaatgtttcaagacagcagaacgtttgtagctatttatatccacttctgcttatttttttaattttatttatttttttaactgtcaatatattaccacatcaccacttctgcttaaagtattctattattgctgtgtaacattttacaaagcatgagaattctgtttcatctattgatgaaatttgtattatttcagttatttccattgatgaacctgaactattggaacttttctgaacacagtgtattcttttatgctctatgtgtttgtgtttggaggtagtatgtatatacatattataaatagatgattacgtagttgatcctttctaaggtaaatgtattactatactgttattttataaaaagaggtaatgaagctaagaaaagtagtagtttatccaaagtaatacttagttcccgatttctagataagaacagcttataagagcaactacagaaagtagttctaaaaaacaaatgagttaagaatcactgccgtaaggataacagaggtcagggtcctgggcaacagctagcatgtgccttcaatgtagtaagcagtcagtaaatatttattaagaatgatacttggagctcttctgattaacccttgaacctaaaaattgactacagtaattctacagcattggtattttcaccgaagaattctttcttaggtaaaatattatacagtcatgtgttgcttgacaaaggagatacattctgagaaatatgtcaccaggtgatttcatcgtcacgtgaccatcatagagtgtacttacataagcctagatggcatagcctactactgcacctactacacacttcccttagtagaccttggtgccagaggaatgacacagtgatgatttcccttggttttctttttgccacatacccgagactgggtgctagagaaacaggcaacctagaaaggtcaacaggcacagaaaaagaaagtcttctagccagagaaccaggaaataggcaggtcagaacagtgttcgcaagccagaacactcttagaaagtaaccattctactgtagccaaacatcacagaaaaaattgtggctctgcttccacaatccccaggcagtaatgaagtagcaccctaccaccaccatttcccttgttggagtggagtgagaggaagccaactaaacagtggtttaaataagacccagagtctcataacatagtatctaaaatacccatgtttcaatagaaaatcattcatcatacctagaaccaggaagatcttaaattgaatgaaaaaaagataataggtgccaacagtgaaatgacagtggtgtttgaattatcttacaaagattttaatgcagcaatcattaaaatgcctcaacaaacaaggaacatgcttgaaacagaagagtcttagcaaacaaacaatctgagcaaaagaaatgcaagataaaaaaaagaaccaaataggaattttaaaataaaaaaaaa

SEQ ID NO: 9974 - DNA, 120 bp, Homo sapiens
ttattatactttaagttctaggttacatgtgcacaacgagcaggtttgttacctaggtatatatgtgccatgttggtttgctgcacccaccaagtaatcatttacattgggtatttctcc

SEQ ID NO: 9975 - DNA, 51402 bp, Homo sapiens
cagttccttgttcaaaatgccaagaacctggatgactcatagtcaagaccctccaccagtaacatatattggcgagccagccaggaggtaagcccaaagtttgggatttatttttcttctcttgatttcccttttcctctctgctccttacaggggaactcttttctctgtctctttttccctttccagcttggaaccctcggtggacagtgcctaagcacagaggcaaccacaggtttctaacagggccactctctggtgaaactgaaaggtttctgtgtgaaagtgcctgaccaccactgcccaattcaggtgagggacctgagtccttttccttttttcagtctttcagtggccgtttcctagtagcttcttggtaattgagggaaactggccgggaccactctctactgttacctgaaggccaaggagtgaacctgggatagctctcctgcccagaaggcggaaggactcttttgtatctttttgagttatagtccctgatccctacctgtgatgcaattggcagcagaagctcgtccagggtgaactcacacacatttcaggcgacttaaaccctctttcttaagctaaattctcccataaagttggcctgtaaggacaaaagataatatctcttagatattttgacctcccttctcctactgaatctattgactggctgaggacctttgggacccacaagctttagaacacattctacatcttggacctccacttaagggagcttggtggtcattgctttggcatcagtttgcttgccctgaaccccgtagaaattctatatatcttttatatacccaatataaacccaatcttttatataacctctgcaccatttcttcatggggaatatcccactagccttggtaccgttaactctgcagtgttcgggaacctccttagtcttgcaaggaatgcaggaagatatggcctatctaaattggtaggaagctagaagctgagaccttcatccagggacaagagaaaagctcatattaggccattgcctctggagggaaaacatacaaagcaacactggtgcccacctaaggtcagagatgtctgacacttttagactggacctcaaagggggatgcctaggggatccaactccagacctcagcctctccaaaggggatgccctaggcaaaggttctcaggtctagtactaaggcctccttagaattgtctctctcttgcagaccactacaggaaacactccatttattccacctgacttcccacttggctgcatcctcaaccattgaaatgaatttgaccctgataatctaaggaggaaacatttgatattcttttgcaataatacttggccccagtattgtttggaatctggagtttgctgttgaatgggaaagcaggatgacgttgcatgtatccaggctttggtgctgctgtcctaagaagggtcaggcctagtcagcatatggtgctctcctttggtgctatttggctccagtgtctttggagtctgaggaggtttggcctttaaaaatcaaactgccaccggaactgctttaaaaatgtttggttcacagccttcactggattacctattggagcaaacaaagtgtaaccatgtaaaacctgtgagcttgtattgatatctcatggctagagttccaaggtaaaagctattggatcttcgtttgtgtgtgtgtatacatgtctagatgtgtttatttgtatgtacacttattgttatatgttgtgtcaaccaaatcagcttataaataaaaaagcactcataaattaaataaataagtccaagcaattttcaagttcatgtgacttaagtaaatcttcattaaatagctggctttaaaattattggtaaaatgaaaatagaaatatcttcagaattgtcagcatacatttttgtctgggttttatatttgtctttgctagaaatgttgaagtgtcagcatttggcatagaagattataaagctattaacccagccaaaacaaaatggccttagtttatgtggcttctttgacaaatgagactaatttaatattgttagctaaatcttctgggttattggcaaaaacacctatgtatttaactgtgaggttcttatttaggtgaacacataatgttcattggctattaaaaatggttaacaaataaataactaactttaaatgatggtgtctaatatctcagttttcagaagtaatctagataaactgttaaaaatgaaagacttaagtacatgtaaatgggatgaatgattaggtaaattttgtgtaatttaaaatcttaaaagtatttttgatgcccattggatatctcagtcatttccaattaagaaagggttatgatagggaggaatatgtttccaaaaattgtggaattattctcatctataaaatgctaatatctgatagtttaggattttttgcttcctaaggtttcactaaaatttaaggttactaagatgatatggtttggctttgcatccccacccaaatctcttcttataactcccataattaccgtgtgttgtggggagggatccagtgggtgagagatgattgaattatgctgttctcatgatagcgaatgggtctcatgagatctgatggttttgaaaatgggagttgccctgcacaagctctccttttgcctgctgccatccacataagatgtgatttgctcttccttgccttccaccatgattgtgaggccttcccagcatgtggaaatgtaagtccaataaacctctttcttttgtaaattgcccagtcttaagtatgtctttatcagcagcatgaaaacagactaatacataaggatatgaattatagttaatatataattctgtatacaaaatatgccaaaaaatgtgttattggtgagaaagaattattttgtgtagtttggaggttatctgaaagttaattcaaattatggactttaaaaaaaagagttatttatgaaacaaggtagtaaggaaccagtaagtaggggagagatgtgaagaaagttatatatatgaagatatgtttttgtgagggaagattgtagagatggtggctttgtaggagaaaagatcttgtacgataaattcttgtcctaacgtaaaatgactggttgtttaaaaagaaagatgtttaggaaaactcagaaagtccaagcattttgtagatggtctgggtaagttatgaaaagaattcatgtaagaaaaggataatgtacctttggtaaaaagcatgggaatgtggatttcttgcctaagtttagagggtgaaaggatggttttaagtgagataggaataatctaaaaggtttgaacaagttgtggaaggcttatgaaaaattaattgtaaaagagattctgtgtgtgaacatattggctaaagttaaaggggaagactggcaattagacttcacccatatgccagtgtgcaaagtatacaagtttttggtagtagtaatagatacttttactggctgggttgaagcttgctctatgagaacaaagaaggctcatgaagttgctaagcttcttttaaaggaaataaatcccctagtttgggttaccccaaagcctctaaagtgataaagacccatcttttagaactcaaggggctgctaaggctctcagaatcaaaaattatttacatgggaaagtagaaagggctaatcaagctcttaaaatgggtgttagctaagctatgttagaaaacatcagaaatttgggtcagcttattgcctgtagccctcttaagaacccttaattctcctagagcaaaaattaatatgagctcatatgaaatgttatacagaaggccatttttttttgagatggagttttgctcttgtcacccaggctggagtgcaatggcacagtcttggctcactgcaacctctgcctccctggttcaagcaattctcctgcctcagcctcctgagtagctgggattacaggcatgtgccaccatgcctgactagtttttgtatttttagtagagacagggtttcatcatgttggccaggctggtcttgacctcctgacctcaggtgattcgcctgcctcaacctcccaaaatgctgggattacaggcatgaaccaccgctcctggctggccatttttaaataatgatctaattactgatccagaaacagccagtttagtaacatgcgtaattaacctgggacaatttcagcaggctttacaaaagtttagaactcaaagactccccacaccaggaactaaccagcaacccaaaatcaggccaggagataaagtacttgttaaaacatggaaggagggatcacctgctgaacaattacaacccaaatggaagggactattttcagtggtactggccatgccttctccagtcaaagtactgggaatagttagttggatatgtctttccagggtccagcctgcaataactgaagcccccagacctggaacctgaagatcccatcagccactaaacctgtgaacctgtagaagacctgaagtacctgtttaaaaggcagccaaaagataagtaaattcctatcaactttccttggtgtccttcttgtatatttactgtaagctggatataatagtagccatttttatatttttacaatttaattgctttcttccaaatggattgaatcacttcttttaaagtgttttaattaatttttatctatagaacaaaataacaaataagtattttttttttataccataatggtcacccacagcctgtgtatactaagaccatgcatactgataatcagctttattttacaaaagagtttcgctttacccctctggtaattaatggattctgggtatttattaaaaactttaacacaaagactgttaaataccaccagtccagctttggcaaggcactgttggctttgtttatctccatcatcatccaaacagactaccaatcctgatcccagcccaatcttgggcccttgaaaaaataacttaacatcctaactacaagggagaaactcctttcaaattaatgaacctggctgacttatatagccttaaaattatggaaatgacaagggttacaatgtcagaatgagcagtaaaccttccccagtcctatcagagcaaactttctggggttgcatcccctcagaaacccatttggggcccaatctcaatgcacatatcagtgcgcaaagcactaaaattccaggcaacactttgtattgagagaagccaaaattttggtcccgccctgggacatctaaagtcaccaatgtaactacaccatacagattaaaccctcacatgatcatgtaagctatgcagttacccaagctgcatcatttagaaaacctgtacagtttttatggaaaccatccctagtcaaggacactttaaatatatagtctaaataccgttaaggtaggcccactagctgtgttcacattttcccttggccaccttaccagggactttaataacttgggaaagtgaaaacaacaagctaacccacatgttcaccatagaaaacaattttgtcttgaaaaacaaggactctttttcccgtgtgggaccagttcctacttatgttttaccagccaattggactggaacctatacagttgtttatttagcccccgaaattaatatagctcccaacaaccaatccttcattatacttttaactgcaaccaccagacacaaatgagccatccaactgataccactttcggtagagctaggaataacagcaggagtaggaatgagagttagcagccttgcagtttccctatcctattaccaatgcttgtccaaggattttatggaaagcttaggtgacattgcccaaaagtatcatcaccttacaaaatcagatagagtctttggcagtggtggctttgtaaaatagaaggggactggatctcctaaatgctgaagaaggtggcttatgtctttttcctagaggaagaatgctgtttttatgtcaaccaaacaggattagtaagggatgccacccaaaaactagccgattggtaccataagatatgacaacagctgtctgagtcatggggcgcctagtcaaaatgctaatttggggctcacatctccttcctctggccagtccactattaattattatacttgccttggcttttggatcatgtttgttaaatcttttaaccagatttatttcttcttgcctagagaccattatgataatgcagcagggccaccagtcagtttcagataatgatgtcaaccccggccaccaagaagtaaccttgtctccactagacagagcagggtgagagttctgtaatccccagtaggtagggactgtgccccaagtcagcatgaagtagttatggaagaaagaccatgggtccctctgcctcccagaaagatttatggggatcacatctctcaggggaaaatgaggcaggagaatagggtctggagacagggaacctaaagctgatttgtgctgagtttctaggattgaatgaaaaggaaaaccccacctctccacacccaagtaacaaaaggatcagaggctactccctttgcactgcattgcagataaaaaatggaaagtacctcagattggtcccctcccacaaccaatcagactggccatgggctactccttcgtttacatagggtgtaaccaagtaaccaatgggaaacctctagcgggtatgtaaaccccagaaaattctgtaaccagtgctcttgagctgcttgctggagcctactcccactttgtgaagtgtactttcatttcaataaatttgtgctttcattgcttcattccttcgttgctttgtgtgttttgtccaattctttgttcaaaacaccaagaacctggatgactcatagtcaagatcctctaccagtaacacttgaactttctggtttgtcctgaacatccctctttcttaaacaaccagtcgttttattctaggccaaaattttaccatacaagaatatttctcatatacaattatcttccttctaacttttcttgccagaaataccttttataactttctttacattgcttttatttaacgattacttttaccttgtttcataagttttaaatagccttgaattagataaaaaattattttcctttaaataagaacacatttctttttttagaaaaatatttttctgtaattttttttttttcttgagacagagtcttgctctgtcacccaggctggagtgcagtggcacaatcttggctcactgcaagttctgcctcccgggttcacgccatcctcctgcctcagcctccagggtagctgggactagaggtgcacaccaccacgcctggctaattttttgtatttttagtagagacggggtttcactgtgttagccaggatgatctcgatctcctgactatgatctgtctgcctcagcctcccaaagtgctgggattacaggtgtgagccactgcacctggcctaatattttaaattggaaatgacccagatgtttaatgagtacctattatttaacttaatataattttagattctaaattatataacaagtttaatcacaagcatttattccattacatttacctaattaatttttttaatagtttactcagattacttttgaaaactgagagttatcattgaaagttatttcccagttaatcatttttatagactgcgaatttcaggttttcctaagtaagaaacttaaggttagataaatggtttctttttttttttttttgccaataacttaggatttagctgttttcattaactaaacaatattaaatgccttatttatgaaattttacatagagataattttcctttgggctgcattcattgttttataaccctcatgccaaattttggcatctagcagagataaatatgaaaccactgttccaataaatttaaacaatagtgtatgttgacaattctgaagccattctaattctaattttatttcatgactactttcaaaaccagcttatttattaaagatatacttaagtcacatgaacttgaaaagacatttggcttaaaatctctattttctctgatacagtatttgatttaaagcccctttttttctttaagccaattaattagagcacttttacatgtttctagtagtgaaacatcatatacatgacacataaatacatagatgtattatacatgcagatagaagtagagcttatcatttcacaagacctctttttttcctccagttctagacttctaatttcttgatcttattaccctaggcagttgtcagctaagataaccctaaatttgcatattaaaggaactcttagatgaaaaaaatcagatagtgaaatttacatctcaaggtacagagagaaagagtctggtgctagtgtttccagaatttattccttctggtgggttcttggtctctctgacttcaagaaagaagcctcggaccttgcagtgagtgttacagctcttaaaggtggcgtgtccagggttgtttgttccttctggtgggtttgtggtctcacttcaggaatgaagctgcagaccctcatggtgagtgttacagcaattaaaggtagtgtggacccaaagagtgagcagcagcaagatttattatgaagagcgaaagaacaaagcttccacagcatggaaagggacctgagcgggttgatgctgctggctgtggtgaccagcttttattcccttattcgtccccacccacgtcctggtgattggtccattttacagagcactgattggtccatttcacagagtgctgattggtgcattttacagagtgctgattggcgcatttacaatcctttagctagacacagagtgctgattggtgcatttttacagagtgctgattggtgcatttacaatcctttagccacagagtgctgattggtgcatttacaatcctttagctagacacagagcactgattggtgcattgttatagagtgctgcttggtgcatttacaatcctttagctagacacagagcactgattggtgcattgttatagagtgctgcttggtgcatttacaatcctttagctagacacagagcgctgattggtgcgtttttacagagtgctgattggtatatttacaatcctttagctagacacagagcactgattggtgtgtttataatcctctagctagacagaaaagttccccaagtccccactcgacccaggaagtccagctggtttcacctctcactagtaggaggagattaaaaacgaatgccaaatcaaacataaaattatagaaatctatcataggattatattagaagactgactttatttatataagtagttctaaatttagtctgccttttaactggatctctgagctctgggcagagcccacactgaattccgggtctccaaaaagagaattattatgaggctaagaccatgtgatggttttatgagtgcactctccttttttttttttttttaacaaaaatgtttctctaagtgtctgaactactctcttcctaactttaaacacccaacagtaacctctgttgttactctttgactaaaataattattttagttaaaaaaaaaaaaaaaagaagaaagaaagaaaccaggtaacactatacaaaaggaagcagtgtaagatctgagacgaaattttctcttttacactctttgagttccataaggagaaacagaggttgctccccaaaagggagtctagtgccttctctgttttctttaaggaatcccagggtgttagaaactattttagattcctcatgcagcacagggtagcaagagaaagaagaggcagcagaagtaaaatgaagaaaacagaatttggttgacggagaagaaaaaaacttttgctcaaaaagttgaaggagagaaataaaaaaggccttaactacacacacacacacacacacacacacacaccttggatgttagcttttatttaagcttttagccactaagctccttaaaaaaaataccttcaaatctcattactgtattttagctagtacaaactgctgatatttcaaaagtaatgcaaataccaaaccagaaagggcttgatttaggaaccaaacttaggcagtcatgatgaaaataaggacagaatcttagtttccaaactgcagtgctgggggacaaccattgctctttcagtttggcctggttagcaaaagatggccttgttatgtaaataaagcccctaaggtagtcaaaatcaaaaaaaatttttttttccttttgctagctgtttttttcttttttctttttcagttgcaggaatttagccaattcagaggtcttgttctccataatttggaattttccttcggatttgatcaagttggatagagttggtcaaacccaatgggaaaaagatgaaaacaacaagaaacagaaacaaacagcaacaacaacaacaacaaaaacagttaagtgaaacaaacaaacaatcacacaatttatgtggtcactgagtgctctaatagtaaggagaaattaagaccagctggctgttagtcttaactctagccaagacaaaactccaattcagctacttacctagtaatgagtctcaggctgaagtctgctctctcccatcctagaagcaggaaaaaactgaaactcatcttccctgctggaaacgagctcaaactccagaaaggagttacctgccttccatcatcatggacgcaggaaaatttgccttccttgttggaagcaagtaaaactccaaaaaaggagttgcacagcaaaataaacttcagatctcaacaaatttggggagatcagggattctctgggggtggggtggctcccaggcctcagccaattgtcctattggtttcagccataaagacagctcaggctgctaccacgcactgataggagatttgtcaaagatcgaggcatcttcactcagaatccctctgtgattaccaattgtgaacacaaaatatctgatatgggtctcagtcaatttagaaagtttattttgccaaggttaaggacacatccatgacatagcctcaggaggttctgttgacgtgtgcaaggtggttggggcacagcttggttttacacattttagggagacatgagatatcaatcaatatatgttaagacatatatcaggtggtccaaaaaggtgggatgactggaaacagggagggggcttccaggtgataggtagataagagaaaaacagttgcattcttttgagtttctaataagcctttcactgaatacacaatttacaggactaatcacttaagccttagcctggctcagtgaaacaacagggcaaaggaagcaatcagctatgcatttgtctcacgtgagcagagggatgactttgagttctgtctagctatcttgtttaggaatataatgagaggcaggtttgcgtgcagtttccagattgacttttccctttggcttagtgactttgaggtcccaagatttattttcctttaacatttacaaggagaagtgaagaaataagtaaattagagagctagaaggatggaagtttacagttagagagagtgggatgttgaaggtaatactggttgcatatttcttatccaaaatgcttgggaccagaagtgtttcagatttcagatgttttcagattttggaatatttgcattatacaggttcagcacccctaatctgaaaacgtgaaatccaaaattctccaatgattgtttcctttgagcatcacaatggtgctcaaaaggttttggattttagagcatttcaaatttcagattttcagattagggataataaacctatatctcagaaacggtacatttctgaataatgacaaattgtcattatttgccatgagaattgtcattaatgtgggtggagatggggatgattgtaggtcaagagactgaagcaatagggtaggcttgggtgttagtacggcccttcatgggaatgtgttgatgtcatccagggtcacgggaggcttctgagtgggaaggaagctgagagcctatgattacggtcttcactgatgaaggcagacagtaggaggttggcagatggtgggcactgactagactggaagtgccaagaacttcagtggagcaaggttttacccaagacacagaggttgtggtctagagcagcccagggatgaaggatcacccattggagaggactgtggggaaagcagagtcctgggagatgaaccaagcatcagttgaggctggaacagttaaaatgtatacatcaaattctctccaaggacactgtacccttggctgaaaattccctccttagtctacttcccatcccaaattctacccatccacactgtggcatcctaggtctctctagcagctgaacaggcaggcctctgtaacaactgtttcagcgctgactgagtggttaagttaaatattaaaagttgaaagagccagtaaccttatacaaaggctggaatagaacaaaagcccaccacaagtttttgcctaagtctttcctgtgccttgaaccatgacaagaggaggaaggaattcttaaccagacccatttaggattaagtaagtttttattggctgggtacggtggctcacacctataatctcagcactttgggaggctgaggcaggcagatcacctgaggtcaggagtttgagaccagcctcctggccaacatggtgaaactctgtctctactaaaagtaccaaaatgagccaagcatggtggcgggagcctgtagtcccaactactcaggaggctggggcaggagaatcgcttgaacccagaaagcggaggttgcagtgacctgggatcacaccactgcacttcagcctgggcaacagagtgagactccatctcaaaaaaaaaaaaaaagaaaagaaaagtttttactgggggtctgaagacacaagttttattggaggtctaaatgaactcctcaaacctccgtgatttagcaggagatgtgataagggtaatcaccccagcacttggacccatctagattcaatacatttactgaggctccagaagaaggtcttcacaccttagttatggattagaagaagttaatcacttacgtctttagatgaatgcacacttacatgtagacatatggcttagaaggtatataaaccctggaaagctttgtaattttgagttagtctggtgatatattccaggccttctccctgtacccggttacaaaaataaacttccttccttcccagttcaactgcatcttgttattgggccgcgagaatcagcagcctgaccctcggcttggaccaggaacaacatggtctgagagagctcatcccatgttccaaagggagattaaatgacaaattaagataccccaataataaaatgccaacaataagatgccctacagtgtaatagaaacaatgtaccattatgaaattcccagtaggaaatgaaagctcaaagactaaattcacttgccatttcaagataaaaagaaaatttcaggtccaaacttttttcctgcctcaatttcatattctgatcaggctcagccagaggatgtctcagtatttagacagagtggaggttcctgcggcaccatcctggagaggtgtaacattctttgggtggaaaaggtgaactctgctctcatatgctatctacttaaagagtctggaattaatagggcaccaaagatgatcacagctctgtctccacatccaccaaatttagaaaccaaatctgataactaagtcatttatcagagactcagtggtacccaagtgaggaagggccactggagacaatcttgtttttttcaccggggctggagtgcagtggcgcgatctcggctcactgcaagccccgcctcccgggttcacgccattctcctgcctcagcctcccgagtagcccggactataggggcctgccaccatgtccagctaattttttgtatttttagtagagacgaggtttcaccgtgttagccaggatggtctcgatttcctgacttcatgatccacctgcctcggcctcccaaagtgctgggattacaggctttagctacggcgcccggccattcccctcccttttctgctaggctcactgaactattaacgagcaaaaagtaaacttcccttttctttgagttattatacatttggggtctatttgttagagcaatgcgcttgccctactatactctccctgggccttgtatgatgaaattggtaacagccacaaaaactgcatctgggacacagaaggtggtagaggggaaaataatctgactgacaaagattctgtttataggtgactttttaggattgtggagttaggcaaagctgggatcactcacacagcctgataggggattttcctacgtgggtgggctgacctggtggtcctggttacactgcccaccagccttctggtgtctctactaggagtaaggtgccttctctttctcctccaggaccccacacctccagaccctgctgagggagggccacccatttctagtcccagctcctactctaactatctgtgtgaccttaaacaaggcctttcccctctctggcctcagtatccgcctctgaataatggggctgggcctgccgaccttctggcccttttctgctctgtgagtttgtgaacttgtgatagggagacaggagtcctaggaaggaaatggaactggtgatagggagacaagagtcctaggaaggaaatggaacttgtgatagggagacaagagtcctaggaaatggaaggagagcacgtttcactctgtccagcagagggcagcagctacccacaaatcaacagctgagcaaggccagggctgtgtgggagctatgcacaggttctgcctccagaagccttcagtgcctgcctctgagccagagggttccaagcagaagaggtcccgcccccggagagggacctcagagaggtcctccaagcccctctcagctcttacttacggcatcccagatgccctattcctcttctgcagagagaaggtggttcagccactaaatggtgctgggacctcgcagtttggtgggaaggaggaagcttactcaagcaaggaatatgagacaggcaaaaacccacgcataagccaaaagcccctccaaagcgaggtgttgttccaggctgacaagtgtccagcagggtggacttcagactccctgttaggaactgaattgtgtcccccaaaaagagaaagtcaccccagggtatgacctaattcaggaaaggtcattgcagatgcatttaattaaatgaagatgagctcatgctggagtagggtggactctgaacccagtgggacaagcgtccttattaagaagagggaaatctggacacacacagagcagagaccgccgtgtgaagatggaggcagagatcggagagatgctgccacacgccacaaatgcctggggctcccagaaactacacggagcctcccccagcggcttcagcaggagcatggctcggccaacactttgatcttggtcttccagcctccagaacggtgagtcggtgagtttctgtggtttaggccccccagttgtggttgtttcttacggcagccccaagaaaccaatacactcccccgtccactttccacggcagagtttgggcgtcactgaatcccacctccacagcaggttttgcttggactgcacagtatttattgatgctgctgttggttttaatttctaatgtgtgtgcctgtagctgtaccactcctcctgatgactcacctggctcctgcgggcatctgagatgtggtttctgctccacacttcctgggggagcagaggaactcctcagcctcctctcaaacttctctcaggttgtgctgttcactccctccccaggcttccggtccacacggacagctctgaccccgagaagattctttgtcttagacaaacatctgcctccctgtaacttcggttcaccgatacttgctctgcactccagggccatacagaacccctctgctccctctgcccttagccattggctcctaggagacactagcttgtccggccgtcgctttaaactgtctagttccaactccctcagaacttcctcagtgatgcagtttcctgacggtcatattgcctggataagctccagtatgttcaactccctctgtggttcagcaaccaggactaaacaggattcacctgatgcacattctaaccagagtcaagagggcagaagcatcgcctcctgcgttccaagctcaatatctcaattgtaatccccacatgtcaagggaggggcttggtgggaggtgattggatcatgggggtggtttgccccatgctgttctcataatagtgaggggtttctcacgagatctgatggttttataaggggctctttcccctttgtgcaccctctctctttcctgcttccttgtgaagaaggtacttgcttctctttctcctgccaaagcatgaccttataattgtaagtttccggaggcctccccagccatgcggaactgtgagtcaatgaaacctctttcttttataagtgacccagtcttgggtatttctttatagcagtgtgaaaatggactaacacagatatttggcaggcatccagtagtcttcgataaacacaaccaccatctagtggccagaacagccttatcggaccccactgtctgcaatgaaaagctgttcctttcctcatcctttacagggccaagcacccagcatcctgggacagtggccccgtgtgcccagctttgaggatgagctcatgcctggttgctctgggtggagagagggaagagttgaatcaacatccatatgtataaatctccttttgtgcatttagaatcacgtccttagaataaattgcgatcagtggcattactgaagcaaattgtatcaaaaatgcaaaaaagacccatttttccaaattgttttctaacaaggaagtcatattgtttgctttttgatactgttctttagaaaacgatgcatgagagttttacatttcatatagtgtgttctatttattttatactttgcaatttctgtaatttttaagcactgttcttcccatactagaggctctgctctaactattcaacttttgtttgtcctagttttcctaaaattcccttttccactggtgtgtggtgcaagatgaggcacattttccatggatggtgaacagagggaggagccttttgatcacaaccaggtcaccccacttctaagccactgtgcctccagccccacaagactaaggagagagagcgcagcgtggtggagagtgagctgtgctgggaccattgtttccgtaacctcgttttctgtgtccagctgacacaccttcaaagtggcatcaggtcctaaactgtagcttgcaatgtgcctgtttccagaaaccaaggtgaaagtgcttttagacagtgttcccatgcaagagtcccttcccagcttttttctggaaatgcatgtttctctgaactctgagtcccaagaaaaatcacttgagacaccaagaaaatgggggaagtgctaaaattgtgtgggaattcaagcttaacaataaacatcaagacatttttgataaaaatgaatccactgacatcggggaggagcaagagaacagcacgctgacactgggtcagaggctaagaccgacatttctgggaaccactcccggaagggcacagaggagacgctttcagcctctcatcagccagcctggcctgtagctgctgcacgttatgagtgtgttcctggcatgactgcttctaacagtgagttttctggcaaatcaaataaatactaataagtctgtatgcacattatactttatacaaatcctatgagtgatgttccagaaataacaagttttgaaggcaaaataagtccttaaattggcaactttgacacataattccatgtagtagttaatcttgctagaagatcccaatgttgttattctaatacaatctgataatgttcactggcattttccactgttggcatctttactatagcctacagttgtttgtttgtttatttgagatggagtcttgctctgttgcctaggctagagtgcagtggcgtgatcttggctcactgcaacctccccctcccaggttcaagcagttctcctgcctcggcctccctagaagctgggattacaggcacgtgctaccacgcccagctaatttttgtatttttggtagagacgtggtttcatcatattggccaggctggtcttgaactcctgacctcaggtgatcagcctgtctcggcctcccacacacagtgctggggttacaggtgtgagccacgattcctggctgcctacagttctttgtaaagcagacaaaatagtttcattttttaaagaaatgaacatatatgaggcaacctgtacctaacttaggagttcagaaattccctggactgcctatacattttggtttctcattcctaattcccaaagattaaaatctgtcaggaatttggaaacattgaatcacaggccaaaataggaccatgtctccattcattcattcattcaacaattatttattgagcgcatgctatttttcaggcactgtgccacatattgagaatagagtagtgagtaagacaaagtcatcactttagggagtttatattttagaggagagaaagacaaatgaaagtgtttaggctgggcatggtggctcacacctgtaatcccagcactttgggaggtcaaggcaggtggatcacctgagctcaggagttcaagaccagcctgggcaacaatcccatctctaacaaaaacataaaaaattaaccaggtgtggtagcacatgcctgtggtctcagcaacttgggaggctgaggtggaaggatctcttgagcctgggaggcagaggttgcagtgagctgaggttgtgacactggacttcaacctgagtgacagatcccatctcaaaaacaaccctgggccgggtgtggtggctcacacctgtaatcccagcactttgggaggccgaggcaggaagatcttgaggtcaggagattgagaccatcctggctaacatggtgaaaccccgtctctactaaaaatacaaaaaattagctgggcatggtggcggttgcctatagtcccaactactcgggaggctgaggctggagaattgcttgaacccgggaggcagaagtagcagtgagccgagattgcaccgctgcactccagcctgggcaacagagtgagactccatctcaaaagaaaaaaaaaaaaaaaactcagaactatttaatacaatgtactggcaagcggtgatgagcactatggaaacgtgaagcaatgtttgagtgcagcgagtgaagcggtgctgttttgtttgtgattgtcatgaggacccctcagaagagcagagagctgaatgcagtgagcatagaaccttactgaggcctgggcaaggctcttccagacagcaaactgccctgaggcaggactgtgtttggcgtgtcctggaaacaggaaagaagccagggcctctggaatgtggtgaaggagagggaaaagtagtaaatgaggctggagagagaggcaggggccagaacatacagggctgtgtaagtcacattgagttctttagattttcctgtaagtgtggatgggaagcagttggagggttttgaggaggggtggtgtgatctgacccgcattttagaatcatcccgttggctgaagtgtggaggaaaaaagcagggggcagaagtagaggtgaggggcagccagttaggaggctacaggagtagcccagaccagacaggagggtggctcggccctcagagatcttggtggggcagattagagagtgatcaagttagagctaacaggacttttttttttagactgggtctcgcttgttgcccaggctgtagtgcactggtgcaatcatggctcactgcagccttgacctcctggatcaaggtatcctcccacctctcagcctcccaagcagctgggactatgggtgcatgccaccacacccagctaatttttgtatttatggagatatgggtctcaccatgttacccaggctggtcttgaacttctgggctcaagccttctgcctgccctggccttccaaagcattggaattacaggcctgagccactgtgctaggccagagccaacaggacttactgagaaattatctgagagagaggggtcaaggaagactccccctgttcaaccaagcaacgaggtgaatggtgctgctgcttcctgagatggggaagactgtagaggaaacaaaccaggaacgacaaatcagtaatttagctttgaatacattaggtttgagatggctagtctgtacccaaacagaccacactgtggcatctgggcagcaggatctgcagaatccagcaggatggatgctgatgccaagctgagtagacagttgggtctgtgagtctaaagctcagggaagacctcagggtctgggatacaaatctggagatcatcaccctgtccatgaaagccaagggaatgatggaagatactatgagaaaaagtgaagagaggaaagagaagaggtccatggaaggagacctgggagaatccaaccttcgattagatcaggaagaggagaagaatccagtaaaaaactctgagaagtctctgggaaggaagtcttccttccttcccctgtaccaggagaggtgctatcccagaaattagtaaagaaacagtttttgatggggagaacaggatcacctttgtcaactgctgctgcgagacttggaaaaataaggactgggaagagagcaatagaaactttgaaagccattggttatcttgataagagttgtttctgtgggggtggtgagaactggagcctgactggatgggttcaagagagaatggggagttctagccaagaaggctgatgaggatgagtcaaattaaaaatgttttctttttatgagtcctctcatatttactgatacaactgatatattgggtctccattctgccacattactttatattgatcatgtattgtatctgctatgcaattgtattgcatgtatctgcatggcaattgtattgccatgcaatgtatttttttttactttaaaaattatatttataaaggtttgtaattttattccagtggttattttatatgtacactttttaaaatgctcttaattttttttttaagacagggtcttgctctttgcccaggctggagtataatggcatgatcctggctcatcaaagccttggcctcctgggctcagtaagtcctcccacctcagccacctgagtagctgggactacagtcatgtgccaccacaacaagctaatttttttgtattttttgtagaaatggtgtctccctgtgttgcccaggatggtctcagtcaggcgatccagcgcacaagcaatcctctcacctcagcctcccttggctcttactcttattttcttgtttaagcttttactatctggtttataaatactgcagtattcttcatctcccatccattgctcatacaacaatctaggggcatattccgtttttctctatttcccttgtcccatttttgagttgcactatttccttatcatctcttatcagctgaagctcattctctagtataccgtcagaaaactttttattttttgcaaggggccagatagtaaatatgttcagttttgcaggcatgcaatctctgccacagctctaccattgtagagtataagcagccatagacaatatgtaaacaaatgggtatggctgtcttccaataaaactttatttgcaaaaacaggtggtgggccagatttggcctataggctaaagccctgtcttagagtagcagcagataaggagacagaaaaactgtacaggaggtgagagaaaactggcaggagagctagggggatattgacaaaagaggagccctttaaatcttccaggggtagaaaaaatgaaattctttgatgttactcaatagtttacctgctcggaaggaggaaaagtgtctcttccatctcagagttggctcagcatccatcctgctggattctgcagatcctgctggccagatgccacagtgtggtcagctgaaagtgatttgctcatcctgaaaacagcaggtatagaaagcgctctttcagcgccatggcaaccagatcgtgtttttctaaaaaaggatcagatcagcgggtgtgtccctccaggcattgatccattaatatgcactgagctcatttcagagccaggccctgggctgagtgcttggaatacaaagatgcaaaaggctaagtccttgtttttaaggagctcatagactggaggaggaggcagacatttacagtaaacagtgtaatcacacgtcatcaaaggaagggacacacaaagggctgggtggggagcatctcctcctctttgggagaaactgacctggagacctaaggttgagctgaattttggagaatcagtcagagttggtcaagaggacaaactgggatgggtcaaggaaaatggagaagcttgagagctgtggcagctccgtgaaatggcaagtatggccagaggatggcatctccagggtgccggagatggccatggagaggcaccgaggccaggccatgccgggcctctgctgcctctgctgtcaccaaggtcaaccacaacctagtgcccaagccagtggcattttccagcctacttttactcatcccttcttttagaaaatgctgccttgacagtctgattttcatggtatcatgatccgctatctcctgatgtgtcctctgtacatccagctgctctttctcactctcttatttgtgctctcacttccttaaattttaaccttcttctcgtgctgcactttctccaggtatatgagaaacctctccatttttcactttcatctgtattgctctttgcctgttggcctcaatttctcccaccacaagatgagcccctaaacgtatctaagaatgtggcctcaagaaccccagtgtggcaatcccagtgaaaagccttttcccagtactcatctttccatcctggggaaggcatgggattgcttttggttggttgtgtacctaccctggcacacagcactattatcagagtgatgggccaatacaatatatggtgagggaaatgaggttccatgattggccccatcagtcacaaggatggaaaggcagtttcctaagacagatgtatcaggcaggagagaggagctatacaatgtcaacagggaaagtgtaatataaataatcatgaactaataatagagggttagccactaagggataaaaagaagtctaaaggttacagaaacaggtgaatggataaacaaaatgaaatgttattctgccataaaatggaatgaaattctgatacatgctaccccatggataaaccttgaagacattatgcaaaatgaaataagccagactcaaaagggcaaatattatatggtgccacttatacaatgtaccatgaatagtcaatccataaagacagaaagcggaatggaggttttcaggagctggaggaaggggagaatgggaagttattgtttaatgggtgatacggtttggctctgggtccccacccaaatctcatctcaaattgtaatcccatgtcaagggagggacctggtgggagatgattggatcatggaggtgattcttgtgatagtgagtgagttctcatgagattcgatggtttaaaagtatgtggctcccttctgtctctctttttctctctctcctgccactttgtgaagagatctgccttgcttaccttcaccttccaccatgagagtgtttcccaaggcttccccaggcacacagaattgtgaatcaatcaaacctcttttcttcataaattacccagtctcaggtagtatctttatagcagcgtgagaacagactattacaatgggtatagagtttcaccttggactgatagaaaagttttggaaatagatagtggtgatggctgcaaaacattgtgaatgtatctaatgtcactgaattgtacacttaaaagtggttaaaatgataaatgttatgtatgttttaccacaaaaaaaaaaaaaatacaggccagcctggccaacatggtgaaaccctgtctctactaaaaatacaaaaatgagctgggtgtggtggcacatgcctgtgatcccagctactctggaggctgaggcaggaaaatcgcttgaacctgagaggtggaggttggagtgagccgagatcgtgccactgcaccccagcctgggcaatagagtgagattccatctcaaaaacaacaaacaaacaaacaaacaaagaaaaaacaggaatcgtggatataggggcaggcactaggtctagggctgaagcagagaacccaaggaaggaaccaacttggaaaaaggtctccgcaggaatgagactcagatgccattggagatggtgtggctagagcccgcaggatggcagagaagtttgttgtagtgcttgaggccgggctggcatgcaagaaacccatgcaccggtgggggcagcagggtgggggctgacaacactcactgagaagctgccctctgaggtgcaggcattcactaggacttcacccgtggtatgttactgaaactccggggagccaactgctggagcatttatgagacacactatgccaccatccggggcttcagcagcgtttggtgaaaacctgcctgtggggttgctgttgaatttgctggagagctgactgaggtgctagcagaactcctcaggaaatcaccaggaggagcatccctgggtgccccatgcaccagtcaagagcaggagcaagaggaaaggaaggtagcctcttcttcctgcagtgtctctccagagccctccattgacagcacttaatatcgtgctagcaggcaaagaaatgtttacaggattcatctccagtatcacaaaggaggataacgaagagtggatttggaattcagaggctctaaagtgataactgtcacagcccacccctttggctactcagtttccatatgcaccctcctacacatacctgaacttctatatgacaacgaacaaaatacagctatccttcttaccagggaaaatattcctaccctttctcccaaatgagaagatactcgtgccaacaacaattttatctatctctggctatattcattactcgaatttgatcacagtccctctaaatattctgttaccaaaagaccaaattgtaaagctaacctccaacaacttgtatataaactgataaagggaagaaggagagagagataaaatggatggcattttcccatcacccatctatcagtgggaaagaactctggggaagtgctcttgaggaagtatctttgggaagaatccctgattggccctacttgggtcatgtgtgttggaatctgtgaaagtcgggaattttgcccatcttacaagctagtaagcctgttatggtttcatggatgctggcagatgacatgagactggatcagagacaaaggactacactactcatggcagaacaagttgcacgaggtttgtgttagttagcattggttttccttgtccccaagtcccacaggggtgatgtggaggggcccaggtggttactgtacacgcagtgtgtttgtactgcagctaaggaacactgagcttgggaacatacaatttaatagtaagtggtgagcaagtctgccctttgtctggggcagggggatattgctttgtcaaggctgtctactgcaaacacaaccctgagaaatatcccaagcaaggaacagtcaggaccttgcattcttgtcatccccagcaagagcatgcagagacaatcagagcctgtggcaaattgcctgtcacaaaaatccaccacaaggcctgacagatccttggccaaattcacattttcccatgagtatgctacctcatcagctgctctgattagtctgaccaacagagggaccaaatctgtttaatttgattcctatcacatttaaaattaaggctgctattgacaggacttcaagcaatacagtgcagcaagtctgccatattgatctcacccatgtccccagggtcccgggctcaaccaactgtctaaaagttctgggggcaagggagaccagtcattcctatttcagatagctaggataaaatctaatatcagtctagtattcattatgacccactcatgggagtttagattcactgatatcattgccagtgactacaggaggcaatgtagggagcaaagaccctcatccctgatggaaggacattcatggcctctccctttcaaagagacaatccaaaggggagcaggtcactctagtttggaatttgttgttaaatttgatttgaatcatcattgcattggtttggttaggtaagatggttaaattttacgtgtcaacttggctgggtcatgagactaagatatttggtcaaacattactctggatgtttctgtgagggtgtttttggatgagattaacatttaaatcattggactttgagtaaagcagatgactctacctaatgtggatggtcctcaaccaatcaattggaggcctaaatagaacaaaagactgacctcttccaggcaagaaggaattctgccagcacatgaactttgcacttgaactgaaacagtggctctcctgggtctccagcctgccagcccccaccctgcagattttggacttgccagcctccataatcatggcagcccattccttaaaataaatctcactctctctcttcctctagaatatacatacatatatatatatatatacacacacacacgcacacacatataatattatatatattttatatgcacacacaaaataacagatagatagatatcgtattagttctgtttttttggagaaccctgactagtcctagttgcctttcttttctttttccacttttcttctgagctcatgttccaccttctgatatcttaacatcatttccctgagctcactttatccttttccttcttaaaggcgaccatttcattaagtttttaagtgcctggtaattgcttggttatgaccggtgtctgctccatggcagcctcttcctggtgagtattccacatctgccattggtttttcctatccctttcctacatttgcagagatcctgcatgtcttcctttttgatgactcatctttgaacaagtggaatttttttttttttttttttttgagacggagtctcactctgtcgccaggcaggagtgcagtggcgcaatcttggtgcactgcaacctccgcctcccgggttccagtgattctcctgcctcagcctcccaagtagctgggactacaggtgcccgccaccatgcccagctaattttttgtatttttagtagagacggggtttcaccatgttggccaggatggtcttgatctcttgacctcgtgatccacctgcctcagcctcccaaagtgctgggattacaggcgtgagccaccacacccggccaaacaagtggaatttttcctggaccagctctttgctggtcatgtgggaggagttggggctgtgttccaagtcagctggaatttttcttataacccaggattttacatgtgagcttgatcagcctttacttctcagcttaagcaggtctgggcatgtttggcaacctggcctgcataatgaagatttccataatttggtgttcatctatttattcagtttttgcccgaatgatgaaggaggaagtttacatcttgctccctggggacaggcagagacagtgtgtgcacttccatcctacagggaccagatctgaacagtctggagagaggagctgtggtggcagcagacagatctctgcttcaggggccaggtgtctaggtgagacgccacagcgcggcagagagaacagaggcttctctgcatgcctgccagggaattggcaccatgtcaacagaaatcttaggttacaggaacaggaaccagccctgactgacgtgtgcaagcccggagctttcctttctccttgcacttcccacatgttccccacataaccagcaaccacagagccaccccctgccacccaacaactccctcctgagctagaaacttgtaagactcagctaggagtctgaatggttggatatctaaagcaaagaataatctagtttgtaacatgggaccaaaggaagaactgaatatccacaatctgtgtaaaaagaggccactttggagatttctatgcctctcaggggctctatctcaggatggctcagctgtaattatctttggattcccatacagatccaacttccctggaaagagaaagtctcatgtttgttaataatatgaggaaagaattaaaatatatcagctgctatgggctaatgtcatttattttgacttttcttttgtagaagaaatgctgaggcagtgtcacgctggtgtctgtcctccttacagaatgcctgaacagttccattgactcaaagtgaagatcaaaagaaccaaatgacagcaatagccaagtgtaatcatcagtaaccctgtgttctatccacaggtaaaaaacaatcatcctcttcattatgggtttcaattttaaatgtaatacatttttagaaatgcctatttccttttataatctctttatataatctaggttattctggctcttaggtcttcatttagctactgaaaagatttgatctcaaatcaatgatctaaccacccatgaccatctcccacctctctccccgtacaccccccagcatgaattctgggaactcaggtaaaatgctttctggaaacctgcctgtattagtctgttgtcaagctgctaataaacacatacccgaaactgggtagtttataaaggaaagaggtttcctttatagttccacatggcttgggaggcctcacaatcatggtggaaggcgaatgagaagcaaagtcacatcttgcatggcagcagggaagagagagtttgtgtaggggaacacccctttaaaaaaccatcagatcttgtgacactcattcactgtcacgagaacagcacgggaaagacccgcccccatgattcaattacctcccatgacacaagggaagtataggagctacaattcacaatgagatctgggtggggacacagacaaaccatgtcaccgcctaaaaccaactcaatagtctaaggaatttgactggggagaatctggagaggatttaattaatttggcaaaaggattagcaattgaatctaagtgagaaaagagaattcttggaggaaaaaaagatgtttagttacactgagaaattaaaacctgaagtaattgcctttgagatttttttcaggaaatgagtattgattgcctactgtgtgtcaaattatgtgtttcatgtcaaagactccaaagtagataagatataggcccagccttggggagctcattgagtcacagagaaagtttgaatgtttcagaggaatcatcaagaacaggggatcagcaatctattatattttaattgcgtcttttcatgattataaaagcaatgcatgcgtgctgaagagaatttggaaaaacaaagaagaaattaaaaatcgtctctgatcctgccaccagaaataaccactgttagcaattgtatcacttctgtaggtctacatggttatcataataagctctagtattgattacatgcatctcatgtaccagagattatgctagactctcatttaatctgtacattagccctatgaagtagggaccatcattctcctcattttacagatgaggaaacagaggcttggagaggttactctgcctaaagtctcatagctagcgagtggcagagattggactcacccaagctttgtcttattctcaagctctcaaccaacccggtggtgagaagagccagcagcaaagcctgtcatctttgtcttctttttttttctaacctcaaatcagggagaaaatgccctttgtcattagaagggcaaggcaattctgaagacagcccagttggcttgtctccgatttggctttcaggggcctgtctgatacctatggagagacgagggctgaacaagctgtactctcaaaacaaaacaaagcaaaacaaaactttagtctctttagggactctctgatagtaatgcagagggagaaaggctttctttgtctcactgggaggaaggttccctacggaaattgaaggcagtgcctgttgacatagcgctgccacctggtggaaataatggtgtaggacatcatgtccagcaccactagcgctgagacactccctgggaagagaaatgtttggagagaaatttgcaagaagttggaagtctcgcagtagcaggtaggaacaagaattataactgctactgtgaccccctaaggctcctcacatcctcttaaggcttggagaaactcacactatgtatattttcctgtatttttgaaaaatgttttcctttatgctttgttgtaatgaaattacctctgatggtcacataccttaaatatttagtatatatatgaatactaaatgtccattttcaggagttagtttacctgcatctaaaatcaggaataggtcacagagtaactgagcaaaaagtgctgttaggtttgtgcatttcaccctttgcctgggatgagaggacctcaatcatcttggtactaatgacaggaaaagtgccctcctatccatgtgtatcggctacgtgactcaagtctccttatttccttttctagcataacaaggggttgttactgttgttttacatctgtgttaatgagataaataagtttaaaataaaaagatgtgtaccaggcagatggaaaggtgaaccatgaagtttttgccatctggatcttctgtcaaagacagatgaaaaattctgcccagggtgtatgctgaagaacacaaatacttaatctggagttcaagtatgggcttcaaggagtctatacacccctgaaattttgggacagatggaatgtgtctgaagtatattcatttttctgggaggaagctccagagttttcatcagcttctgaaaatagtgcatgcccaaagagaaggttcaaaatcattgcctggggcctttcagagggtccttctaatcatggtgttccctaatgttaatcaacaccacaagcactattattattaaaagtaattgggtcaggtgtggtggctcatgcctataatcccagtactttggaaagctgagggaggtggattggttgagtccaggaattccagaccagcctggccaacattagctgggtgtgaaggcacacatctatagtcccagctactcaggaggctgaggtgggagtatcttctgagcccaggaggtggaggctgcagtgagttgagatcatgcctctggcactccagcctgggcaacagagcaggaccctgtttcaataatgataatagtaatcatcatcatcatcatcatgatgtcgcaagctgatttgaaataacttatttttatataagcacttggatttacataggcttgactgaggaattacactagtgattaagggttcaacctggacactggtaaggtagaccaagccacatgaacccctgccattggcaggccagcagccagtccatccttcctcctttggacccgtggactgtactcaaaatcagtagaggctctgtcagaaggtcctgggaaacaagacctgtccatggtttctttacctgaaagtaaaaatgtttgatgatataatttttaagttcctttgaatcattaaagctcactgatttaggagaatggcttttacaatttttcagctttaaactccctcctaagtttctgaagatcctcttgggccacttcatggatctgatttaaatctaaagtcctaggggtttcaaggagcacagtttggaatctaccatcccgggacattcattatattagtctgttttcatgctgctgataaagacatacccaagactgggcaatttacaaaagaaagagatttaattggacttacagtcccacgtgttgttccctttttgctgacattaccctgtctgaagtcctctacccagggaagccacaaggcactgttctgggtggaggtgggtgtggtgtccactgcgccatacccaccaggacctgaggtggaagctggccagacactggtgctctgctggcatttgggctgcagatttggggcaggtaatgggcatggagagaacagagccaaaagcagcacaggaagatgtggccattctggtctgagagaggcatgggaaatgacggttggtggcagaagcgttttctaaacttaggctcgtgaacagctttcaagtccagctcttgtccagatgttgtcttataccacatgctcatggcaaccagaccacctctgatttttttgcaaccaggtgcctaacacagcacatcagtcaggatctggcaggaagcaggtgacattcacacaaggtaactgacgaaagctgcttttgttttttgcttttggaggaagatgttgagaacacctccatttattaaattagctatagtaagtgtagtttacatattaaggagagattaatgataggatttatacagatgtgacaggtttagggaatgaccccactcagctgtccccctttctatgagaccatgcctctgccttctcccaactccattccagcccagatggccttcctttgtccttctgtggggtggagatgggaatggttctcagttccagctagaatcaattcaactggggaagcttcaaaatacgtcagtgcctgggccccgcccccagcatttctaatttaatggggctcaggtggggcctgggcagtggtgctgtgtaaaagctctcagttgattccaacacgcccagaccaattcattgacactctctggggtagagggcctgggcactggtactttttcaaatttctccagtgcagccagaaccaagaagctctgttttctttccaaatctattgtctgttggggtgatcagacccaacaccaggtcatgggggtgacaaagtctggtggagtcaaaggattgagaaataggtttgaaagagaaaggtgggacaccagggggccatcgccattgtggaggctgtgaaggccctgagctctgggagcccatgctatttattggcagtccaacaaagaaacatgtggtgagaatgtggaggtcaaaaggacatgttgcattaagcacatgatttacagctgtgatggtttagcgtttatatggaacatgttttgctacttgagataatgggagtaggagcctaggaaggctagaagcaaggagccagcaaggctagacacattccagaggacattatgtcagatatgcaagccctgcctcagtttctcccaacactcagctttttcctaacatgccccccttctcttttttgtaaaagagaaagtattattactagctatcattagcaaggtgattgcaggctgtgcagcccttaattgccggttggtgatccagcttcatttttcttagcccttattcaaaccggagtcactctggtttgagtgcttcccacatatctccgctttcccttttacaggacccttaatcctaggggttgcagaaggatgaaggtccatcttctgtaacttcttcatgctgaataggggtgatgatactcctgcctaactattagggtttctgtattcagggtagagaggagctcagccagaaagcattggtctgttaagcatcaagactccggtcggtcctcgttccatcttctcattcagattcagctggctcatggctcgtactggggaacccagtccatgcttaggatccatgggtccctccagtctcccattccatggtcgtacacgtcttgagggcatccacatggttcgttcatctcctgcaaaaacacaagcataccctcacccccacattagtaaatctactgaaacagaagcaaaaactgttgtggctgtagctgggaggccactgatattgagaaacaggcccttccaacagaaggcaccaggaaagcaaatcaaggcttaaaagcaatccttaaaccttcaatttgcactgtacaggtgggtccactagatgctgtggctcatgacagatcttcagatgtttggtgaggacccacacaggcacctgatcatcacctggagagacacaaacaaatcctcttcctcatattaaagaatggaattcttgtgcatcagcaaagaccacagacaccaatgcatctgccctttaagtttaaaggaccaaagagtcctattggagaaaaaagaaaaagcatttttatccttaccttcccccgctctattccttttatatttgccctttgagccatagctaatttccataattcagaatgttctcgtctgtccctgcaaatctctgctagtctttgctagcctctacttttgtacctctttagggcactgaccttatattgctagtctttgcttttgtacctctttagggcactgattttatattgctagtcttcatctatccctatctgtccctgtggtacctgtgagttcctgcaagtctctgtctctatctctatctctatttatctctatctatctatatctctatctatctctatctctatttatctctatatttatctcctttagctgtacttacttatctctacttagacttacttatctctacttacttacttgtctctacttatctctacttacttatctctgcatctttcctggaaaccttttctatgaccctgagtagagctcagaaatccaccctttaagcttcaccaagagaaaaacagggacactggaccctgcaccagattgaagggaacaggaagtgctctccccgccccaaagcaggaaaacaagagtttggcccttgcaaatttccactccacatcagcgtcatcctcaatttcctggaacattatagcaatgaatttgtggttatagctgatgaccactgatttcacttcagaaagtccaaatatagcccagaacagtgtcttaaaactctgttgtgaaggcttcattttgttttgcaccaatgtagtaggagtagacgttgaacattcccatcataaaggccacaaataccacaatgaacacattccttgtgtgctgattaaatcgtttttctgtagcagaggtaggttaaccatgaaactgaagcgtgatgacttcacttgccctatgcaaagcagcccatgatttattttttctggggactactgacaaccagtcctgtgtgtcaaccggtaagcatccaacagcaggtctactgtacaaataggtcttttgtcagacacttgattaacccaatatatagcctttcctgttggattagtgctaccaaagcctccagttcttttcactgtactgcttcccagctttatgtcaacaactgagcaattctttctcctagggaagcagaccacggagttgaagaactaataactaattgaatttctccagtataatcagaaccaatcattcccatatgcacagttacatctctaggtctttctttttattattattatactttaagttctagggtgcatgtgcacaacgtgcaggtttgttacgtatgtatacatgtgccatgtgggtgtgctgcacccattaactcgtcatttacattaggtatatctcctaatgctatctctctccgctcccgccaccccactacaggccccagtgtgtgatgttccacttcctgtgtccaagtgttctcattgttcaattcccacctatgagtgagaacatgcgtgtttggttttctgtccttgcgatagtttgctgagaatgatggtttccagcttcatccatgtccctacaaaggacataaacttatccctttttatggctgcatagtattccatggtgtatatgtgccacattttcttaatccagtctatcattgatggacatttgggttggttccaagtatttgctattgtgaatagtgccacaataaacataagtgtgcatgtgtctttacagcagcatgatttataatcccttggttatatacccagtaatgggatggctgggtcaaatggtatttctagctctagatccttgaggaattgccacactgtcttccacaatggttgaactagtttacagtcccaccaacagtgtaataaaagtgttcctatttctccacatcctctccagcacctgttgtttcctgactttttaatgatcgccattctaactggtgtgagatggtatctcattgtggtttggatttgcatttgtctgatggccagcgatgatgagcattttttcatgtgtctgttggctgcgtaaatgtcttcttttgagaggtgtccattcatatcctttgcccactttttgatggggttgtttgatttttttcttgtaaattttgtttaagttctttgtagattctggatattagccctttgtcagatgggtagattgtaaagattttctcccactctgtaggttacctgctcactctgatggcagtttcttttgctgtgctgaagctctttagtttaattagatcccatttgtcaattttggcttttgttgccattgcttttggtgttttagtcatgaagttcttgcccatgcctgtgtcctgaatggtattgtctaggttttcttctagagtttttatggttttaggtctaaaatttaagtctttaatccatcctgaattaatttttgtgtaaggtgtaaggaagggatcaagtttcagcattctacatatggctagccagttttcccagcaccatttattaaatagggaatcctttccccatttcttgtttttgtcaggtttgtcaaagatcagattgttgtagatgtgtggcattatttctgagggctctgttctgttccattggtccatgtctctgttttggtaccagtaccatgctgttttggttactgtagccttgtagcatagtttgaagtcaggtagcatgatgcctccagctttgttcttttggcttaggattgtcttggcaatgtgggttcttttttggttccatatgaactttaaagtagttttttccaattctgtgaagaaagtcattggtagcttgatggggatggcattgaatctataaattaccttgggcagtatggccattttcacgatattgattcttcctatccatgagcatggaatgttcttccatttgtttgtgtcgtcttttatttcattgagcagtggtttgtagttctccttgaagaggtccttcacatcccttgcaagttgtattcctaggtattttatttgctttgaagccattgtgaatgggagttcactcaagatttggctctctgtctgttactggtatataggaatgcttgtgatttttgcacattgattttgtatcctgagactttgctgaagttgcttatcaacttaaggagattttgggctgagacgatggggttttctaaatatacaatcttgtcatctgcaaacagggacaatttgacttcctcttttcctaattgaataccctttatttctttctcctgcctgattgccctggccagaacttccaacactatgttgaataggaatggtgatagagggcatccctgtcttgtgccagttttcaaagggaatgcttccagtttttgcccattcagtatgatattgggtgtgggtttgtcataaatagcttttattattttgagatacgtcccatcaatacctagtttattgagagtttttagcatgaaggttgttgaattttgtcaaaggccttttctgcatctattgagataatcatgtggtttttgtctctggttctgcttatatgctggattacgtttattgatttgcatatgttgcaccagccttgaatcccagggatgaagccaacttgattgtggtggataagctttttgatgtgctgctggattcggtttgccagtattttattgaggatttttgcactgatgttcatcagggatgttggtctaaaattctctttttttgtttgtctctctgccagactttggtatcaggatgatgctgacctcataaaatgagttagagaggattcccactttttctattgattggaatagtttcagaaggaatggtaccagctcctctttgtacctctggtagaattcggctgtgaatccatctggtcctggactttttttggttggtaggctataaactattgcctcaatttcagagcctgttattggtctattcagggattcaacttcttcctggtttagtcttggcagggtgtatgtgttgaggaatttattcatttcttctagattttccagtttatttgcatagaggtgtttatagtattctctgatggtagtttgtatttctgtgggataggtggtgatatcccctttatcattttttattgtgcctatttgattcttctctcttttcttctttattagtcttgctagcagtctatcaattttgttgatcttttcaaaaaaccagctcctgaattcattgatttttttgaagggttttttatgtctctatctccttcagttctgctctaatcttagttacttcttgccttctgctagcttttgaatgtgtttgctcttgcttctctagttcttttaattgtaatattagggtgtcaattttagatctttcctcctttctcttgtggacatttagcgctataaacttccctctacacactgctttaaatatatcccagagattctggtatgttgtgtctttgttctcgttggtttcaaagaacatctttatttctgccttcatttcgttgtgtatccagtaattacgcaggagcaggttgttcagtttccatgtagttgagcggttttgagtgatttcttagtcctgagttccagtttgattgcactgtggtctgacagacagtttgttatataatttctcttcttttacatttgttgaggagtgctttacttccaaccatgtggttaattttggaataagtgtgacgcggtgatgacaagaatgtatattctgttgatttggggtacagagttctgtagatgtctattaggtccacttggtgcagaggtgagttcaattcctggatatccttgttaactttcggcctcatcgatctgtctaatgttgacagtggggtattaaagtctcccattattattgtgtgggagtctaagtctctttgtaggtctctatgggcttgctttatgaatctgggtgctcctgtattgggtgcatatatatttaggatagttagctcttcttgttgaattgatcccttttccattatgtaatggccttcttttctcttttgatctttgtttgtttaaagtctgttttatcacactaggattgcaacccctgctttttttgttttccatttacttggtagatctttctccaaacctttattttgagcctatgtgtgtctctgcacgtgagatcctgaatacagcacactgatgggtcttggctctttatccaatttgccagtttgtgtcttttaattggagcatttagtccatttacgttcaaggttaatattgttatgtgtgaatttgatcctgtcattatgatgttagctggttattttgcttattagttgatgcagtttcttcctagcatcgatggtctttacaattttgcatgtttttgcagtggctggtaccagttgttcctttccatgtttagtgcttccttcaggagctcttgtaaggcaggcctggtggtgacaaaatctctcagcatttgtttgtctgtaaaggactttatttctccttcatgtatgaagcttaatttggctggatatgaaattctgggttgaaaattcttttctttaagaatgttgaatattggccccctctctcttctggcttgtagagtttctgccaagagatccgctattagtttgatggacttccctttgtgggtatgccgacctttctctctggctgcccttaacattttttccttcatttcaactttggtgaatctgacaattatgtgttttggagttgctcttcttgaggagtatctttgtggcattctctgtatttcctgaatttgaatgttggcctgccttgctaggttggggaagttctcctggataatatcctgaacagtgttttccaacttggttccattcgccctgtcactttcaggtacaccaatcagacatagatttggtcttttcacatagtcccatatttcttggaggccttgttcatttctttttactcttttttttttttctaaactcttctcacttcatttcattcatttgatcttcaatcactgataccctttcttctgcttgattgaattggctactgaagcttgtgcatgcgtcacgtagttctcatgccatggttttcagctccatcaggtcatttaaggtcttctctacgctgcttattctagttatccattcatctaatcttttttcaaggtttttagcttctttgcgatgggtttgaacatcctcctttagctcagagaagtttgttattaccgatcatctgaaaccttcttctcccaattcgtcaaagtcattctctgtccagctttgttccattgctggtgaggagctgcattcctttggaggagaagaggtgctcagatttttagaattttcagcttttctgttctggtttctccccatctttgtggttttatctatctttggtctttggtgatggtgatgtacagatggggttttggtgtggatgtcctttctgtttgttagttttccttctaacagtcaggaccctcagctgcaggtctgttggagtttgctggaggtccactccagaccctttttgcctgggtattgccagcagagcctgcagaacagcaaatattgcagaagagcaaatgttgctgcctgatcctgcctctggaagcttcatctcagaggggcacccggctgcatgaggtgtcagttggcccctactgggaggtgtttcccagttaggctactcaggggtcagggacccacttgaggaggcagtctgtccgttctcagatctgaaactccatgctgggagaacccctactctcttcaaagctgtcagacagggatgtttaagtctgcagaagtttctgctgccttttgttcagctatgccctgcccccagaggtggagtctacagaggcaggcaggcctccttgagctgcagtgggctccacccagtttgagcttctggctgctttgtttacctactcaagcctcagcaatggtgggcacccctcccccagccttgctgctgccttgcagttcgatctcagactgctgtgctagcagagagagaggctccatgggcatgggaccctccaagccaggtgtgggatataatctcctggtgtgtcgtttgctaagaccattggaaaagtgcagtattagggtgggagtgtcccgattttccaggtaccatctgtcatggcttcccttggctaggaaagggaattccctgaccccttgcacttcccaggtgaggtgatgccctgccctgctccgtgggctgcacccactgtccaacaagccccagtgagatgaaaccggtacctccattggaaatgcagaaatcacccatcttctgtatcgctcacactgggagctgtaggttggagctgttcctatttggccatcttggaacctctctagatctttcaagtaatagactgttcctgagggcaagggtcccccaactcccatggggaccccctccggtgctccccaggaagcacagaaatggaaactgcactgcaaaggtccatggcagcactgcccaccaaggcggcagacaattgctgccatttgtaagggcactggctgtgccagatatgccttggtttattgaggtgctctctgaataaacaagcctcagattccactgggtcttagtgctaccaattgctccaggttttaatgttgcaactacaggaatggtaagttttgtagctaattcattttctcgcccattaaggaaagagagaagaggtggccattcacttaattcagcaggtggagccaatgggctagtaaaacatacttttttcattttccctttctttaatttcctgcgtttcctgttcctcacattcagaatctgaatttagttctttacactcgtcctcatcttcctcatctgaatctgcctcatcatctgtttgaaatggctcaagagttgcttttattagtgcccatattgaccaaaccaagactggaatttttgctccatctttatatgctttttaaaaaatctcggccaattctctcccattcctccaactctatagtcccttgttctgggaaccatgggcaaaactgctttactgcactgaagagtgagtgataacaaattctgaggactaactttcactctccatcttcataataaatgccttaagaaatttcgataagcagaatgtctgctttcactttgtctcattgttaccctggttcttccaagtgctcagctttcctactgagcttcttttagacatcctcaggtgtcctttgacgatgcatcctctgctttcacacactctagcgttccttcagtggggtctttgtcgccccacattgagcagccaggaatgttggggtgatcagacccaacaccaggtcttgggggtgacaaagtccgacggagtcaaaggattgagaagtagacagtttgagagagaaaggtgggataccagggggccatcaccattgtggaggctgtgaaggccctgagctctgggagcccatgctatttattggtaatccaacaaagaaacaagtggtgagaatgtggaggtggaaaggacacattgcattaagcacatgatttacagctgtaatggtttagcatttatatggaacatgttctgctacttgagataatgggagtaggagcctaggaaggctagaagcaaaaagccagcaagtctagatacattccagaggacatgtcagacatgcaagccctgcctcagtttctcccgacactcagctttttcccaacaattgtcttagcaaaaactcagagctctgttctcctcataccttcctttagttttgaaggtatatttcagaagtaaaataatataattacatttaaaaactgaacattgattatttttaccctaacaacactacctgaggtactgtcagaatctccatccagaggagggtcaagaacaagggaataaaagaaaagcaacacctctatttgatagcagcattcttcacaacagccaagaggtggaagcaacccagtgtccaccatggatgaatggataagcaaaacgtgtcatgtacatacagtggcatgttactcagccttaaaaaagaagaaaactctggggtgggcacagtggctcatgtctgtaatctcagcactttgggaggccaaggcgggtggatcacctgaggtcaggagctcgagaccagtctggccaacatggcaaaaccccatctctaataaaaatacaaaaattagactctacctcaaaaaaaaaaagaagaaaaagcagaagaagaggaagaacaggaagaagaaaactgtgagacatgatacatgctataccatgtaggaatgttgacatgatgctaagtgaaataagccagtcacaaaaagacaaatgctatgtgatttctcttatatgagatgtctatggtactcaaatttaccgagacaggaagcagaatggtcgttgccaaaagctgtggggagagaggcatggagagttgttgtttaatgggtaagagtttcagatttcttaagatgaaagtcctggagagggagggtggtcactgcattgtacagcaacgtgaatgtgctgaacgctactgacttgtacacttaagaatggttacaatcgtaaattttatgtgtattttaccccaattaaacaaaattgtagccaagcatggtggctcacatctgtaatcacagcactttgagaggccaaagcaggtggatcacttgagcccagaagtatgagacaagcctgggcaacatagtgatatcccatctctaccaaaaaaaaaaaaaaaattagccaggtgtgatggtgctcacctgtagtcccagctactcagggggctgaggcaggaggatcatttgagcctgggaagttaaggctaaaggaagccatgattgcatcactgctctctagcctgggtgacagagcaagaccctgtctaaagaaaaaagggagctgggtgcggtggctcacgcctgtaatcccagcactttgggaggctgagatgggtggatcacttgtggtcaatagttcgagaccagcctggtcaacatagtgaaacccccatctctaataaaaatacaaaaattagccaggcatggtggcacatgcctgtaatcccagctactcaggaggctgaggcaggacaatcacttgaacctgggaggtggagggtgcagtgagccgagatcgcaccactgcactccagcctgggtgacaagaaagaaaaagaaaaaaaagaaaagaaaaaggccaaaattttaaagcagcaatatttaaatatgtaagtattcaagcaatattcaagtcgtatcttcctacacaagtttgagtggaaaaactctccccaccccccactatcttcactcctacccattagggtttgctctggataaggggagagcaaatcttcatactctcactttcttcttaatccggacttgtgagaagacacagcagtgtttaagaatatgaactgcaaataaaaaccagctttccaagctcctcctcattctccgtgtggtcagcgaggcacaaggtgaggattaggtggtttggagggtgccaacaaggactccaaaatggtggacaggaagaccccaggcagggtcaggaagtggaggaagagcaaagtgcaagtaaaattctgcatagtgaggtacaggaaagaggatgattcttccaatcatgtgggaagagtgaggtttttttacggcaaaggaaccttatttccaattatgctactttaggaaaatgttcctctttgttgacacaggttcccgctgcaccatccctgagcgttgtttgtccatgtgagctctatgtgtgggcttctgcccaagggttatcctcgtgggactgggaggctgtctgcaaagagaagggctgtgacttcgctttgccttgtgtgggagagctgcaagggccccaccctggggtgcctgtgcccagcctggactcctctgttggagctcctcagtgacattattctaaattaaagtcccactctgggaaagggattcctgcacattgccaggctctgctgcactgttcagggtctagggagggaggccaggagaaggcccgcctgtcagggagagctgtgtgtttccctcacatggcccatggaatcgaagagggccaaattcgaaaaacccaaagtaaggctaaacttagttatgcccatcagagaaccttcaccaagtatttgacgtttttcctcctttgattctgggaacggtatctggcatccagtttaaaggtactttttctattgtggaaataaatgaagatgaaccaaatgaaatcaagcaaagcctatttattgagagcctgctctaacaagggagtcacatgcaatcacttgtattttggaagagatgcgaaagcaggcagaggagtgggaaagcttcctaacagaagaaaggggcatcttgaccagaccccagagccacagcttcttgcactaccctgcactgtcctctactgtctctgtcctcaggtcatctttgtatgagagctgaaacaagaagacgaagggtcaccttttttgaccttagcttgggacgtgtgcaaagagtgacagagttttcactactgtgtgtctatccaggagccaccttgaaagctccacaagtattaatttggggattacaaagacacttttagcaagtaagcaaatttgcaaatatgggattcgcaaataatgagggtcaactgtatttgtaagtgactgctagggcctgtttcatggtaatctctttccccaagaatgtagaatgtttctttagcttctttgatagtttatttattcattaatgtatttattaagtacttattataagccaggctctgctttaatctgtgatgaacaaactagagattaaggtcctgccccgtggattttatatttgagtaagaaagacagatagctaagtctggagctcagggggtgaggcccagattgaaattatagattcacttgaccaaggtgaaacctggtgtgccccctcctacttcacatccccagacatacttccagaacatttctgttctgttcttgtgtataaactcttccttttgagcctctctccattgacgcatatcaacctctacttgtcttttgttgattttgaggccacttgcccattttactggcaagatactgaagaagaatcatactgacctggttctgctacataccagctgagttactttggtcaagctcttggacttctgagcctgtttcctaatttcagaagtggtgatatgatgtgttaggccctggtgggttgcaaggaagaggcatacacacaccacctttggtggtgaaggctgaatgttaactttgatggaaagtcatccaagcagccatattgtctctggccctagtactttcaaaaccccacagaacattaatttagcagtatttaggataggatttgagctctgaagacctatagtgtggttatttgttcatatggctgttttccatactagaccatgagctcatgagggcagggtctacagtctcatctttctatccctaggcattcagttcagtgcctgatacatagtaatagaggcacaaatgtttcaaaagttgaggaattttcaactcttcctgaaagaacaggaagatataaaggcttctcagagaaggtattatttaaggttttttttttttttttttttaagatgacatctcgctctgtcacccagtctggagtgcaggggcatgatctcagctcactgcaacctctgcagttcaagcaattctcctgcctcagcctcccgggtggctgagattacaggcatctgccaccatgcccaactattttttgtatttttagtagagatggggtttcaccatgttgggcaggctagtcttgaactctgacctcaggtgatccacctgctttggcctcccaaagtgctgggattacaggcatgagccacaatgccaggcctatttaagctgattctttaaagatgagtagaaatgttttccaggtgaataaaaccttgagacattattccaagcagagaccagcaggtgcaaagacacagggatatagagatgttgaagtttaccaaacactgctagatttagaaaacaaaaaggaaacaatcaaaatcaaaaattaaaattaaaaatcaccaaaaaaaaaaaaaactatgaatgggcttggtgagaggtcacgtcacaattgagtcaactatgaccgtagacactcagtaatttatggaagttttagggaaaaaccataacattctcaggttgttggcagagtatctagaacaatttagaaatacaggtattgaattctgagaataattacactgtagtgaaatcatttccttctctgcgcatgaagcatgtatgtgtcacacattgatcaaggtgctgaaaatcagactcttctcaaggaactcatgagcaatcaagggagatggatgggtgagcaactgattatcatgtgacaagtgaggtaatagagatatgactacaatgctatctaaagaagaagaaaggaattattcgtaatatatggagtgctggggaaagatttctgaaatgaagccggccaggcatgatgtctcacacttgtaataccagcactttgggaggtggaagtaggaggatccaggatgatctaggagttcgagaccagcctggtcaacagagcaagaccctgccatctctatatttgaaaaataaataaataaatttttgttaatgaagttatatttgagcaccatacaataataatgaagtgatatggagcgccatacaaatataggacagactgaaggaatatatgcagcttaatttaacattttttgaaattttatattgcagaagttgtacatatttactgttgtgaaattagaaagaattgacaggcaaggagggtggtctacaaagcactccatagatccaccatactgagacaatgcttaatgctttgatggatttatttattttatactttctatgcatatgcatgtattgtataaatacgtatgcatggttaaatagaaatggttctccttggtgttctgtttatccatttattgttgtgaagtaaatccccaaagagtaggtttgctttgcctgaggagtcttttgctacatactgctgtacataatgaaaactaaaaaaggggctaacttttcagccttgtgaccttatggtgattcaaacagaggcttcatcaaaggcagattcagaaatgaacttggtgtgtgtaggtggttatgcttgtcattattgtttgtaatagtatgatagggatgatttcagtgtctgccaacagggaactggttgaggttaagtaaactgtggtacatccaaatgatgcatactgtgcagttgaaaagaagaatgagaaagacctctgtactcatgtagaagaactcagatatattgtgcgtgttttttaaaaagaagaaggaatggtatcctatgtatggtatgctactttttgtgttgagagagaagagtagagtaagaatatacatgtgtatttgcaaagataaattctgaaaagatatataagaagccaattaaaagtgtttggctgtggaaggagaataagactgtgaatgggattttgctgtatacttttatagttatatttaaaatttttctgaactatgtatttgtacacatgacccttttaaaaataagtgaatgaaggaatgaagtaggattatgagaaagagataagaaaaaaggatctaaggggctgcccatctttttagtacccagtgaatattaatacataacaatagcaggaaaaattggaagagtagccccagtagggtagggagtcagcttttcctttgtcttttcctcaatttcatatattaaaaaatatatattctaagaacgataaaacaatttgaaataaaaatgtttccagatctcttgaaatgaaaggaagatggggcagctttatgtagagcacttcccaaaaatgggctggtttctttcaagaggcagggatgctagccttcatgggatacatacgggagaaaaaaataagaaaaagaaaagagatttaaatataaataaatgaaaataacacttctctctgattataaaggaaatcacattctttttgtaataatttagatgacaaatattaagaaaaatctttaatttgccactcaaaacattctggtttgttgctttttatacttttttatgcatgtaaacattttaaaaagtggaatcacaatagatagtcttctgtcacttactatattttgggcatatttctgtggcagtaaatatattctggcatcatcatttttaatagctggatgtatattaagttaatcattgccaccccagaggtgaattttcttacatatagattttaatggactcgagcaagcatttttggactgaattcatagaagtagaatttctggagggcaataagttttagagtctttaatagaaattttcaaattatcctccaggaaaagtggctcagtttatactcccaccaacagggacagagctccaggttcccccttccattcatcatctttgctgcctttgtacagaaaatatcattgttttcatgacatttccttgatttccggtgcttttgaatcttttttatatacctattggccatttttatttttgtgagaaatgcctgtttctccgttgcccattttctgttgaaaatcatttgtatttttctgagtaatttaaaagatttctttacaggctaagaatacaaaccttttatttgttattgaggttacaaaaactttctcccagtaagtaatttatcatttcattttattttttcttttctttcttcctacccttccctttccttccctttcctttcctttcttttcttttcctttcctatcttttcttttttctttcctttctttccttcctttccttcctttctttccttttccttccttcttactttcctttcctttcttttttttccttccttccttccttccctccctccctccttccttccctccctccctccttccttccctccctcccttccttccttctccctccaaaccccaaagtcacatttcaccaatttttatttggtcaaatttgaaagcattttaacttagtgattttagtgtaaacaggagcaggagagaatgtaattatctaggtcttgctctgtcacccaggctggaatgcagtgccatcatcatagctactgcagccttgaactcctgggcagaagcaattttcccacctcagcctgccaagtagctaggactacaggtgtgtgccaccatgcccagctgttttttaaaattttttgtggagatgtgaactcactaagcttccgaggcttttcttgaactcctgacttcaagtaatcctcccaccttggcttgtcaaagtcctgggattacaggtgtgagctcctgctcctggtcaagaatttagttttgtttgctagtggtgttcttggtatcttttcatatttgaggctttggtgctagtgctgaagtattacactcaccatccaaggttcacaggacttttgttttaatatggaacagatggaactgtttagttctgcatctttgcaggtatgcaaaatgtgcctaccaggactctgcttcatatccatggaaagcaagaagtaatacagtaaaactttgtctggctagaggctttgaaggaatggagtgttctggttgaattctattaacttggaagtatgaaggtgaaaaaaattcagaacttaaatttcctttgaatgcaatttgaaaatatagccaataattccacttttcttctctagtaagtttggacattctgatctacttggtgttttatgatagaacccctagtgtgcctgagacttactttgtgaagatacttttttaaaactttagctgtaagaggatgtaaatgactttgtatgagatcaagctggatgagaactaatacttgtaaatatactttttagactaaa

SEQ ID NO: 9976 - DNA, 188 bp, Homo sapiens
ttggcctcccaaagtgctaagattcttcagtatataaatggtttttagaaaataccaaaacccaattcctagaaagaccattaaaaataatttccctttaattatagacaacttgattatctaaaagcttttttttccataaatccgcttatgatttactccagaccattcatgacatgcttgtgagg

SEQ ID NO: 9977 - DNA, 569 bp, Homo sapiens
aagaaatccaaactacaggctctttaatgagatcttccaaattttaaatgtcatctcaactttttaaaatgaagattaaaaactgtgtgacccaaataaaacagacatgtccacatatgttttttagggaaggatttttgtatctgttcactgctgtattcctaggctaccaaatgaattcagcctgtaggcctcgaatttgcaacttctgacttatatgtaaataaataataaatgtattttttcttttttgagacggagtcttgctctgtcacccaggctggaatgcagtggcatgatcttggctcactgcgacctctgcctcctgtgttcaagccattctcctgcctcagcctcccgagtagctgagactacaggcgtgcgccaccacgtctgactaatttttgtatttttaatagagacagggtttcaccatgttaaccaggctggtcttgaactcctgaccccaggtgatccgcccacctcagactcacaaagtgctgggattacaggtgtgagccaccgcacctggccaagtgttgtattcttaatcatctggaaaaaaataa

SEQ ID NO: 9978 - DNA, 569 bp, Homo sapiens; identical to SEQ ID NO: 9977

SEQ ID NO: 9979 - DNA, 587 bp, Homo sapiens
ccactgaaacctcacaattcttttctgaaattatacatgctcagaacgtatacttaacatttatgctaaaccttttttctcacctctctgccagtgctttacatcattcattttctgaaattccactttccattttctttttccacaccagccataagagaagtgacactattctttggccttggctaataggtttacttccttggctcactgctttaaaatcttcttagcttaggcatgcctgtttatttgttcagtgtgtgaactttggatctttttgttcaggatcagctatttcacacatcgagtactacaaagcagagattacataaatacgtatacaaattgttctctatgacaccccccaagtaggtgctaacatgattattataatgcatttgttatccttttctatttgctcctaggtttttagaacttcagccataaaaatgggcagaattttccttgatcatatcggtggtacccgtctgttttcttgtgcaaactgtgatacgatcctgaccaaccgctcagaactcatctccactcgtttcacaggcgccactggcagagcatttctttttaac

SEQ ID NO: 9980 - DNA, 167 bp, Homo sapiens
ggaagcaggaagggctgatggtaaaccctgagggagagagtaaatctgatagccctctaatcactagagagataatagaatgcagtggcttggccacttctggaaagtcacagtctctttaattcatctataaaagtgaggtgataaatacctactttaaaaattgt

SEQ ID NO: 9981 - DNA, 698 bp, Homo sapiens
agatcacacccttgcctattactaaagatgaagggaaggatgtttattcagaagaacagagagcttgcctggaacagagctacttgcttgtatgttgggttctcccatatggagtgagtggacacagaaaaccatgctttctgccttgaccttgtacatatggcttatgtgacctttggcaaatcacttgctttctctgagtctcgttttcctcgtctctaaaaaaaaattaaaattgaatagaggatggtgtgagatttcagcaagattaaaaggtataagaggccagtccactgctgggatatggagtgtggtctgatgatccttttaaagaatggctgcctgggagttggggagtaggcggctgtcatatgaaagaccctgggccaggtgcagtggctcacgcctgtaatcctagcactttgggaggccgaggcagaaggattgcttgagcccaggagtttgagaccagcctgggcaacatggtgaaagcccatctctaccaaaaatacaaaaattagtcattcgtggtggtgcaaacttgtagtcccagctccccagggggctgaggtgggaaaatggtttgagctcaggaggcagaggttgtagtgagccgagatcatgccactgcactccagcctaggcaacagagccagaccttgtctcacaaaaagaaaaaagaaaaaaaaaagacttga

SEQ ID NO: 9982 - DNA, 164 bp, Homo sapiens
gttttaaacagcagtttcttttacttgctgtatacaggttgatggtggaaatcattacatacagatatgtcctgatttgcacagaatggtccattttagacgtgttgtcccagcttaactactaatcacacctccttcacttcaaacgtgtcctggttcagatc

SEQ ID NO: 9983 - DNA, 2142 bp, Homo sapiens
caccgggcgcggcctgctggtgaccccgcgccgcgtcgtgtccgggttgtgtcctgcaggccgaagcggcagccgaagccgtcctcggatgagggttactgggactgtagcgtctgcaccttccggaacagcgccgaggccttcaagtgcatgatgtgcgatgtgcggaagggcacctccacccggtgagtcccgggcctgcccctcgcgccgccggccggcggggtggcgaccagaggacgcccttgcggctgccgccccctcccatgacactggcggacccggcgggaggaggcagacggaggtggctgtggcgataggaactgggtcacattgatcgcaacccaggcgatggtttgcggtgaggggtaattgaagaggctgtaacgttttttgctgccaagagagaataaattatttaagggaggcattagctactgcgatttaattcgtatcgctgggtgtaatgcccctctccccattctgggtataaaaatgttggctgcattgttgtgttagtgtgtggggatcaaggaaaacccataaaatctctttaggagcaaaggatgtaatttaatttcgttcctaaagaaagaaaagtatctgattgcagaatacacaatatattaaaacttatttttctacatgtacttctggaagggtcagatcaaggttttatttagtgtttttattccagtactctaatattttataaataagtagttggagatgagcccagtcacaggaacagatttttactgaaagtacctttatatctttagtttgattaaatggcagtctcttagacaaatgagatgaaaagatctctgcctattttcagactttatttattgtaagcttgcagtataataactctgtcttttaaaaaatgactttgaattaagtgaataaagaaaatcatccaggaaattcagtcagtggcattcttaatctgtcagcacttagttatcgagctccttgattcttatacgaaggtaccctttgaattaaatataatcctgtgatttattacttaatatttagagaagatatgtattttgatattacaaagtccattagaaactaaactataacaataagcatactaatcttactgttgctttaaaaaagaaggcacatgtaatattgacatatacaaatattcagtagacgttagatttctaaaaaatgagatcttgattttttaaaaaacactttacagaattttattaagtttaaaatttagagacaggaatggttgacagtaacttatctgaaaaatttctcagtgaagctcgctggttttgacatgcttgttttttgtaaatcatcatatgctttttgtatattcccacaattgataaaatatttcgtacatttttcatattcaaaaagcaaactttcaaacgtatgctaaatttaagggattacaacagaacattccaaaaagaaaaaaagtatttgctaaaatgattgtggttactatttttggacccgtgatttgtgatttaagtattttgaaaagcagagtatcttcttggctgtgtaaggttggagttggtttagagtatatttgtgtatctgtgttagtactttgtgctttttaaaatgctcaataagcaatttttagaaaattcgttttttggaggcaggaacattaaagtggaaacaattataatcttgatctctggtactatatattattgctttttgttgttccctctctattttcttgtagccattagaaaaatactgaaactagaagagcctatatgtttatttgcagggacagcaaggaaggggggaagctggtgtcctactccacagccagtcttggggttagaggaaccctgagaaatagagtaggtggtggcagctcagaagagaagaaacaggctgaatacctggcacctggaagaagaaggaatatagtacacaggggagttggcccaggacagagaagtgggcctagtttaaaagaggcttgaggcccacatgggggcccctgacattttttttttttaccagtacatctaagctcttgtagatccaatttttagtggtggaaacattacttgaggaggactcagagaagcattgtcatttggattgaaactgaagaggctctgggcaactcaccag

SEQ ID NO: 9984 - DNA, 14550 bp, Homo sapiens
cagtttccttcagaatgctgcaaaactatatgctacagtatattgtattccatttgcagaagaggtaagatattctttaagccttagcaagtgatgcaaaaccaaattagaattagatgactgatgcactaattgcatcaaaacatgtttgtttgttataagaatcattctttttgatacagaatttttattgtatttttacccatactaacataatggaagctaaaagctcattgcagtattgctaagtagaagtcggatttttccttctgaattgaagcagtgaaacagcattatttgttaaaagcagttaaactttgttttaagaatatttataacctgcttagcagcttcagttatcctagttattctaaaaagccacagcaaaccatttcatcgcaattttgaaatactgcgtagagattttctttgttaacatttgtttgttattttgtgataatttatgtgcttttcaggaaatctgaaaatgctcccttatattgacatttcttactttagcatcatactcattctcttaaacatcatcttcattgactaacatctaaagagcctcatacggttttgagaggcatctcttttcttcacaaatgcatattctagctaagtaaattgctgtacttttaggtgggctaaatagagaaacatgaatcagatcccataattaacactggctgttttggattcagataacaatatctgttttagattaatcctttttggaattcatacaaataaactgtaaatatttggtaaaaatagtggcattcagtctgatattctttttgggaaaatcagtggtaatttagtggtgagtgtggtaattgacctcaaaagcactaagtctcagcctttgccaagcaacttctcaatgacaaatgtaaatacaacccatagctttaaattcatataagttcatctttaaccatttaaatatctccctccttcttaaggtatgaattccatttacttattttacttattgagtataacttacttcagggaactttgtaaaacattaaaaacataaaacataaagctaagggaattaaaactgactgatcaagtcactcagttttatatttacaaccagtcctaaaaatgccttttaaaaaatttgcagaaggactaaaatttcaagtttgttgactaataagtacttttttaccccttaccttctcctcccccataacctttatggggggatatttttatagaaataaagataaatgtctcaaatggatgtctacatattcagataatgaaatattcatatattgtaatatgattaaggaccttttgtaggatatttttagctttagaatttagaagaatatgtttgttggtaaaattacttttttaaaaacaggacttatcagcagatgccctcttgaatattctttcagaagtaaagattcaggaattcaagccttccaataaggtatgtttaaaaaatcattcattcagcaaatagtttgggaatttggacttgtaccaagtcccattctaaacctggagaatatcacaatgaatggttcttgctcttgctcttgtcagtgcaacttgagtttgaagtagatttgtcagaatcacaaactgttgattaatactaattttattctagtgtggaattttaaaaaagatcagtatagacttagattgtatgagctactcagttaatatttttttatgcccactatatcattgtgggtattaaaaattagatatattggagttctgtcagtgaacaagatacataaagatcccctgttgttatagagcttacatgcctttgtgagaagatagataataaaatacatacatgaataacataataataccttctgaaggaatgtataaaatacattggaccaatgtattttgggcggagagggactataaacaaaaatgctaataagtacataatattgcagtgtgagtgtaagtgctaagaaggaaaaatacaacagggaaaagaaagagtgatggagctggtataattttatatgggatggaagtgaggaaaacctctgataacagtaacattttagcagaaacctgaaggaagtaaaggaatagtgaaagagcaatgtaggcagcagaaataagtgcagagaaaggccttgaaaagcttttaaggtcaggactcgtctagaagagaatatacaaggggaagagtcttaaatgaggaaattacagagatagttggggctatgataaagaaagaatattttcttagttgaaataagaagctagcttagtagctcagagtgaaggggataagaagataaaggaagtaagagcaaagaaaagaaggtatgaaataattgtccagtgaagtggaagagtcacttaattaaaagatgtagtaaaacgcaagacaatactgaagatccacttaatgttaatctgcttaatgtatcctactaaatgtggctggagaaagggtaatgatcttttctccagccagaatttagctgcttgggtggtattatactgtataatggatggaaaattggatataactagggttgggattttgccaggcaaatacattgaaaaaaaaaaaaaaaagcaatagggagtattggtaaagatggaacatgaaatttaggcaatgtaaataaaaaagtttgaaaacttttttttcttttttacatgttcaatatatgcctttcttgtatgttctctaaaaatcatccacaaaatttagctataccagaaaaggtggagtaatgaccacctccctgcaaaattcaagaaagaagtgacgtgtgcagtctttcgttctgcgtttttattttaggaaaaaaaaaaaagacttgtagggcagttgattttgcccaggtagatggatttgcagaacacaatgtttatgacttatagcctataaagaataaaaatagggtgaggataaacagaaatcccaaagaaggttcccagcccatgtttccaagggcaaaactagagagaagccaaggaaaaatgctttaactttactttccgttattgctcttgcttcggtatgttttctggcttgcattgcttctatctgtgttaaagtctgagggtaataaattctcctgagcaatttaactacagttttaacatgaactgtgggctttttcacaactccctaaaggagctcacaccgaagtttcaggtatggtactgctggttacagatgtcacagccaaaaatatcaactagccattcagacaaacaaaagtttctccttcctggactccttaatatttcttaattttttgtaataatgtttaatttgtaaaacgatgatttgagtgtatttttaaataaatattacttcatgataatgaagctaatttcttggtttgagaatattaatttccgtgccctcagggaatatctaataagtaatttcttaaggttaaattacttgtggtatgtactcccttaatcctaccaaactttctatatgaaagaaggcatattcttaaggaaaaaacttaacagcagtcagtgaatatttaaaggatggccatattatatatcttatggattgctttagtttccttgatgtgaagcagctctgtactagttagagcaaagcaacatgcgtttaaagtagatttgtcagaatcacaaagtgttgattaatactaattttattctagtgtggaatttttaaaaagatcagtatggacttagattgtatgagctactcagtaaatattttttatgcccactgtatcattgtgggtattaaaaattagatatattggagttctgtcagtgaacaagatacataaagatccctgttgttatagagcttacatgcctgtgcgagaagatagataataaaatacatacatgaataacataataataccttctaaaggaacgtataaaatacattggaccaatgattaataatctgatcaaaatatatagagaaaatattttctctttgtaatttgataaaacagttaaatggtaaccaaacagatgcaggaaatgataacattaataaaaatatattcatatattcaaaggttgttcaaacagatgaaactgcaaggaaaccagaccatgttcctattagcagtgaagatgagaggaatgcaattttccaactagaaaaggctattttatctaatgaagccaccaaaagtaagggaaaatctttataaaaatgttttgaactggatgagtttttattttcactaagctctacacctaagaatttgtggaatttaatcacaacaataataatgatgacaatattgattgatttcatgatcatattaaagtcagtgttcatctttaactgtgactaaattcatcatcttccccactattgccctactctcaaagattgaagtctaattctccaaatcacattaactgcattgttgttgtttttctgattgttttagttctttagatggtgagcaggtctaaaaccatgaatgaaaagctctgtttttaaggaattaaaaattcagtttaatggggtccttgtggaaactaatctttggacagacccatttaaatcactttaggataaagaactataaacagaaatattcttaggttcttagtctttagtaattaggttcataattactgacagggaatacagaatgacctatatatacttccttgctagatggacttaaatataaaaatacaggaaaactgaatttttaattccttaaaagcagccatacactcatctgttttgacctgctcaccgtcttttagttttataaatcagtggtttccaaacttttgagattttaagcatggaccagtagaatttcaggaaaaataacccagaataacaataattagaaggatcttgggaaccactgatctacaaagatttcagaaattacttattttaatttgaccaactgaccctgttcttagttaccagagggaaaatgtttcagagtcggatttatggaataaatttttgaactatacctaatgttggcttttttattgtaaaccacttgataggagatgtgcagtacacaactttcttattttgctatttattaaaaagtttttttaaatacagaaacgtctctagtttagtggcattaaaaccatcgtttttttttttttaattaaaaaaaattggctctctttaatcatgggaaaagctgtttttgtggccttcaataacattagttgcctgaatttttcttatgtttctcagtcattaaaaaatataaaaaggaatctttgaaagttagtaaattcacattgctttttacctagtaaaatctttactgcttgctgtggaactttgtttatctggttggtataatcaggtgaccttcagatggcagtgctttcatttgaaaaagatgatgatcataatggacacatagatttcatcacagctgcatcaaatcttcgtgccaaaatgtacagcattgaaccagctgaccgtttcaaaacaaagcgcatagctggtaaaattatacctgctatagcaacaaccactgctacagtttctggcttggtaagtttattattccttgaataaaaatgctcctttttcattgcctcttccctgacttccccgtcataccaacccagtcactcagagatgttagagagggaaggataaatattggatctcataatttaaaatttcaaaatattttctgaaaatgcagtcatctgtattgtgaagtattacataaatatacatttttaaaataaaaaataagctcaagatagattatgatttttcttataggcaataatcttttcactgatctttacgtcattcatacaaagcaggtactctgtttttcttgaataaaatgaacttccctaatctttattcataatgattcagaatctttaagtgcggccctagttattataccatattacatcattactctatgtaattatctatgaagctatgtagttatttacccctgtattaagtgattttagactgttgttattttttgagttacagcatgtgctttcaaaatagggagactgtatggttgaattaatatttttttaaataactgttaacatgtatagagtaggttgaaagtttgaaagtataaaatatactaaaagtatacagacctgtaataagaaatttatattactatagtcccatagctgcttttactatccacagagaaatgcttgaaaacgtgaaagttgaatagatgcaattaaaatcacggatagttttaggctgtttatattatcagatcaccttcttttatctaggttgccttggagatgatcaaagtaactggtggctatccatttgaagcttacaaaaattgttttcttaacttagccattccaattgtagtatttacagagacaactgaagtaaggaaaactaaaatcaggtatgtatgaaagtctatttctcttgtataatgagaatgaaataaaatattttaccttttaaaagggaaaaatactagcttcacctcttttttcttctattgtgtatgtgtaaatttttgccatcacttcaagatcagctcaaacctcatcttcattaaatatttctgactaaagtagccaaagaacccttacagcactttatctgccacattatttggcattatggtttcatctgtgtctgccagatgaattagaaggtaccctggtgtctgactgtaggtcatgagatttagaagaattccacaagcttgagacaaagcagaacaattcctgggcctgtactttttagttttcagattggcaacaaccaaaaacttgaaaaaaaacctaccttaacaagggtgtgagaaagcagacactctcatacattactaatgagagtacaaaatactataatccacagtaagggatatatagcactatatttcagatacatttgcacaagtctcaaactatatatttgcaagataattattctggcattatttatcgtggccaatgattagaataaccgaagtgtccagtaatggggtactggaacatccacacagtgaaacccattttaaaaagagagagacaacactgtcttgctaaaacatactgatttataatacactggaaggatcagcaaggtactgattaaaagtggttatctatatgatgtgatgaagaaataagattatggaatattttagaagatatattatcctttatttccccacattaatttctagcctgatcacaaataatggacttctgaaagtgggttttttttgtgtgtgtgtcatcactaaaaggaagaaaatttcaatgtttctgttctgaatatttttctgtaacagaaatggaatatcatttacaatttgggatcgatggaccgtacatggaaaagaagatttcaccctcttggatttcataaatgcagtcaaagtgagatacttttgttcatttagttcattagtagctttatgtctggtttctgttttgtttttatttataattttattggaagttataattatttaccatgaatttgctttttttactggtcataaaacattgtttacgaacaatgttaaataagcattttatgtttgagcgaggctttcattgtttcttttttggatattcacttttaggagaagtatggaattgagccaacaatggtggtacagggagtcaaaatgctttatgttcctgtaatgcctggtcatgcaaaaagattgaagttaacgtaagtattcaacattatatgcagcgattaacaagaatttaaatgtaagttgatgcacactaaaaaattaaatatagaggttactataattcagataaaagcattagtcttgtctaatgacattaataaagacagtgaatctgccaggtgaaggccaacaggctacctctcgagagattcagctcttcagttaataggtttagaaacctgatttggccagtacacttaagtaaaagtggatccgtctcttatgttgagacacttaatgaccaggcttatgagtaatctaactgccaaatcactatttttgttcatttattcaacaaattattgtttaaggtgccagctgtgtgccaggtactattctagtcattagggagatagcagttagcaaaccaaagttctttcctacttaaggagtttgcataacaataaggcaagtatgttaggtgatagtaagtattatggagaaattaaagaagaataaagagaaaaggaaatatggggagttgggggtgttgagttgctatattatactgagtagtctaggttttccctttgcctatcatagtctcacctgttaaggtggaatttgagcagagactgaaaggaagaaagaaccaaagaaagctaaagtctttatcgtggtctgcaagactctaaatttagattcctagttatccttctaagttccttccttactttcccttcacaatattccagctacactggcctccttatttgtccttgaatactcactctaatcatgctccagcatgggacctttgctttagttgttccctctgcttgtaactctgagacagtgacctggccaagtctcacccctggtctttgcacttcctaaagaggcctcatttaatactgcaacctgtcctcagccccagtctagtatgtctagtcccctttactcttctctactttttctttttttcagagcacttattactgtcctatgactgctgtgctgctgtgtattttgcttatatttattgtttgtttgtttttgagacggagtctcactgtgtcgcctaggctggattgcagtggcgcgatctcagctcactgcaacctctgcctcctgagttcaagcgattctcctgcctcagcctcccgagtatagctgggatgacaggcacccaacaccacacctggctaatttttgtatttttagtagagacggatttcaccatgttggccaggctggtcttgaactcctgacctaaggtgatttctcccgcctcagcctcccaaagtgctgggattacaggcgtgagccactgtgcccggcccatgtactgtatattagctatttacctgctactagaacatatatttcacaagagtgggaatctttatttgatcttgtcactgttgtatctcaagcacttagatcaatacctggcaaataaaaggttaccaacaaatatttgtcagactagtaaatgaatctctgcatgatggttgtgtttaacgtatctattggctttaactatgataatcagttgaggttaatcattcttaaattatgatctagtctgaattatctataccttaaaaagtaaaactactattttattagctaaggcattaatttgccttatattatttttcattaggatccctcagtatcttttggatcaagcaaggctagtgtttagaattcctttattttatgctgcagtggactgtacgtgatcataaagtgtattgactagtggagtttaaaatttgcggcaggttatttaaaaatgcttttaagatttggccaatatttgaaacctccagcatgataatatttttcattttattacattgaccttttagcaagtatttattgagtacctgttaagtactgaacacattaagtcagtcagtgggattatgattaatagcatgaggttggctttagaaagacctgggttcacattcttgctcagctgcttagttttgttaccttgagtagcttttgaaacttagtttcaaaaagctacaaatccacaaatagggatgactgtgcccatagttgagcactgaaataatagtaagggctaatagtgtaatggcatgtaagaagtattccataaatgttagtcctgttaatattttgttatcatacatggtcatcaagccctgccctcaagcagttcacagtctattaaaggaaattgattcctagttatccttctaagttccttccctactttgccctcacaatattccagctacactggcctacttatttgtccttgaatactcactctaatgatgctccattgtaggacctttgctttagttgtttcctctgcttgtaactcttgagacagtgacctggctaggtctcacctctggtcatgttaatcattaaagtataattgaataactgtgataatgaaaatttttacagagtattgtgctaactcagacctctagttcagggtagatttcatttgagctacctttgaagaaggattattccaggcaaaagcaacagtctttgcagctaaaaagagcatacatacaaaagtaaagctactgttatattagctaaggcattaatttgccttatattgattttcattaggatacctaagtatcttggataaattaagagtagtatttagaattcctactaaattctgaatttgggaatttagaattcactttttttttggaatgactcaagtatgaggtgatgatcatgaatggtggaaagaatgaaaagtttatgtacgggacaaaatatctttgtgaaatggaaagagctactgaggattaaatcgatattgttcagagcctggcatgaagtaggtacacagtgtatgataaaattattaggcaggagaatacatcaaatttatattttaagagaattctaggagcagtgtagattggaagtagaaaagagactagagaaagctagctagaagccaatacaatgatgtaaggggtgtgtagatgatgacttcatttaaggcagtagtggctatagcaaagagtgatttttcagtaaataggataaagattggacataagggaaaaagctaagaatgtcttttactttgtatttctagcttacattttaaggtttaaattctagcttgcttttttactgtttacagagaaatgcttgaatttatgatgcctccaaacttaagaggaagtttaggaggaaaatcaattttttaaaatcgttgcaacctctgtctcccaggttcaagcaattctcttgcctcagcctcccgagtagctgggattacgggcatgtgccactgttcccgtctcgtttttgtatttttagcagagatggggtttcgccatgtgggccaggctggtctcaaactcctgacctgaggtgatctgcctgcctcagcctcccaaagtgctgggattacaggcgtgagccaccacgctgagcctttttttgtcttttaataaatggtttgtattctttatcatgaccagtgtgtccaaatttattcactgttaggtaaatgagtgtcttgagtataaatgagttcagaccttttagtaaagaaaaatgaatatgtgaaagcagattattattagatgttaaagtctagatacaagtccaggttctctggatggcattagtcagcaaatcattttttcattttatagaatttaccaaagtattcattcttgcttatttttcttagaatgcataaacttgtaaaacctactactgaaaagaaatatgtggatcttactgtgtcatttgctccagacattgatggagatgaagatttgccgggacctccagtaagatactacttcagtcatgacactgattaatacaagttgtcttaacgttactccaggaccacttgattttggaaagagtgcacttaattcagaagctaaagaaaatcagttcataatactatggatttctctttcattaagccttaattttaagggaaacatcagtaagaaactgcactgaagaattataaaacattttggggcatagcatacacttgtctaacggttcacacgtggctatgatcacaagcaactttgaactggaatgctatttacaaaagttttgtgtattaatctgtgtattaatctctctggataaaaagaaggaaaaaatatgtatgaccagaacagatatggatgaagaaattgaaagcaacgaatgcaactattcaaaaagtttaattttatgaatttcttttttgtttagtcttgaagactgattttctatgcaaatagtgtttggcatcctgcacctctgatatgatttggctttgagaatttaataccactgggaagaagtatggtagtggtggatgaagggtggatattttaaattgtgcagttacagtttactgtcctattacctctgctcgtttaaccagtttgttatatcactgtgtccccaaaatcaggatttttgttgatagcatcagtgttgtaggagcaataggtcagatgagacatattaacttagactaaacgtgaacagtattatatggactctcacaacgctcttagagaatccgtgaatgtgaacagacaaatgtggctaaccatttgattcttcagtatgccttctaatgtggctattttatttatgtgagactctaaacctgattgtcctaatatataaaactaaaagattttgtaaagggagtgtctttagaaatagatgaaatgtagaatgttaaaaattattgctagggtagtcttttttttttccagaaacctaattagggtattaaattttgtgttttttttgttttttttttttaaacagaagcatgttatttcattcccattcccagaaagggagttaatgaagataaaaatttattttttaaggtctttattgagagaaactttgttttctgatatgaactattgcagatgtttttataaatactttcattaaaatgatgtaaacagtagtacccaacactgtaaactcagtgaaaatagtaaatgattcttttattactaagactgtcatgcattctgaagcagttggcttttttttaaccataggaagtaatttccctctagctcctttccttctactctcctgctcagaccattagtaggtactttgttaaataaaaaactagattaacatcaatattactccaatttggtatcttttacactatgtattatacctactttctttttatttcatttacaaatagtttaaattactttatcaaccagctgtattgtttccctcttgtaaaagtaccatcaagtggggaaaatgtatgtggaagtggagagtgaatttgtatgactaaaggataatctgtacatggggaagtgggcaaaagtggataggatgaatttaaagaaaatgactacctttggaaaaaagaaattaaattttgttcacatatcctaccctttcccattgtgcatatcccaagtgtcatatttaaaactaaggttacttaaaacagaatccaggaatatcaaggctctgtggcttggaattttagaggataggactaataaaaggacttttgcaaagaaggcttttttccacgttcactttgttttgtgttctttgaaagtaactgatacttttcgggtagttaattcagcagtccataaatatgatccagtaacttgcttatattttattgaagtctcgacagctcttcagaagtaaatttagaacgatgctgtcagttcatatttatagatattagtgttttagcagataaaacaaaatcaacaaaaattaagttcattttgtgattaaacctgcaaccatttttccattactttttttctatagttaatggttattgccatgatttcttctgtttggttctactaagctagaaagccagggtgaagttaatgataattcccattattttatttctgtaccatgagattgctgttgatgactgaaataccaggtgcaaaaattaatgatttgatttttgtacagtttcaatgagtattttttacttattaaaaataaattaagaaatgtaagaatatctttgtaaatcatgtttcataagttgactccagagattctgattttgctgtttattttgtgagtaatgttgctttggtgtttcctgattttcaagtttgcaatcatggagatacagcagttattaggtgtggaaggacattacctcaaatgtcctcagatggctccaggaaattcttttaaaacagttggagagaaatagtcgtgaccatgtaaaacctagaggatctggtaaatcccatactactggttagggatttgtaaagtccatttctttttagagttcaaagcagttctgttacttgtccataagttcctcataaattgtcccaaaggtaggacatggaaataaatgtatatctttattttttaatctactatgtcacactctggtgatattcatggaacattaaaaaagcaactatgtttattttataattagtaaaatgaagatagaaaattgttcttttgaaatttttagggaaaaaaaaaatctcgtgacctaaatctttccactataatgaatattcattgtgattgcaaatatctaattttatataatcactgtgtatggatttagcgattttacttttcatagattcaaaaacatataatctgaatgctttctctgaaaaaaaaaaaatcagagttgagctcttgaggatcagagttaagtatccattgataatatgtgttcattttgctctatgtcataactttgtttttttattgagaaatatatatttttcaaaaacacatatatattcaaaaatacataaaatataaatatgcagttcaaggaataattttaaagcaactatat

SEQ ID NO: 9985 - DNA, 10478 bp, Homo sapiens
ggtataatcaggtgaccttcagatggcagtgctttcatttgaaaaagatgatgatcataatggacacatagatttcatcacagctgcatcaaatcttcgtgccaaaatgtacagcattgaaccagctgaccgtttcaaaacaaagcgcatagctggtaaaattatacctgctatagcaacaaccactgctacagtttctggcttggtaagtttattattccttgaataaaaatgctcctttttcattgcctcttccctgacttccccgtcataccaacccagtcactcagagatgttagagagggaaggataaatattggatctcataatttaaaatttcaaaatattttctgaaaatgcagtcatctgtattgtgaagtattacataaatatacatttttaaaataaaaaataagctcaagatagattatgatttttcttataggcaataatcttttcactgatctttacgtcattcatacaaagcaggtactctgtttttcttgaataaaatgaacttccctaatctttattcataatgattcagaatctttaagtgcggccctagttattataccatattacatcattactctatgtaattatctatgaagctatgtagttatttacccctgtattaagtgattttagactgttgttattttttgagttacagcatgtgctttcaaaatagggagactgtatggttgaattaatatttttttaaataactgttaacatgtatagagtaggttgaaagtttgaaagtataaaatatactaaaagtatacagacctgtaataagaaatttatattactatagtcccatagctgcttttactatccacagagaaatgcttgaaaacgtgaaagttgaatagatgcaattaaaatcacggatagttttaggctgtttatattatcagatcaccttcttttatctaggttgccttggagatgatcaaagtaactggtggctatccatttgaagcttacaaaaattgttttcttaacttagccattccaattgtagtatttacagagacaactgaagtaaggaaaactaaaatcaggtatgtatgaaagtctatttctcttgtataatgagaatgaaataaaatattttaccttttaaaagggaaaaatactagcttcacctcttttttcttctattgtgtatgtgtaaatttttgccatcacttcaagatcagctcaaacctcatcttcattaaatatttctgactaaagtagccaaagaacccttacagcactttatctgccacattatttggcattatggtttcatctgtgtctgccagatgaattagaaggtaccctggtgtctgactgtaggtcatgagatttagaagaattccacaagcttgagacaaagcagaacaattcctgggcctgtactttttagttttcagattggcaacaaccaaaaacttgaaaaaaaacctaccttaacaagggtgtgagaaagcagacactctcatacattactaatgagagtacaaaatactataatccacagtaagggatatatagcactatatttcagatacatttgcacaagtctcaaactatatatttgcaagataattattctggcattatttatcgtggccaatgattagaataaccgaagtgtccagtaatggggtactggaacatccacacagtgaaacccattttaaaaagagagagacaacactgtcttgctaaaacatactgatttataatacactggaaggatcagcaaggtactgattaaaagtggttatctatatgatgtgatgaagaaataagattatggaatattttagaagatatattatcctttatttccccacattaatttctagcctgatcacaaataatggacttctgaaagtgggttttttttgtgtgtgtgtcatcactaaaaggaagaaaatttcaatgtttctgttctgaatatttttctgtaacagaaatggaatatcatttacaatttgggatcgatggaccgtacatggaaaagaagatttcaccctcttggatttcataaatgcagtcaaagtgagatacttttgttcatttagttcattagtagctttatgtctggtttctgttttgtttttatttataattttattggaagttataattatttaccatgaatttgctttttttactggtcataaaacattgtttacgaacaatgttaaataagcattttatgtttgagcgaggctttcattgtttcttttttggatattcacttttaggagaagtatggaattgagccaacaatggtggtacagggagtcaaaatgctttatgttcctgtaatgcctggtcatgcaaaaagattgaagttaacgtaagtattcaacattatatgcagcgattaacaagaatttaaatgtaagttgatgcacactaaaaaattaaatatagaggttactataattcagataaaagcattagtcttgtctaatgacattaataaagacagtgaatctgccaggtgaaggccaacaggctacctctcgagagattcagctcttcagttaataggtttagaaacctgatttggccagtacacttaagtaaaagtggatccgtctcttatgttgagacacttaatgaccaggcttatgagtaatctaactgccaaatcactatttttgttcatttattcaacaaattattgtttaaggtgccagctgtgtgccaggtactattctagtcattagggagatagcagttagcaaaccaaagttctttcctacttaaggagtttgcataacaataaggcaagtatgttaggtgatagtaagtattatggagaaattaaagaagaataaagagaaaaggaaatatggggagttgggggtgttgagttgctatattatactgagtagtctaggttttccctttgcctatcatagtctcacctgttaaggtggaatttgagcagagactgaaaggaagaaagaaccaaagaaagctaaagtctttatcgtggtctgcaagactctaaatttagattcctagttatccttctaagttccttccttactttcccttcacaatattccagctacactggcctccttatttgtccttgaatactcactctaatcatgctccagcatgggacctttgctttagttgttccctctgcttgtaactctgagacagtgacctggccaagtctcacccctggtctttgcacttcctaaagaggcctcatttaatactgcaacctgtcctcagccccagtctagtatgtctagtcccctttactcttctctactttttctttttttcagagcacttattactgtcctatgactgctgtgctgctgtgtattttgcttatatttattgtttgtttgtttttgagacggagtctcactgtgtcgcctaggctggattgcagtggcgcgatctcagctcactgcaacctctgcctcctgagttcaagcgattctcctgcctcagcctcccgagtatagctgggatgacaggcacccaacaccacacctggctaatttttgtatttttagtagagacggatttcaccatgttggccaggctggtcttgaactcctgacctaaggtgatttctcccgcctcagcctcccaaagtgctgggattacaggcgtgagccactgtgcccggcccatgtactgtatattagctatttacctgctactagaacatatatttcacaagagtgggaatctttatttgatcttgtcactgttgtatctcaagcacttagatcaatacctggcaaataaaaggttaccaacaaatatttgtcagactagtaaatgaatctctgcatgatggttgtgtttaacgtatctattggctttaactatgataatcagttgaggttaatcattcttaaattatgatctagtctgaattatctgtaccttaaaaagtaaaactactattttattagctaaggcattaatttgccttatattatttttcattaggatccctcagtatcttttggatcaagcaaggctagtgtttagaattcctttattttatgctgcagtggactgtacgtgatcataaagtgtattgactagtggagtttaaaatttgcggcaggttatttaaaaatgcttttaagatttggccaatatttgaaacctccagcatgataatatttttcattttattacattgaccttttagcaagtatttattgagtacctgttaagtactgaacacattaagtcagtcagtgggattatgattaatagcatgaggttggctttagaaagacctgggttcacattcttgctcagctgcttagttttgttaccttgagtagcttttgaaacttagtttcaaaaagctacaaatccacaaatagggatgactgtgcccatagttgagcactgaaataatagtaagggctaatagtgtaatggcatgtaagaagtattccataaatgttagtcctgttaatattttgttatcatacatggtcatcaagccctgccctcaagcagttcacagtctattaaaggaaattgattcctagttatccttctaagttccttccctactttgccctcacaatattccagctacactggcctacttatttgtccttgaatactcactctaatgatgctccattgtaggacctttgctttagttgtttcctctgcttgtaactcttgagacagtgacctggctaggtctcacctctggtcatgttaatcattaaagtataattgaataactgtgataatgaaaatttttacagagtattgtgctaactcagacctctagttcagggtagatttcatttgagctacctttgaagaaggattattccaggcaaaagcaacagtctttgcagctaaaaagagcatacatacaaaagtaaagctactgttatattagctaaggcattaatttgccttatattgattttcattaggatacctaagtatcttggataaattaagagtagtatttagaattcctactaaattctgaatttgggaatttagaattcactttttttttggaatgactcaagtatgaggtgatgatcatgaatggtggaaagaatgaaaagtttatgtacgggacaaaatatctttgtgaaatggaaagagctactgaggattaaatcgatatagttcagagcctggcatgaagtaggtacacagtgtatgataaaattattaggcaggagaatacatcaaatttatattttaagagaattctaggagcagtgtagattggaagtagaaaagagactagagaaagctagctagaagccaatacaatgatgtaaggggtgtgtagatgatgacttcatttaaggcagtagtggctatagcaaagagtgatttttcagtaaataggataaagattggacataagggaaaaagctaagaatgtcttttactttgtatttctagcttacattttaaggtttaaattctagcttgcttttttactgtttacagagaaatgcttgaatttatgatgcctccaaacttaagaggaagtttaggaggaaaatcaattttttaaaatcgttgcaacctctgtctcccaggttcaagcaattctcttgcctcagcctcccgagtagctgggattacgggcatgtgccactgttcccgtctcgtttttgtatttttagcagagatggggtttcgccatgtgggccaggctggtctcaaactcctgacctgaggtgatctgcctgcctcagcctcccaaagtgctgggattacaggcgtgagccaccacgctgagcctttttttgtcttttaataaatggtttgtattctttatcatgaccagtgtgtccaaatttattcactgttaggtaaatgagtgtcttgagtataaatgagttcagaccttttagtaaagaaaaatgaatatgtgaaagcagattattattagatgttaaagtctagatacaagtccaggttctctggatggcattagtcagcaaatcattttttcattttatagaatttaccaaagtattcattcttgcttatttttcttagaatgcataaacttgtaaaacctactactgaaaagaaatatgtggatcttactgtgtcatttgctccagacattgatggagatgaagatttgccgggacctccagtaagatactacttcagtcatgacactgattaatacaagttgtcttaacgttactccaggaccacttgattttggaaagagtgcacttaattcagaagctaaagaaaatcagttcataatactatggatttctctttcattaagccttaattttaagggaaacatcagtaagaaactgcactgaagaattataaaacattttggggcatagcatacacttgtctaacggttcacacgtggctatgatcacaagcaactttgaactggaatgctatttacaaaagttttgtgtattaatctgtgtattaatctctctggataaaaagaaggaaaaaatatgtatgaccagaacagatatggatgaagaaattgaaagcaacgaatgcaactattcaaaaagtttaattttatgaatttcttttttgtttagtcttgaagactgattttctatgcaaatagtgtttggcatcctgcacctctgatatgatttggctttgagaatttaataccactgggaagaagtatggtagtggtggatgaagggtggatattttaaattgtgcagttacagtttactgtcctattacctctgctcgtttaaccagtttgttatatcactgtgtccccaaaatcaggatttttgttgatagcatcagtgttgtaggagcaataggtcagatgagacatattaacttagactaaacgtgaacagtattatatggactctcacaacgctcttagagaatccgtgaatgtgaacagacaaatgtggctaaccatttgattcttcagtatgccttctaatgtggctattttatttatgtgagactctaaacctgattgtcctaatatataaaactaaaagattttgtaaagggagtgtctttagaaatagatgaaatgtagaatgttaaaaattattgctagggtagtcttttttttttccagaaacctaattagggtattaaattttgtgttttttttgttttttttttttaaacagaagcatgttatttcattcccattcccagaaagggagttaatgaagataaaaatttattttttaaggtctttattgagagaaactttgttttctgatatgaactattgcagatgtttttataaatactttcattaaaatgatgtaaacagtagtacccaacactgtaaactcagtgaaaatagtaaatgattcttttattactaagactgtcatgcattctgaagcagttggcttttttttaaccataggaagtaatttccctctagctcctttccttctactctcctgctcagaccattagtaggtactttgttaaataaaaaactagattaacatcaatattactccaatttggtatcttttacactatgtattatacctactttctttttatttcatttacaaatagtttaaattactttatcaaccagctgtattgtttccctcttgtaaaagtaccatcaagtggggaaaatgtatgtggaagtggagagtgaatttgtatgactaaaggataatctgtacatggggaagtgggcaaaagtggataggatgaatttaaagaaaatgactacctttggaaaaaagaaattaaattttgttcacatatcctaccctttcccattgtgcatatcccaagtgtcatatttaaaactaaggttacttaaaacagaatccaggaatatcaaggctctgtggcttggaattttagaggataggactaataaaaggacttttgcaaagaaggcttttttccacgttcactttgttttgtgttctttgaaagtaactgatacttttcgggtagttaattcagcagtccataaatatgatccagtaacttgcttatattttattgaagtctcgacagctcttcagaagtaaatttagaacgatgctgtcagttcatatttatagatattagtgttttagcagataaaacaaaatcaacaaaaattaagttcattttgtgattaaacctgcaaccatttttccattactttttttctatagttaatggttattgccatgatttcttctgtttggttctactaagctagaaagccagggtgaagttaatgataattcccattattttatttctgtaccatgagattgctgttgatgactgaaataccaggtgcaaaaattaatgatttgatttttgtacagtttcaatgagtattttttacttattaaaaataaattaagaaatgtaagaatatctttgtaaatcatgtttcataagttgactccagagattctgattttgctgtttattttgtgagtaatgttgctttggtgtttcctgattttcaagtttgcaatcatggagatacagcagttattaggtgtggaaggacattacctcaaatgtcctcagatggctccaggaaattcttttaaaacagttggagagaaatagtcgtgaccatgtaaaacctagaggatctggtaaatcccatactactggttagggatttgtaaagtccatttctttttagagttcaaagcagttctgttacttgtccataagttcctcataaattgtcccaaaggtaggacatggaaataaatgtatatctttattttttaatctactatgtcacactctggtgatattcatggaacattaaaaaagcaactatgtttattttataattagtaaaatgaagatagaaaattgttcttttgaaatttttagggaaaaaaaaaatctcgtgacctaaatctttccactataatgaatattcattgtgattgcaaatatctaattttatataatcactgtgtatggatttagcgattttacttttcatagattcaaaaacatataatctgaatgctttctctgaaaaaaaaaaaatcagagttgagctcttgaggatcagagttaagtatccattgataatatgtgttcattttgctctatgtcataactttgtttttttattgagaaatatatatttttcaaaaacacatatatattcaaaaatacataaaatataaatatgcagttcaaggaataattttaaagcaactatataactagcactcagcttagtagaatatattgacagcagttcagaaattacacatgtagttccttcccagtcacaaccagctccctgccacgtaccctttggtaattaccactatcctaccttgtatgataattgtctctttgtttttatagtgttaccacctatgtgtgtaaacttaaacaatacagtttgcttgtttttgagttttatttaaaatcatacattcttttgtagctgcatttgttcaagatgggattgattcatgttggttgtagctgtactttattcttcattatgtctgtgtaatttacttttctgttaatatgccacaatttatttactgtagacaattgggatgtttttagtttcaggcaattacagtttcacaatgaacatcattttatgtaactcctagtacaaagagtatatatttaggagtagaattttttggtcatagggtattcatatcttaaattttattagatgattacaaatttttttctaagcattagtatgttggttggttttgtgttgctataaaggaatatccaagactcggtaattcataaagaaaaaaggtttatttggctcatggttcagcaggttgtacaaacattgcaccagcatccctgcaatcatggcagaaggcaaaggaggaactggcgtatcacatggctagaggagcaagagagaaatagaggaagtcccagatcatttttaagaatcagatctcacattaactcatggagcaagaactcgtcatctcaacgagggcaccaagccatttatgagggatccagatatccatccccataacccgaacacctcccaccagccctcacctccaacactggggatcacatttcaacatgatatttgcaggggacaaatatccaaaccatatttctccatatcttggtcagtgctggtgttaacagtttttgtttttaattttgccaatctggtggatgtgcaattgtatctcattgaagtgtcactctgcatttctctattacctgtgaagttgagtattttttcataagtttattggccaatttgactttctgtttttgtaaagtatcttgtcaggactgccacacgtttttgttgtgttgctaatctttttcctcattgattcataaaggatctttataaatcttattctttgttggctgtatagttgccaatatcttctcccaatttgtggcttgcctttccctcccttatgatgttctttgataaaaacaatttattaatggtt

SEQ ID NO: 9986 - DNA, 1599 bp, Homo sapiens
agaaaggcaggacaactcaaagcgggggcttccagggtataggttaatttaaaacattttctggttgacaattggtcgagtttatctgaagacctgggatcaataggaaggaaatattcaggttaaataagagattgtggagaacaagttttattgtgcagaggaaactctcagcagacttcaaagagagcaggttgtaaagtgtttcttattggacctaaaaggatgcctgggtcttagttgattatctcctggatttggaaaggaaggaaggacaaaaaaaaaatgggtaaaggggaaaggggattctttatagaatgtagatttttcccacaagggatggctttgcagggccatttcaagatatggcagagaaacatatttcggggtaaaatattttgattttctttcttgttatgccagagtcagattggaaagttaagtcacaatatacagggttaaataaaacccatctgatgagaatttatggtttgtagagcatgactccccagactccttagacaggaatttgggcaagataacaaaatatcagagcttagtccttacatctctttctaaacattttttcccttttttctatccctgtgctagtataccatcatcatcatcattgtagctgatatattcttgatatctggccaaacaaatcctcccaacttattgttcttttagagtatcttggttattctcagccccttgtattttcagttctcatatttctaattgaaagcatgtaaatttgtcactcctgcagtttctaattgtcttgctgaaattttcaatttcttatctgcttcaaaatgaaaagcataattattttctagtctgtctaataattccagaatcaaaacccgcctgtgggtctgtttttattttgtttgttctagtcttcattcttactgtcttgtctccttgtgtgcctggttacctttaattatttaccaatattgtttgaaaaaactagaaataacttgatgctcagaatgatatttttatcctccacagagttttttgcttctggcaggtacctgcattagtaatttaggattattttgatccagtttcagatactgaaattttccaggtcacctaggtgactgaaagctgagccacagactgtggtaatgctcttctgttcatccttatttctagggttcaaccattcagggtttcaaagcatggtttggagttaccaggcccttacctcttcactgaccctggactctttttgaatctttagccccttagctctatctactcaacttcccagtggccttttgcaatctataaatactcctaacacagtggtcccaaatgaatggttcatttttctgaatttctatcttttctcagatattattggcatggtaattattcaccaacttatcagctccctgctgccttcctacatctttgaaaagtatattttatccagcttttctaaatgttttcaagtgagaatgttaatccaaattacttagcccacattatttcctgttgattatgtgtaaaatacagttggtttatttgtattgtttttgtacctggaaacaataaactctgtagtgattctctaaa

SEQ ID NO: 9987 - DNA, 755 bp, Homo sapiens
gtttctgtgtatgctttgtatttttcattgagaactggatcttttgactgtaatgatataactctcaaaattcagattcttttccttcccatggattggcgatgttacttgatgcccctgcaatcatctttttattggtggcttttccaaattattttcacaaaaactatttttcttattatatgtagtcaatgatgactctcttccattacttcacggcgagcagtgctttaacagagatttcctatattatttggatccaatgtaaaatttttttaaaatgtgtttatcttttcataccttcttagactgatattactggtaaagctgcttcagcctgaagtcttgaaacagtggccagtctctgtgccagacacttagcaatcacaagcaattgtcaaaacatacaccgtaatttttgaagtacaatatacctatcatccaccctagcaccagcaagccacactggaattgttggcccccatccacgtggttgttcactatgggactgaagggtagagaatgggggccattatagaaaacagtgaatttcactgtaatgaaccctgactctttcttcataaagctatcatctggagactacaagtgtccaaatagactcgagaattccaaagtagtttctctagatacttcttgtcagttcaataactgttttggtaaaggtactaagttctggagcttctcactttgctatcatctgttatgtcattctaattttctgttttctaaataaa

SEQ ID NO: 9988 - DNA, 755 bp, Homo sapiens; identical to SEQ ID NO: 9987

SEQ ID NO: 9989 - DNA, 1050 bp, Homo sapiens
caaataccatgtggctggtaaaaatgatggtgtaaattatatttacagactgataaacgtaaaaagtatctgggacatagcattattgaaaagaaagcaggctagtgaatactataattattttgtaaaagtctcttatggacataagttatatatttacatggccatattttgcacaggaaatatgaaaaagtatatatatcaaacagtaatggcttatttttatcttctgggagttttgcaggtgcttccctctttacaccattatatgtcatctgaagttttgttctgattctgtattatttcatttctaaaagaaaagccccaaaaccaagtgctgttttcctggtctgtggaaacagagtctccgaggaattaggctagacatggtaagaacaaagttctgttgtgataaaagctttggcctgaggttccaaccattaagtttgccagctcagacttgatcttgaatgaaggcggggttctgtgactggagaccatttctctccttttgtatttgttggtgtgtccaaaaacctcagatctcccagcttcaggcttctttgagggcagtgctaaattggttgaaaccttatttgaggcagttcctgaaaagggtaggtgaaatttcctgctgataaaaggcatcttgtgtcttgttcatccttagcaaattgccaattagcaaagaagagagggcagatgaagtaccagccaatttgaaattggtgtggacttccatcaaggtatattaattcactttacctagatgattcgaaattagttgcttttttcttttaatcctaaaaggataattttcttcatgttcttcttgtcatgtcagccaaatcctatagtgtcaactttcagtaaatgtatcttagatataactatggaccaatctagatctttctctctctatcatctatacagtttagagattttaaaactcttaccacttagtttgaaattttattttaatttataaaatgatatattcttatgtaaaaaattcagacaataaagatgtatttaaagtaaaaggcaaaa

SEQ ID NO: 9990 - DNA, 273 bp, Homo sapiens
gtggcccatgcctgtaaccccagcactttgggaggcctaggtgttggatcatttgaggtcaggagtttgagaccagcctagccaacatggtgaaaccccctctctcctaaaactacaaaaattagccgggcatggtattgcatgcctgtaatcccagctactagagaggctgaggcatgagaatcgcttgaacccgggaggcagaagttgcagtaagctgagagatcgcaccactgcactcccgcctgggtgacagagtgagactctgtctca

SEQ ID NO: 9991 - DNA, 930 bp, Homo sapiens
actcttcatgctttggtagtgcttataagcatcatcactatctagcatgtagactgtacttctttttatttgttgtcactctcccctcttagaatggaagcactgtgaggacagcattttatgtgcatatgtgcgtgtctattttgtgcctggaacacagggggtacttaatacatttttgttgagtgaacaaatgaatatgttgagcctcatcatgactctgagctgaacaagctgagcatcatctgcatcttacagatgaggagactgaggctctgtgagcctataaaatggggagccagatcaaagccaggtctcccaatgtcatgacctttatatttttcccttcaccggtaatacccttagacttggtcagtggagatcctcccttgggcctcaaattttagagcatcccggagtctttctctggctgtaccccttaccattaagtgggatacagtggctgcctggagtttgtcctgcctcttctagatcacgttgcaggtacccaggactctggagttccctgctcagatagtcttgagcctgctgacaagaccaacattgggggtttcttcccaggctgtctctactcaacctgggcctgaaggatgggcacagggtggttgcttatagaatatatgggtagaatttgaacatatgggctgcaaggatccacccacatgtgtacaaggcccctggtgatataagatggagttaggagcagaagagaagtgatacagtaagaagtgtaagaatatgagcacaataactgaaagtaaaatctcaatggatacattaaacattaagttagatgcagcagaaaagagaagcaatgaactacgagatacatctaaagtaattatctagaatgcaacacagagagagtaaggtataaaaaatccaaataagagttcaaaatataaaaaa

SEQ ID NO: 9992 - DNA, 961 bp, Homo sapiens
caacttcttactcccccaacggcttcactttccatactttgtttgttcttattagcatctatcactatctagcatgtagactgtacttctttttattttgtttgtcactctcccctcttagaatggaagcactgtgaggacagcattttatgtgcatatgtgcgtgtctattttgtgcctggaacacagggggtacttaatacatttttgttgagtgaacaaatgaatatgttgagcctcatcatgactctgagctgaacaagctgagcatcatctgcatcttacagatgaggagactgaggctctgtgagcctataaaatggggagccagatcaaagccaggtctcccaatgtcatgacctttatatttttcccttcaccggtaatacccttagacttggtcagtggagatcctcccttgggcctcaaattttagagcatcccggagtctttctctggctgtaccccttaccattaagtgggatacagtggctgcctggagtttgtcctgcctcttctagatcacgttgcaggtacacaggactctggagttccctgctcagatagtcttgagcctgctgacaagaccaacattgggggtttcttcccaggctgtctctactcaacctgggcctgaaggatgggcacagggtggttgcttatagaatatatgggtagaatttgaacatatgggctgcaaggatccacccacatgtgtacaaggcccctggtgatataagatggagttaggagcagaagagaagtgatacagtaagaagtgtaagaatatgagcacaataactgaaagtaaaatctcaatggatacattaaacattaagttagatgcagcagaaaagagaagcaatgaactacgagatacatctaaagtaattatctagaatgcaacacagagagagtaaggtataaaaaatccaaataagagttcaaaaaaaaaaaaaaa

SEQ ID NO: 9993 - DNA, 142 bp, Homo sapiens
agtagctgggactacaggcacgtgccaccacgcccagctgatttttgtatttttagtagagacggggtttcactatgttggcgaggatggtcttgatctcttgacctcgtgatctgcccaccttggcctcccaaagtgctgg

SEQ ID NO: 9994 - DNA, 1267 bp, Homo sapiens
atagatatccttttattattatactttaagttctagggtacatgtgcacaatgtacaggtttgttacatatgtatacatgtgccatgttggtgtgctgcacccattaactagtcatttacattaggtatatctcctaatgctatccctccccctccccgcaccccacaacaggccccggtgtgtgatgttccctttcctgtgtccaagtgttctcattgttcaattctcacctatgagtgagaacatgcggtgtttggttttttgtccttgcgatagtttgctcagaatgatggtttccagcttcatctgtatccctataaagggcatgaactcatccttttttatggctgcatagtattccatggtgtatatgtgccacattttcttaatccagtctatcgttgatggacatttgggttggttccaagtctttgctattgtgaacagtgccacaataaacatacgtgtgcatgtgtctttatagcagcatgatttataatcctttgggtatataccatgtaatggcatggctgggtcaaatggtatttctagttctagatccctgaggaatcaccacactgtcttccacaatggttgaactagtttacagtcccaccaacaatgtaaaagtgttcttatttctctacattctctccagtacctgttgtttcctgactttttaatgatcgccattctaactggtgtgagatggtatctcattgtggttttgatttgcatttctctgatggccagtaatgatgagcattttttcatgtgtcggttggctgcataaatgtcttcttttgagaagtgtctgttcatatcctttgcccactttttgatggggttgtttttttcttgtaaatttgtttaagttctttgtagattctggatattagccctttgtcagatgagtagattgcaaaaattttctcccattctgtaggttgcctgttcactctaatggtagtttcttttgctgtgcagaagctctttagtttaattagatcccatttgtcaattttggcttttgtcgccattgcttttggtgtttcagacatgaagtccttgcccatgcctatatcctgaatggtattgcctaggttttcttctagggtttttatggtttcaggtctaacacttaagtctttaatccatcttgaattaatttttgtataaggtgtaaggaagggatccggtttcagctttctacatatggctagccagttttcccagcaccatttattaaatagggaatccttcacc

SEQ ID NO: 9995 - DNA, 3221 bp, Homo sapiens
tcctcccaaggcagcccggccccgtctctgccctggtggattggtggggagctgcggagggaaacagcagccaggactacttcaaggtcacccccagctcagccgggccctgggccaacagctccctgatcctccaagggggggcttggctccaacctcaggctcacctttgaggcccagaacgtccatggggcccagagctctctgattcctggcggacagtcagggtatagggtggggaggcctgggctcaccaggtcctgcatccagggatgtaggaagggcctggagaaccaagttgcaataagagaggaaggattcggaagtgtggtttagaaggtgaatgggccttatcccacttttccaggcaaatcagggcccatgacgggggtggttctggtggctgttggggaggtggctatgaagatcctgcttctctgcctctgcctcatcctcctcaggtgagccctgccccagggaccaaggggaggggcggagagggcaaaggatacaccgctgaatcccagaatctcaatcctgggggtacttggacagttaaagaggcctgtggccaggcagaggctgagttgatcgtgatgattccacacgggccagtgttgtcagtctccaactctggaccaatgtccaggctggggaggttcctgcttgtatcagggaggtcctgggggctaggcctgctctctctgcctcagtcccctccaaccccttagcagggcacagggaggtgagtctgctgccctcttcacccccatccagccacactcacaggccctggtctcttcacccagagtgaggtcttgcaggaggaaggcagcaagggcagcattgggcatggaggctgcagacgctgtcacggactaatctccaggtgagtgtcgtgggcctcttaccctccaacatcccgctggacacctccccctcgatggccccaaggactgctccactcaacttggccataactgactcatcacctccctttccaagcccacttctcttgttgagagccccatccctctgatgacatggtagccccatctctaacgtcagaacccgggtgtgggtgtccaccttgacctccctccctcctccagatcccaaaaatcactagcacttgtccctcctcctaagtacaggtcaccttggagcccttttctccatcctggccccggtcatgcctgggcctcacctcttccctggtcgctgaacccacctcacctcttgcctccatctctcccaacagactccagactgcttccagatgcctcctcatccagttcctccacagtctgagcggccgtgtttcctctgcaggctttgcatggtctgtcccctgctggactctcctgatccctcctttccctgtcacccaacatctccccaaaccctccgggccaaggactctgcggctcttgacactttgcacgtgtagtttcttctcctgaaacacccttccctcctgccaaaccacgtctggaccctccttcaggttcacttttttttttttttttgagacacagtctcactttgtcacccaggctggagtgcagtggcgcgatctcggctcactgcaacctctgtctcccaggttcaagcgattctcatgtctcagcctcctgagtagctgggattataggcgcccgccaccacgcctggctcatttttgtatttttggtagagacagggtttcaccatgtcggccaggctggtcttgaactcccgacttcaggtgatccgccagcctcggcctcccaaagtggtggggttacatgtgtgagccaccgtgcccagccagctgtgtcttctttttgcaggatttacttacaaaattccttgcagctgcagtctgcgttccacccacatcctaatatggtgtttgcggtggtcacatccaacttccttcctcctccatccatggaacgtgcattagggaggaaccacacgcaccacgtgcaagatgagccagttccctgaacggccggccacggcgttaaccgcgctgctctgggctctgcacgtctcatctgctgaggcgcattactgcatctttcatgcagaacttgctttccatgcctcacatctccacatgtgtggggatatgtcctgagaaatgcacggttaggtgattctgtcgtgtgagcatccttgaatgtgcttacacagtcataaatggtacagcctaccacacgccgaggctatacggtatagcccattgctcctagactatacacctgcacggcatgttcctgtagtgaaagctgtaggcaattataacgcaatggataggttaaagacagagttttagtaaaaatatggcataataggccaggcgtggtggctcatgcctgtaatcccagcactttgggaggccaaggcaggcagatcacaaggtcaggagtttgagaccagcctggccaatatggtgaaacccagtctctactaaaaatacaaaaattagccgggtgtggtggcgggcgcctgtagtcccagctactcgggaggctgaggcagaagaatcatttgaaccaggaggtggaggttgcagtgagccgagatcgcatcactgcactccagcctgggcgacagagcaagactgtctcaaaaactaaaacaaaaaaacaccaccaccaccaccaatgtctgattaaatctaagccacggttccattttggggcaaggggcagggtgtgggtgtggtggacagagaacgggctccagccaccatcagctgcacgtcctggtagcacctgagccattcccagtctcctgtgctgggagatcatcatctaatcctgatgatgacgccctcctctcagagctcgggggatgagctgccaaaacccatggaggttcaaaacccgggctctggagacagaagacactgggctcagagacatggggccactgtccaggctttccctgggcctggacctgggctccttccactgtctgagcagggtcagcctgggctggctgtgctggttcaagagatgagggaggaggacacagcggttgccaggaccctgaggcactggactgggcactgcccaaggggcagaggatggaacccggtgttgatattgtgatgctgacccgtctgctcacctgatttgggtgctgaagggcagctgacccccctaatcttttatagacttgtgaaacgaaaataaataaaagtcaagctgggaacagcttagggcaaa

SEQ ID NO: 9996 - DNA, 3223 bp, Homo sapiens
tcctcccaaggcagcccggccccgtctctgccctggtggattggtggggagctgcggagggaaacagcagccaggactacttcaaggtcacccccagctcagccgggccctgggccaacagctccctgatcctccaagggggggcttggctccaacctcaggctcacctttgaggcccagaacgtccatggggcccagagctctctgattcctggcggacagtcagggtatagggtggggaggcctgggctcaccaggtcctgcatccagggatgtaggaagggcctggagaaccaagttgcaataagagaggaaggattcggaagtgtggtttagaaggtgaatgggccttatcccacttttccaggcaaatcagggcccatgacgggggtggttctggtggctgttggggaggtggctatgaagatcctgcttctctgcctctgcctcatcctcctcaggtgagccctgccccagggaccaaggggaggggcggagagggcaaaggatacaccgctgaatcccagaatctcaatcctgggggtacttggacagttaaagaggcctgtggccaggcagaggctgagttgatcgtgatgattccacacgggccagtgttgtcagtccccaactctggaccaatgtccaggctggggaggttcctgcttgtatcagggaggtcctgggggctaggcctgctctctctgcctcagtcccctccaaccccttagcagggcacagggaggtgagtctgctgccctcttcacccccatccagccacactcacaggccctggtctcttcacccagagtgaggtcttgcaggaggaaggcagcaagggcagcattgggcatggaggctgcagacgctgtcacggactaatctccaggtgagtgtcgtgggcctcttaccctccaacatcccgctggacacctccccctcgatggccccaaggactgctccactcaacttggccataactgactcatcacctccctttccaagcccacttctcttgttgagagccccatccctctgatgacatggtagccccatctctaacgtcagaacccgggtgtgggtgtccaccttgacctccctccctcctccagatcccaaaaatcactagcacttgtccctcctcctaagtacaggtcaccttggagcccttttctccatcctggccccggtcatgcctgggcctcacctcttccctggtcgctgaacccacctcacctcttgcctccatctctcccaacagactccagactgcttccagatgcctcctcatccagttcctccacagtctgagcggccgtgtttcctctgcaggctttgcatggtctgtcccctgctggactctcctgatccctcctttccctgtcacccaacatctccccaaaccctccgggccaaggactctgcggctcttgacactttgcacgtgtagtttcttctcctgaaacacccttccctcctgccaaaccacgtctggaccctccttcaggttcactttttttttttttttttgagacacagtctcactttgtcacccaggctggagtgcagtggcgcgatctcggctcactgcaacctctgtctcccaggttcaagcgattctcatgtctcagcctcctgagtagctgggattataggcgcccgccaccacgcctggctcatttttgtatttttggtagagacagggtttcaccatgtcggccaggctggtcttgaactcccgacttcaggtgatccgccagcctcggcctcccaaagtggtggggttacatgtgtgagccaccgtgcccagccagctgtgtcttctttttgcaggatttacttacaaaattccttgcagctgcagtctgcgttccacccacatcctaatatggtgtttgcggtggtcacatccaacttccttcctcctccatccatggaacgtgcattagggaggaaccacacgcaccacgtgcaagatgagccagttccctgaacggccggccacggcgttaaccgcgctgctctgggctctgcacgtctcatctgctgaggcgcattactgcatctttcatgcagaacttgctttccatgcctcacatctccacatgtgtggggatatgtcctgagaaatgcacggttaggtgattctgtcgtgtgagcatccttgaatgtgcttacacagtcataaatggtacagcctaccacacgccgaggctatacggtatagcccattgctcctagactatacacctgcacggcatgttcctgtagtgaaagctgtaggcaattataacgcaatggataggttaaagacagagttttagtaaaaatatggcataataggccaggcgtggtggctcatgcctgtaatcccagcactttgggaggccaaggcaggcagatcacaaggtcaggagtttgagaccagcctggccaatatggtgaaacccagtctctactaaaaatacaaaaattagccgggtgtggtggcgggcgcctgtagtcccagctactcgggaggctgaggcagaagaatcatttgaaccaggaggtggaggttgcagtgagccgagatcgcatcactgcactccagcctgggcgacagagcaagactgtctcaaaaactaaaacaaaaaaacaccaccaccaccaccaatgtctgattaaatctaagccacggttccattttggggcaaggggcagggtgtgggtgtggtggacagagaacgggctccagccaccatcagctgcacgtcctggtagcacctgagccattcccagtctcctgtgctgggagatcatcatctaatcctgatgatgacgccctcctctcagagctcgggggatgagctgccaaaacccatggaggttcaaaacccgggctctggagacagaagacactgggctcagagacatggggccactgtccaggctttccctgggcctggacctgggctccttccactgtctgagcagggtcagcctgggctggctgtgctggttcaagagatgagggaggaggacacagcggttgccaggaccctgaggcactggactgggcactgccccaaggggcagaggatggaacccggtgttgatattgtgatgctgacccgtctgctcacctgatttgggtgctgaagggcagctgacccccctaatcttttatagacttgtgaaacgaaaataaataaaagtcaagctgggaacagcttagggcaaa

SEQ ID NO: 9997 - DNA, 516 bp, Homo sapiens
ccctgtctccatttcagatcctccagagaacctgagagtgatggtttcccaagcaaacaggacaggtaggaaaggagacagaggagccagggcctctcagtgccaaattgggggcccaggtgtctggagggtccccatgcaggcgggtccctgagccctgagctgcacgtcgattctgcctcttccttccctagtcctggaaaacctgaggaacggcacatccctccggtcctggagggccaaagcctgcgtctggtctgtgtcacacacagcagccccccagccaggctgagctggacccggtgggacagaccgtgggcccctcccagccctcagaccctggggtcctggagctgcctcgggttcaaatggagcacgaaggagagttcacctgccacgctcggcacccgctgggctcccagcgcgtctctctcagcttctccgtgcactgtgagtggggaaaggggacacctgggtcccaggaaggggcccctgctgagtcctgtcctccctccc

SEQ ID NO: 9998 - DNA, 323 bp, Homo sapiens
gctcactgagatagatgcatgtctgatcacctcagttgggaaaggctaatcagaaactccaaagaatgcatctgttcatctctcacccatctgtgacctggaagccccctccccacttcgagtcttcctgcctttgcttcaagttttcccgcctttccaaatggaaccaaagtacttcttacatatagtgactcatgtctcaagtctccctaaaacgtataaaactaagctgtgccccaaccacgctgaccatgtcatcaggacctcctgaggctgtgtcacggcctgtgtcctcaaccttggcaaaataaactttctaaatt

SEQ ID NO: 9999 - DNA, 323 bp, Homo sapiens; identical to SEQ ID NO: 9998

SEQ ID NO: 10000 - DNA, 518 bp, Homo sapiens
ccctgtctccatttcagatcctccagagaacctgagagtgatggtttcccaagcaaacaggacaggtaggaaaggagacagaggagccagggcctctcagtgccaaattgggggcccaggtgtctggagggtccccatgcaggcgggtccctgagccctgagctgcacgtcgattctgcctcttccttccctagtcctggaaaacctgaggaacggcacatccctccgggtcctggagggccaaagcctgcgtctggtctgtgtcacacacagcagccccccagccaggctgagctggacccggtggggacagaccgtgggcccctcccagccctcagaccctggggtcctggagctgcctcgggttcaaatggagcacgaaggagagttcacctgccacgctcggcacccgctgggctcccagcgcgtctctctcagcttctccgtgcactgtgagtggggaaaggggacacctgggtcccaggaaggggcccctgctgagtcctgtcctccctccc

SEQ ID NO: 10001 - DNA, 1363 bp, Homo sapiens
aagtaatattttattgacatataatgcacatacagtaaaatttactacttcacagtataaaattcagtggttttagtatatccacagagttttgcaatcatcacaactatttaattttagatcattttcattgctactcccaaaagaaaccccatatccgttagcagtcattcttcattacccccatcccctagcccctagtaaacactgatgtattttttctgtttctgtggatttgcctgttctgggtatttcctataaaaggaatcatacaatatatctttgtgactggcttcttccacttattgtttttaaggttcatcatcagtacttcattttactgccaaatcacattccagagtatgtatataccatcttttgtttattcatccattgatggacatttgggttgtttccactttttggctattataaaaaatgttgctaggaacattcaaatacaagtttttgtgtgaaaatatattttcatttctcttgggtatatttgtaggagtgaaactgctgggtcatacaataactctatgcttaacattttgaggaactgccaaacagtgttccaaagttactgcaccattttataatcctaccagcattgcatgaggattccaaattctccacattcctgcccccatttgttatggtcgattttgattctagctattctaataagtggtatcttattgtggttttgatttgcacttccttaatgactagtgatactgagcattcattcctatgatggttgcttcctttctatgagttgccttttcattttcttgattgtcttctttgaagcaccaaagactttaattttgatgaagtatgatttatcttttttttgttatgctttggtgtcataatcaagaaagtactgcctgacctaaagtcacaaagatttaccccaacagttttctcctaacagtttcatagttttataggtttagctcccacatttaggttgatgatccattttgagttaattttggctatggtgtgaggttggaatctaacttctgttgtctttatatggataaccagttgtcccaacaccatttgttgaaaagacaatttccctattggattgtgttagactcttgtcaaaaataaatttgccataaatatgaaggtttatttttgaactcccaattctattccattgatattttggtctatccttatgccagtatcatgctgttttattgttaagttttgaggctgggatttgtaagtgctccaactttgttctttttaaagattgttttgattattcttggtcctttgcatttccatatgaattttaggatcatcttgttagtctctgttaaaaaaaaaaaaggaaagg

SEQ ID NO: 10002 - DNA, 1363 bp, Homo sapiens; identical to SEQ ID NO: 10001

SEQ ID NO: 10003 - DNA, 1363 bp, Homo sapiens; identical to SEQ ID NO: 10001

SEQ ID NO: 10004 - DNA, 547 bp, Homo sapiens
ctctatgatgtttgctcaataacaaacttgtccaactacatatttgtcagaatgtatccctgttgttaagcaatgcatgactgtatttatttctagcttaattccatagtgtttagaaaatttactctgagtgatttcagttctcttatatttgagacttgtgttatgaccaggatatggtctgttttaataaatatcttatgtgtccttgagaagggaatgtatattctatgtcattgaatattatgttcccagtatgtcatacacttgtgaagttggctaatcatgttcaagttttcatcattcttactgtcatttttctgcttgtcttattagttactgaggatggtgtgttaatgactcttactgtgattgtggatttgtttactatttcttttagctctttcaattttgttttgtatattttgaagctgtgttattaaacacatgcaagttttgttgtatcttcctgggaaattgaccacttattcattgagaaatgttcatctttttattttaagttccggggtacatgtgcaggatgtgc

SEQ ID NO: 10005 - DNA, 547 bp, Homo sapiens; identical to SEQ ID NO: 10004

SEQ ID NO: 10006 - DNA, 547 bp, Homo sapiens; identical to SEQ ID NO: 10004

SEQ ID NO: 10007 - DNA, 20017 bp, Homo sapiens
caaggtccaggctatcaatcaactaggatctgggcctgaccctcagtcagtgactctctattctggagaagactgtaagtgatgcacctaaaactgctaagcacgtcagtaactgttgctttcaaatatattgtacttcaatcaacaaatatttgtgaacaactactgcatgcaaagaggatgtactagccgtgggagataaaaacaaatataacacatgacttctatcttaggattgattgtaggacagttgatcgtatagagtaccaaggaagtatgttgaaagttttcattttattcagtttcctataaagctctttctacattgaaaattgaagacctggaattatcactgcaatcatttaaagcagcataactgtcataagattttcaagtacatctgccctttgcccttacttgtcaaggatcccctaagagccacttgctctcatgccctgggcttcagtggcatgtctggagctttcctaatactgatgagatatatacccagatttatatgtagaattatatgcacacacaccttctgatgccatagtaactgctgcaaataggttattggaagaagaaaaaaacactgcattctgtattgctaatactgtgaataatattaggggttattctcattgcctttccagcatctaaaggaataatttgatccaaaaatagaaaaggttcagaatgagaaatagccaactcattactcacctgccgtctaaattcttctacccaaataaaagcacacaaaacacatatcacaagtgaattaagatagtattagccttgactgctctgtatttggcttattactctgtagtaagaactcctgtagaacagagataataatatcctcttcacagggttgtatgaaccaatttaggtaagtcccttagaacagtgcctgacacatagcatatgctcaaatgttagctgttattaatatttgattaacaaaattcctgaccaattttatttatattactagtttaattcacttgcttccaaaggcaagatgcccacagaatagtttctggttttatttatccacattgtatctatctggagggctttgtttctcagtgtgatacagtctgtcctcttctttgggaaatctatttgggctgataaacttatctatcatgagaaactcttttggttccatttggagtgaatttcacaaaagtgctttctccagaagaaacattatgaaaatttttgaaaaggatcctaacaatcacatttgcaggttattgaaaactaatcaatcttctatgattaacagatcctgatacagctccagtgatccatggggtggacgttataaacagtacattagttaaagttacctggtcaacagttccaaaggacagagtacatggacgtctgaaaggctatcaggtttttatcatcatggtttttcctcttcttgttgaattggtatctttcctgagaataaagaagaattgatttcagaagaagtcaaagagaatctgcgaccacaatggatatactaaaagattttggttttcattgcagataaattggtggaaaacaaaaagtctgttggatggaagaacacatcccaaagaagtgaacattctaagattttcaggacaaagaaactctggaatggttccttccttagatgcctttagtgaatttcatttaacagtcttagcctataactctaaaggagctggtcctgaaagtgagccttatatatttcaaacaccagaaggaggtgagaggataatgatgtagagtcatgtcaaaaatggaggtgatccatggccatattaaacattcttccttatggccaggcacagtggctcatgcctgtaaatcccagcactttgggaggccaaggcagatggatcacttgaagtcaggagttccaaaccagcttggccaacatgatgaaatcctgtctctatcaaaaatacaaaaattagccagatgtagtagtgcatgcctgtagtcccagctactcgggaggctgaggcaggagaatcacttgaacccgggaggcggaggttgcaatgagccaagattgggctactgcattccatctagcctgggccacgtgagactctgtctcaaaaaaataaataaataaacattattccttattagtagttaattaatatttacttcagatgagtttgcttgtcaatttctataaaatttataatataataaggcttttttgaatttttctaattgatgtgagtttatttttggtcttgtgttttctagtacctgaacagccaacttttctaaaggtcatcaaagttgataaagacactgccactttatcttggggactacctaagaaattaaatggaaacttaactggctatcttttgcaatatcagataagtaagtagaaatttgaattggagttaacttgttaatgtttcattttttggttgaatattctctgtgctatgttgggagtctaatgatcacttaaggccatggtttgtaagctgccgttcttccttgtagcccaggggtctgtaaactggcttgcaggccaaattcagcctgctgcctgtttttaggaataaagttttatgacgacatggccatgtccacttatttatatatgtctacagctactttctccctggagtggcaaagttgagtcatctcaatggagactacacagcctacaaaggctaaatgtttaccgtctggccctttaatgaaaggtttgcttacctgttttagaaaaaaagcagtgtgctgatgggtacacaaaacacgtgtttaatgtttatatataagatgtttggagaagtaggaaacatgtgaaagagttattgagtgatgtgatggagattcaaagcataggtaccttccacgctacctcttctgcctcagatatatgctcccagactcaatcctaaatatgcttgtgtttatccaatgtctatgggttgctcactgtttcatggagatgatattgcaaggactaaataattgtctttggatcatgactcagaatgggctctgcccagatgctgctgtgcgactagagtaacgtgaatgtgtttagatgagatcaggtcgtttttaatagcagcgcgttccctctgaaacagtcgtcaagtttaagcatcatctcaaaatggaaattcggggattgacattatagaaaattttatcaacaacccatcatgaaaattttaggctttcaagacatcaattcccaaaacaccagaaatacagagacccagcacacactgcttactagtcaacttgatcatagtcctgttgtgctactttcacatcagctcaagacttccagcaatccaggtcacgtatttgctttagtttctgatggtttctgctgaaattagcacgtatgtttaaatacatacaggcataatcccaacggaagtagactttagcacttttacgtgcttgctaagtagcaggatcaatactaagtgtatctctttgcattgtgccattaaaataagaaatctattagaaatgtactatcactattttatgaatgagggaattgatgtacatcagagtcaagtagtaaaataagtgttaagtgggaggccgaggctggtggatcacgaggtcaggagatcgagaccatcctggctaacacggtgaaaccccgtctctattaaaaatacaaaaaattatccaggcgtggtggtgggcccctgtagtcccagctactcgggcggctgaggcaggagaatggcgtgaacccgggaggcagagcttgcggtgagctgagatggagccactgcactccagcctgggcgacagagccagactccgtctcaaaaaaaaaaaaaaagtgttaagaatgcaaagcaagatcagtccaattctagatgttgagctcttaaccttatattagtcgatgaactggttttcaaaaaaattgtaagaactgcagaaatattttaagattcttttaaatgtcaatttgtttggtaaagatataacttctccttatcctaacaataggaaactcaactaattaaattcccaccttcatattgatccgtatgtgacatttacgtttatttaaaaacaagttcttagaatatagaagttgaaatattaacaattgtaatgattattgaactgcttgatatgtgtattttaaaataaaataatatataattattttgctttctattaatattaattgatcaagacattttaggtagtttacctttttcttattgcttttagatattttaaattgttgcaatttatatgtatgagagctctatgtatactctcctgaattcttatattgattgtagtcgtttttcaattgactttgtggtcattcacaattatgtgttcaaaaaatctaaaaaagtgatgatttcacctccttctttccaatgtttgaatgcctagtttgtttgttttttcttttcattgatttgaattgcatttttatggaccaaggaaggcatttttatgtcaataataaatgcatttttttaacctctatggtatcttggactgggagtcaagaggatttattctacattccttcttgccactaacagctgcactatcttgggtgtatttcatctcttggactattgttacagtaatcttataatactccatactcttacacaaatctcatgtctttgctgggttccaaattctttgaaagaagctgtctatctgattcagctttttacagtgagcactttacatagtacttagtacacagtagatattcttaaatatttaatatattccttcatttattgattctatgtatactgagtagctatttggtgccacatgttaaactagaaaccatagaagacacaaataaattatcatctcaattattcttccaaaaggaaattataatacttaagtcaaagatacaatgaaaatatagcaatggggaaaattcattattattaatgcgtattatgaagctggagcagctggctccaatatagcacagggattaaagacgtttctctggggtcaaaaggccatggtttggattcaaatcccagtctgcaaatttagagacccaagatgggagcaaagggcttattcttgcgagacctcagttttgtcatatatgatatagtcatagtagttgtatgtacctcataggattaaatgagttgatggttatgaatcattaatgtatctttacgtaccacaagcataaggagaaatgaaaataatgaagaatgcaacttgaatggttaaatacatttgagctgttgttcatgtttatttttttagtaaatgacacctacgagattggagaattaaatgatattaacattacaactccatcaaagcccagctggcacctctcaaacctgaatgcaactaccaagtacaaattctacttgagggcttgcacttcacagggctgtggaaaaccgatcacggaggaaagctccaccttaggagaagggagtaagtacatgaggcttctctttttaatagaggctttaaaaagagactgcatctttttaaacagctgcactgaaaggaaagcaccgtgccagtcattgtaaattagaaatgattgtgatcccactctgtctgaccttctgttttccactgacatagaggcagaatttattaatctgtttggaaagttcacactgactcaatttatggatttctgcgcaataccaatcaaattatagcttagtgtatacaaggtcaggaactataattttacttaattaaagtagcaggacataaggtcacaaagctattcaaaaggttagtaaaggtacgtttttcttttagaaatgtttccatacagaaaaatatttggctcttccattggtagacattacagatctaatacatctcactttcatgccttcactctatatacattgattcatatgtcaattttgttttactgtctgatgatggatgccaagcaactgtctgggaaatggcttataaatgtatggtttcacttgtaacacaattatcctaattcaattacacttttctgtttttttctacctttaaccatttcctttcccaaattgcatctccagttatgattttagtgaggttcttgctaagctttctatgatagcaacaggacctttgcagagaaatcaggtcagaggaactgatgtacacacgaagtgaaacagagagagatttatgtagggcttaggctgttcaggcatggaaggatattggagaaagaaaagaaggatgtagaagatggcagaaagggaaatagagttgtttatttatcatgtattaagtgtggtgcaaaagtaattgtggcccttccattaaaagtagtaatggcaaaggccgcacttacttttgcaccaatctaatactatgtgtcagactgtgttctggatgcttttccaagttgtagattagaaaaacggtagaatcaatgaaagaaacatcacagaggggaaaaatagtagagaaaatgcagttgcctattatttattgaagatgtatattaaaatatattcaagcttgtgagtgactgtaaatcaccgtgtttgtgtgtgaatggttatgctctgacctttaatattggtttgtttttacatcttattgtgcctactatatctaactaataacaagcttacgtttttctcagattccttaaacatttaaaagccctttatgtgggaaaattgtataatccaaataattacttccctaaaactcacaaagtattcccagggatgaattgaacaccaagtgaaatgaagaactaatttcactgactttacctactcataaaagttagacttaaagatggggattggaaacttcccagtaactaaaaggttcttatgtctgaagcattggaactgacatcaagtgtccaatacaaagagaagtcagagtggtagtagtccaaacatgcaactgccatatttttaaaaacagaatttaaggcatggagttggttgctattttgatataaccaagaccataatgtgcatgtgaaatgctgatcccattcttaccaattggaagcacatgagaaaaaatattcacagaattgcctgacaagtgttacacattctagtatatatgttgcgaaatttgggcttggttgcattcgtgcttgagaaattgtttttggaggatgaaagtgctgttcatgtgattttacaggtgatgtggcatcttttctttaaactaaaaatgtaactaatgtgctgcatgtcttaaagaacatttcttcactgtcgtatgtgtcaggaatttaaaaatgtttcttactggtgtgtttgtgctctttttcaggaatccacattttcagtattccagctaactgcccccttcccgagttgacactgatttctattctataggcatgtcttgctataagtacagggaaaaaaattacaatctctttttctactagagttcaacatgatctttgaaaaaaatatatatttccaatgaggagagatacatcttgttatcagtcagcactctaaaaatgatcacttgtgcaaataggaacctactgctatgcatctttcttcttgctctgcctatatagctcatttcaaggtcatttggcatttgttcaaaaaataggatttgattgacaagtatttttctctgattgttttcactctgatttccaagtaaatcatattccataatctaagaggggaaaagatggagttaatcagaaatattatttttgtgtcattagcggtttgaataaatcacttgctttactctatttttcaaaagcttgcactacttaatgttatactaatatctctgtttttcaaggtcaaaattaattgcactctgtttcaatgacgcttaatcttgaaggctttgctcatataattggccttatttctctcatggtgtcatttttaataaaacctttttgttatttagtaactatataattaatttttattttatagtgaaaatacataatgaaatattgatctgtaacatatacccacttaaaatagcatttcataaccccttgtagtctcagtaagaaacatattttatatcattgttaacattttctgggttatgtttattatattgagttgattcccagcaaagctgtggatcacatgcaaaaatatttaagatatttggtggtaagacaagaagttaacatatttttgttcaacttgattcattttatcttctactatgagattctactattaacatattgacatattaatattttttgaaaagtattaacttctcacaccactttcaaaatgtcagtaaaaccattccattggtatgtacctgcaagcctgcatttcacgtagtttggacttctataaatttcaaatatttaatatatgaccatattttaatgctatttcatcagtgtttatggagaagaccaaagcaaaaaaaagcaatatatagttagttacgattataaggttatgtgctgtcaattataagtcaaaaggccatattcagtttcgcattaggtttgcgaaaatccaaattgcacaaaattatattgtataatttttttaagtctgtggttttgaaccattcatgtgaccaggcagatttacagtaccatttcatcttaaatggccatgcattgagttcatttcatttactcaatttcattatattaaaaaagaaagttgaaatgttgattttcttgatctcctggtaattcaaaaactatctgagaaaatatggtataagtgactttcttattcacctctaacaacaatatttttttatgtcctgtttttccatgattacaattcacatgatttaactgtgtacatttcttaggtaaaggtatcgggaagatatcaggagtaaatcttactcaaaagactcacccaatagaggtatttgagccgggagctgaacatatagttcgcctaatgactaagaattggggcgataatgatagcatttttcaagatgtaattgagacaagagggagaggtgagaaatgagattatatttggggaagtcttagtcaatctatgtcctgtagaatacttagtgttgcctgtgtcctatattaaacataaaaacactgagtgtattaattatgaaaatcgtaatttcaatttgttttgacatatttttaaattatcaaaatgaaaaatgtttcacagtagtccaccatcctttattttgtttttactagagttgttgcctaaaaatatctcctgctaattaacatatcttaataacacaaactaaaaagaaaaagcaaaacaaaacaaaaaccaccggtctccatggtcatctgcttctaaccaaggcagcttgcgcttttgtttgctccttgctgcttctgagtttaacttcatctgccttcattatccttctttggtttttcatcctcggaatcaaacacaactcgaagaagtccctttttaaataaagaaggaaagatttaccagtattctcccattaacatgtccttcaaattgcattccttctggggtcattaaaaaaactgatactatttggtatgtttaaaaatgatgtctaattttccccaatgttacagaatacaaaagactgtttctagtttacaatgctgtgacttctctttctaccacagaatatgctggtttatatgatgacatctccactcaaggctggtttattggactgatgtgtgcgattgctcttctcacactactattattaactgtttgctttgtgaagaggaatagaggtggaaagtactcaggtaaaattgtttcttaatgtgattttcaacttattaaaaagcattttctgggaagcattcttcagagacaactttttttaaaaatacacattcaagtcaaatttatattagcaagttagatgtacaatgcactgacaggaaaaacgtattgctaaattaaccaaagaaaatatgtatgttctagtttctagcacttaaaatgggctctaactgccgggcgcagtggctcacgcctgtaattccagcagtttgggaggccgaggtgggcggatcatgaggtcaggagatcgagaccatcctggccaacatgatgaaaccccgtctctactaaaaatacaaaaattagccgggcatggtggcagctgcctgtaatcccagctactcggaaggctgagacaggagaatcacttgaacccgggaggtggagtttgcagtgagctgagatcatgccactgtacttcagcttgggcgacaagagcaaaaactccatctcaaaaaaataaaaaataaaaaataggctctaacaaggttgataacacttccaagcttctattgtctatctgtaaaatatcagcgtcgttgagagacatatcactaggtcacatatatgctttagtgttttaagaagtgacccatgtatagcacgcctctctctatgcatgacatacatgactcatatttttcgcactagtgcattctaatattactggctccactggtcaattttgttggtgttaatcattactaggaatgcatttcttattaccatggcatgtagtagacacactgcctcttgaattaatgatacataagatatacatgaaaaccatcatagttggtaatatgacgtttgcctttaatttcattcaactcccgaatttgttttgtctttttcagatatacatattgtatcaagatgatgattattactagtattgcttagtattcatgatgcttttataaagggacaaagatttaggttacactgctatttgtttcatgatgttcagatatatgagaagttcattactggcttatgatttatctagcaaatatttattgggaacccgtcatctacatagaaacattgagagcataatttctaggtttttgtaaaatgacatgcataatttatggagttatgcgtttcacttttttctctgaagactgaatgattatgaattaagttcacaatgactaataaatgttctgagtaattaattggaaacgttaaagagttatagcattctccttatccccaacagataatcatttgtgtattgtggtgctatccagattccaaagatgtttcttcaaatcatgccctaaaaagaaaaaaaaaattagcatttcatattgtagagcaactaagagaatctactaggtctctgcatgtagtcgtaaaatgttccaggaagaacaatttgtatttgagggctttttttttttttttaagtaaagggaacaagagctttttggtcttatattccactaataagagaaatcagccaggcatagtggtggctgcctgaaatcctaactactcgggaggctgaggcaggagaatcccttgaacctgggaggcagaggttgcagtgagccgagatcacgcctctgcactccagcctgggcgacagagtgagactgtctcaaaaaaagtaataataaaataaaatgtcagtggagacctgaatattcagattgttgcaacaattttgagtaagagtgatgtataacaaccaaatgactgcctttttttttttttttttttgagacaaggtcttgttctgttgcccaggctggagtgcagtggttctatctcatctctttgcaacttctgcctcccaggctcaggtgatcctccaacctcagctcctcgtgtagctgggactacaggtgtatgctaccatgcctggctaatttctgtgtttttaatagagacagggtcttgctttgttgcccaggctggtttcaaactcctgatataaagtgttctgcccaccttggcctcccaaagtgccgggattacaggcatgagccaccacatccagccttgattgactttttaaattcaatttagtttaatgacacagatctaataggtgtctatgacatcttcaaaaagttcagatagtaaaataaatatttagtaatttggtcttcactgagaaatcaaactcagttgggctcttccaataagacttctcgttcacataaaattgagtagtcacgtgaaaatatgcaacatgctgcaggtgtgacgacaagtagaaccccccaaaatcccctctcttttttgtttaaacaaagaagcaactgatgggctgtaggtatagccagaaaaaaatattgcctcactggtatcaaaacatttgagcaatgctgttcttactgactattaactattccacagcactggtaaaatgtcttttaaatggtcactgtattacttttcccactttttttctcttttttagttaaagaaaaggaagatttgcatccagacccagaaattcagtcagtaaaagatgaaacctttggtgaatacaggtaaacataaggttctgttgtaaaataaaacacatattcatcatgttgaaagcttaagtgaacaaaaaggtgtttattcttaataaaaaggttacataactacaatgtaatgaccctataaagaatactttgtacaaatagggcccacttaagtgctagcaaccaaatttctgtgtgtgtgatgagggtgtataaataattaccgtctaggcagaaatgtcaggtaggacacttttcttgaagctctgtgcctaacacaaagaatatctatttggggtagctaaaacatctatagcatggccattatgaactcgggttcaatccaatttgcatccacacacgcatatctgtatacctacagcgttgcacctgcaaaggtaagtaagttacaaaccctgtcctctagatgaacctgatcagcagagaaaaatatcctatatatgcaaatgactgtaatgaattaaatagaataaaagagcacaaaagagagtaactgtttctgcccaggtaggattttggaaaaagaatcatccataagagataagctaagccttaaaggataaaaagtattgtgttactgttaaccactggacagaggatgaccaaatgagtgagggtgtgtcgggcaagggaggaatggcaagaagtctactctgagctaggtaggaatctttcggggacgtgttaaactgtctcattctccttttatctttctccaccttcccctttctgctactctctcaacttcttagttcttttttgttgtaatgtcatcatttttctcaggtctcctgtatatttcagccaacagacatattgtaagttccaggtttgtattgattttagcacatgggaaaccagagtttatattaaagaagaaatctgattgatcctgattctctcatctctggattcattactctagcaagggatatggagtattttcattagctaattggtagacatttgggcttacctgtacctccattttgtggtatacttatttttctgtattctacttagtcaataccctttttatatttttatatttcttaataaatgactttaaattctttccagaataaagaacaataaagagaaagaaagaaagagagaaaaagaaaaaggaagaaagaattttggaacttcacgaattgtgatcattactattgtattagttagcagttgcctcataacaataaccaccaatactcaacagcttaaaacaataaacatttattatttcaatgtcctcataattcaggaatccagacatggcttagatgggtacttctggctcaggacctctcatgaggttgcagcaaggttttgaccagggctatggtttcatctaaagtttcagccaaagcacaaatcattcctaggccattcgtgtggctgttggcaggatatagttccatacaggctgttgaactaagggcttctgttcttcacaggccagaggtcattcctaactccataccacgtagatatctccatggggccattcacaacatggcagctggcttccttcagaatgtgtgagccagggagcaagagagagcacccaagttggaagccacagtccttttgtaacctaatattggaagtgatatcccatcacttttgttgtattctataggaacaaatcattaagtttagctcacaactcaaaggaagaggattatacaagatacaaattccatgaggcaatgatcattaaggacctgcaacaacttttcaaaagctgaggcaggagaatttcttgaactcaggaggcggaggttgcagtaagctgagattgtgccactgcactccagcctgggcaacatagcgagactccatctcaacaacaaaacaaaaacacaaacaaacaaacaagcaaaaaaaaattttgaaagacaatattagctcaattttacaggcaagaaaacaaaaacaatgccttgtctaaaaacccatttccccacaccctgctgctcctttataaagatagctaacatcttcctgtgcattatttcctatgacatccctttatagtagctgatgtgttttccaacctctttcccccaaactacatatttatcaggataattgtctactttccacattatcccaggagacacttttataagatgctgtgcccttgcataagtcctcattcttctagcttctgataatcatcccttttgttatttttctttattctttgttcctgattcctcagccgatgcctcattgtttttcttgatttgttcttgtaactgcaatatcctaattcaagagccaattatcgtatcagtcaggggagcctgtgttatgctgctgtcaaaacaactccaaaagcattttctttctcaagttatgtgtcccacagagattgcccttttcatcttaatcacttaggagcactggctggtggacgagcatccaggctccccacagcagggaaaatagaatgtaataaactgagcactggctttaaatctttggctcggaagagacacatgtcacctttgctcactttttttttaaaccaaagaaaattccatggtggcatataacacagagtaggcaaagaagtgccatcctgctttattcctagaaacctgacatacttgatgaacagctctgacaaataccacaaattataaagtgatatgtacatccaaattatattttttccaaatgcttcattgatcaaatttgataaaatcattttatatggtgtatagcttcataatgtaatactaattggtacttaaaaaaatcttgatccaaaatttagaagatcataccatttgataagcatttcactaatggatttgcttctgttcatgaataaaacacctaccataaatatagtatacttatttatgttcttaaaataccagccatttctttctgtcttaaaatgtaacaaacttgaattgttaactatattaaagaaagttatttggtttcaaaaacagaatgtgattgatttttaaaaaagaacattttatcaggatataagagaatcaaaaggatcagaagtaaaggcagaagatcaagacttggaggccaggagctccaaaagttcatgacagcaagggaaattgcatttgttctctgtctgagtccattagggctactataacaaaataccataagctgggtggcttataaaagaacagaaacttaattcccacagttcaggattctgagaagcctaagagcaaagtgccagcattttcaatgtctggtgaacgctcactttctgggtgacagatggcaccttctctttgtgtcctcacatcgtgaaaggggtagggcagctctctggggcctcttctctaagggcactaatatcattcactagggttccacccttatggcctaatcacttcccaaagactccacctctaacaccctcacattggttatcaggttttaacataggaagcttgggaggacacagatattcagaccatagcagccactgtggacatcaacaggttgaatcccacatgtcctacagaagctaagctgctcaattttaaagagaagcacaaatgttgtgaataatgaaaaattgtttggtggaaattgcttatgactttgtagacatgtgtttacagacttcgtaaacttggtaaacatttgtggtagtatcatgtgggctttactatctgtcttcaatgctaacacaaatgtcctgaaaattataaaatcttttatcacttatgactgtgttgctttacatgaatattaatattagattttgttgagctatttttgtttgtttgttttctagtgacagtgatgaaaagcctctcaaaggaagccttcggtcccttaatagggatatgcagcctactgaaagtgctgacagcttagtcgaatacggagagggagaccatggtctcttcagtgaagatggatcatttattggtgcctacgctggatctaaggagaagggatctgttgaaagcaatggaagttctacagcaacttttccccttcgggcataaacacaacatatgtaagcaacgctactggttcaccccaaccttccatatttatctgttcaaaggagcaagaactttcatataggaatagaaacatgctggccgaagatttcatccagaagtcaacatcctgcaattatgttgaaaagagtagtactttcttcaaaatataaaatgccaagcacttcaggcctatgttttgcttatattgttttcaggtgctcaaaatgcaaaacacaaaacaaatcctgcatttagatacacctcaactaaatccaaagtccccattcagtatattccatatttgcctgattttactattcggtgtgtttgcatagatgttgctacttggtgggtttttctccgtatgcacattggtatacagtctctgagaactggcttggtgactttgcttcactacaggttaaaagaccataagcaaactggttatttaaaatgtaaaaaggaatatgaaagtcttattaaaacacttcattgaaaatatacagtctaaatttattatttaaattttactagcaaaagtcttaggtgaacaatcaactagtatttgttgagctcctatttgcccagagatggtcatatttaaacagaagtatacgtttttcagtttcaacatgaatttttttatttctgtcagttatgacatccacaagcatcactttttgtgtctgttttttttttttttcttggactaaattcaactgcatggaagcggtggtcagaaggttgttttatacgagaacaggcagaaagtgcccattgttcaggattctaatagctacatctacttaatatcttcatttctaaattgactgcttttacctttttctcatgtttatataatggtatgcttgcatatatttcatgaatacattgtacatattatgttaatatttacacaatttaaaatatagatgtgttttattttgaagtgagaaaatgaacattaacaggcatgtttgtacagctagaatatattagtaagatactgtttttcgtcattccagagctacaactaataacacgaggttccaaagctgaagactttgtataaagtatttgggttttgttcttgtattgctttctttcaacagtttcaaaataaaatatcatataaatattgagggaaatgttttcatatttttcaaaataggtttttattgttgaatgtacatctaccccagcccctcaaaagaaaaactgtttacatagaaattcctacacatacgtttgcgtatatgttattttaaacatctttgtggtgagaattttttccccgatattctccttctgtcaaagtcagaacaaattcagggaatttattttctggcagttgtgctccagtccttttaaaattgtacatgaacatgttttagaaacaatatggaggatgatgcatacatgtcggtcaagttcagcgctcgacattttatggaaagatttttttaaccttaccacgaaatacttaactactgtttaagtgaattgacttatttcactttagtttttgaactgtgattattggtatactgttatatcctcaacttggatttatggtaaccccttatagttcatggagaccaaaatttggggtatttataatagtcagcgcaggaatgcacatggaatatctacttgtccttttgaacctcacgagtcatccagaatgtatagacaggaaaagcatgtcttatttaaaactgtaatttatgggctcaggatctgaccgcagtcccgggagtaagcatttcaaagggggaaggcagtgtggtccctaccctgtgtgaatgtgaggatgtagacatccatcagtgcaactcgagctccatcctcctccgatttctaaggttccagttttctggagggacagtcatcatgttttgatttatctgggagaaaactgtggtgcacagcttgtgaggagggcaaggttgtgacgttcgagcttagttctggtgttattctgtctcctcttctttgtcatcagccaaaacgtggtttttaaagagagtcatgcaggttagaaataatgtcaaaaatatttaggaatttaataacctttaagtcagaaactaaaacaaatactgaaatattagctcttcctacacttcgtgttcccctttagctgcctgaaaatcaagattgctcctgctcagatcttctgagtggctaaaacttatggatatgaaaaatgagattgaatgatgactatgctttgctatcattgttacctttcctcaatactatttggcaactactgggactcttcagcacaaaaggaatagatctatgattgaccctgattttaattgtgaaattatatgattcatatattttatgaatcagaataaccttcaaataaaataaatctaagtcggttaaaatggatttcatgattttccctcagaaaatgagtaacagagtccacggcgtgcaatggtaattataaattggtgatgcttgtttgcaaattgcccactcgtgataagtcaacagccaatatttaaaactttgttcgttactggctttaccctaactttctctagtctactgtcaatatcattttaatgtaattgattgtatatagtctcaagaatggttggtgggcatgagttcctagagaactgtccaagggttgggaaaatccaaattctcttcctggttccagcactgattttgtacataaacattaggcaggttgcttaacctttttatttcaaactctctcaactctaaagtgctaataataatctcagttaccttatctttgtcacagggtgttcttttttatgaagaaaaatttgaaaatgataaaagctaagatgccttctaacttcataagcaaacctttaactaattatgtatctgaaagtcacccccacataccaactcaacttttttcctgtgaacacataaatatatttttatagaaaaacaaatctacataaaataaatctactgtttagtgagcagtatgatttgtacatgccattgaaaattattaatcagaagaaaattaagcagggtctttgctatacaaaagtgttttccactaattttgcatgcgtatttataagaaaaatgtgaatttggtggttttattctatcggtataaaggcattgatattttagatgcacccgtgtttgtaaaaatgtagagcacaatggaattatgctggaagtctcaaataatatttttttcctattttatactcatggaagagataagctaaagaggggacaataatgagaaatgttggtgtgcttttctaagcatttaaaacataattgccaattgaaaccctaaatatgtttacataccattaagatatgattcatgtaacaatgttaaattaattataatgggattgggtttgttatctgtggtagtatatatcctagtgttcctatagtgaaataagtagggttcagccaaagctttctttgttttgtaccttaaattgttcgattacgtcatcaaaagagatgaaaggtatgtagaacaggttcacgtgattacctttttcttttggcttggattaatattcatagtagaactttataaaacgtgtttgtattgtaggtggtgtttgtattatgcttatgactatgtatggtttgaaaatattttcattatacatgaaattcaactttccaaataaaagttctacttcatgtaatccaaaaa

SEQ ID NO: 10008 - DNA, 3924 bp, Homo sapiens
agtgacagtgatgaaaagcctctcaaaggaagccttcggtcccttaatagggatatgcagcctactgaaagtgctgacagcttagtcgaatacggagagggagaccatggtctcttcagtgaagatggatcatttattggtgcctacgctggatctaaggagaagggatctgttgaaagcaatggaagttctacagcaacttttccccttcgggcataaacacaacatatgtaagcaacgctactggttcaccccaaccttccatatttatctgttcaaaggagcaagaactttcatataggaatagaaacatgctggccgaagatttcatccagaagtcaacatcctgcaattatgttgaaaagagtagtactttcttcaaaatataaaatgccaagcacttcaggcctatgttttgcttatattgttttcaggtgctcaaaatgcaaaacacaaaacaaatcctgcatttagatacacctcaactaaatccaaagtccccattcagtatattccatatttgcctgattttactattcggtgtgtttgcatagatgttgctacttggtgggtttttctccgtatgcacattggtatacagtctctgagaactggcttggtgactttgcttcactacaggttaaaagaccataagcaaactggttatttaaaatgtaaaaaggaatatgaaagtcttattaaaacacttcattgaaaatatacagtctaaatttattatttaaattttactagcaaaagtcttaggtgaacaatcaactagtatttgttgagctcctatttgcccagagatggtcatatttaaacagaagtatacgtttttcagtttcaacatgaatttttttatttctgtcagttatgacatccacgagcatcactttttgtgtctgtttttttttttttcttggactaaattcaactgcatggaagcggtggtcagaaggttgttttatacgagaacaggcagaaagtgcccattgttcaggattctaatagctacatctacttaatatcttcatttctaaattgactgcttttacctttttctcatgtttatataatggtatgcttgcatatatttcatgaatacattgtacatattatgttaatatttacacaatttaaaatatagatgtgttttattttgaagtgagaaaatgaacattaacaggcatgtttgtacagctagaatatattagtaagatactgtttttcgtcattccagagctacaactaataacacgagggtccaaagctgaagactttgtataaaggatttgggttttggtcttggattgctttctttcaacaggttcaaaataaaatatcatacaaatattgagggaaatgttttcatatttttcaaaataggtttttattgttgaatgtacatctaccccagcccctcaaaagaaaaactgtttacatagaaattcctacacatacgtttgcgtatatgttattttaaacatctttgtggtgagaattttttccccgatattctccttctgtcaaagtcagaacaaattcagggaatttattttctggcagttgtgctccagtccttttaaaattgtacatgaacatgttttagaaacaatatggaggatgatgcatacatgtcggtcaagttcagcgctcgacattttatggaaagatttttttaaccttaccacgaaatacttaactactgtttaagtgaattgacttatttcactttagtttttgaactgtgattattggtatactgttatatcctcaacttggatttatggtaaccccttttagttcatggagaccaaaatttggggtatttataatagtcagcgcaggaatgcacatggaatatctacttgtccttttgaacctcacgagtcatccagaatgtatagacaggaaaagcatgtcttatttaaaactgtaatttatgggctcaggatctgaccgcagtcccgggagtaagcatttcaaagggggaaggcagtgtggtccctaccctgtgtgaatgtgaggatgtagacatccatcagtgcaactcgagctccatcctcctccgatttctaaggctccagttttctggagggacagtcatcatgttttgatttatctgggagaaaactgtggtgcacagcttgtgaggagggcaaggttgtgacgttcgagcttagttctggtgttattctgtctcctcttctttgtcatcagccaaaacgtggtttttaaagagagtcatgcaggttagaaataatgtcaaaaatatttaggaatttaataacctttaagtcagaaactaaaacaaatactgaaatattagctcttcctacacttcgtgttcccctttagctgcctgaaaatcaagattgctcctactcagatcttctgagtggctaaaacttatggatatgaaaaatgagattgaatgatgactatgctttgctatcattgttacctttcctcaatactatttggcaactactgggactcttcagcacaaaaggaatagatctatgattgaccctgattttaattgtgaaactatatgattcatatattttatgaatcagaataaccttcaaataaaataaatctaagtcggttaaaatggatttcatgattttccctcagaaaatgagtaacggagtccacggcgtgcaatggtaattataaattggtgatgcttgtttgcaaattgcccactcgtgataagtcaacagccaatatttaaaactttgttcgttactggctttaccctaactttctctagtctactgtcaatatcattttaatgtaattgattgtatatagtctcaagaatggttggtgggcatgagttcctagagaactgtccaagggttgggaaaatccaaattctcttcctggctccagcactgattttgtacataaacattaggcaggttgcttaacctttttatttcaaactctcacaactctaaagtgctaataataatctcagttaccttatctttgtcacagggtgttcttttttatgaagaaaaatttgaaaatgataaaagctaagatgccttctaacttcataagcaaacctttaactaattatgtatctgaaagtcacccccacataccaactcaacttttttcctgtgaacacataaatatatttttatagaaaaacaaatctacataaaataaatctactgtttagtgagcagtatgacttgtacatgccattgaaaattattaatcagaagaaaattaagcagggtctttgctatacaaaagtgttttccactaattttgcatgcgtatttataagaaaaatgtgaatttggtggttttattctatcggtataaaggcatcgatattttagatgcacccgtgtttgtaaaaatgtagagcacaatggaattatgctggaagtctcaaataatatttttttcctattttatactcatggaagagataagctaaagaggggacaataatgagaaatgttggtgtgcttttctaagcatttaaaacataattgccaattgaaaccctaaatatgtttacataccattaagatatgattcatgtaacaatgttaaattaattataatgggattgggtttgttatctgtggtagtatatatcctagtgttcctatagtgaaataagtagggttcagccaaagctttctttgttttgtaccttaaattgttcgattacgtcatcaaaagagatgaaaggtatgtagaacaggttcacgtgattacctttttctttgggcttggattaatattcatagtagaactttataaaacgtgtttgtattgtaggtggtgtttgtattatgcttatgactatgtatggtttgaaaatattttcattatacatgaaattcaactttccaaataaaagttctacttcatgtaatccaaaaa

SEQ ID NO: 10009 - DNA, 10383 bp, Homo sapiens
atgacatctccactcaaggctggtttattggactgatgtgtgcgattgctcttctcacactactattattaactgtttgctttgtgaagaggaatagaggtggaaagtactcaggtaaaattgtttcttaatgtgattttcaacttattaaaaagcattttctgggaagcattcttcagagacaactttttttaaaaatacacattcaagtcaaatttatattagcaagttagatgtacaatgcactgacaggaaaaacgtattgctaaattaaccaaagaaaatatgtatgttctagtttctagcacttaaaatgggctctaactgccgggcgcagtggctcacgcctgtaattccagcagtttgggaggccgaggtgggcggatcatgaggtcaggagatcgagaccatcctggccaacatgatgaaaccccgtctctactaaaaatacaaaaattagccgggcatggtggcagctgcctgtaatcccagctactcggaaggctgagacaggagaatcacttgaacccgggaggtggagtttgcagtgagctgagatcatgccactgtacttcagcttgggcgacaagagcaaaaactccatctcaaaaaaataaaaaataaaaaataggctctaacaaggttgataacacttccaagcttctattgtctatctgtaaaatatcagcgtcgttgagagacatatcactaggtcacatatatgctttagtgttttaagaagtgacccatgtatagcacgcctctctctatgcatgacatacatgactcatatttttcgcactagtgcattctaatattactggctccactggtcaattttgttggtgttaatcattactaggaatgcatttcttattaccatggcatgtagtagacacactgcctcttgaattaatgatacataagatatacatgaaaaccatcatagttggtaatatgacgtttgcctttaatttcattcaactcccgaatttgttttgtctttttcagatatacatattgtatcaagatgatgattattactagtattgcttagtattcatgatgcttttataaagggacaaagatttaggttacactgctatttgtttcatgatgttcagatatatgagaagttcattactggcttatgatttatctagcaaatatttattgggaacccgtcatctacatagaaacattgagagcataatttctaggtttttgtaaaatgacatgcataatttatggagttatgcgtttcacttttttctctgaagactgaatgattatgaattaagttcacaatgactaataaatgttctgagtaattaattggaaacgttaaagagttatagcattctccttatccccaacagataatcatttgtgtattgtggtgctatccagattccaaagatgtttcttcaaatcatgccctaaaaagaaaaaaaaaattagcatttcatattgtagagcaactaagagaatctactaggtctctgcatgtagtcgtaaaatgttccaggaagaacaatttgtatttgagggctttttttttttttttaagtaaagggaacaagagctttttggtcttatattccactaataagagaaatcagccaggcatagtggtggctgcctgaaatcctaactactcgggaggctgaggcaggagaatcccttgaacctgggaggcagaggttgcagtgagccgagatcacgcctctgcactccagcctgggcgacagagtgagactgtctcaaaaaaagtaataataaaataaaatgtcagtggagacctgaatattcagattgttgcaacaattttgagtaagagtgatgtataacaaccaaatgactgcctttttttttttttttttttgagacaaggtcttgttctgttgcccaggctggagtgcagtggttctatctcatctctttgcaacttctgcctcccaggctcaggtgatcctccaacctcagctcctcgtgtagctgggactacaggtgtatgctaccatgcctggctaatttctgtgtttttaatagagacagggtcttgctttgttgcccaggctggtttcaaactcctgatataaagtgttctgcccaccttggcctcccaaagtgccgggattacaggcatgagccaccacatccagccttgattgactttttaaattcaatttagtttaatgacacagatctaataggtgtctatgacatcttcaaaaagttcagatagtaaaataaatatttagtaatttggtcttcactgagaaatcaaactcagttgggctcttccaataagacttctcgttcacataaaattgagtagtcacgtgaaaatatgcaacatgctgcaggtgtgacgacaagtagaaccccccaaaatcccctctcttttttgtttaaacaaagaagcaactgatgggctgtaggtatagccagaaaaaaatattgcctcactggtatcaaaacatttgagcaatgctgttcttactgactattaactattccacagcactggtaaaatgtcttttaaatggtcactgtattacttttcccactttttttctcttttttagttaaagaaaaggaagatttgcatccagacccagaaattcagtcagtaaaagatgaaacctttggtgaatacaggtaaacataaggttctgttgtaaaataaaacacatattcatcatgttgaaagcttaagtgaacaaaaaggtgtttattcttaataaaaaggttacataactacaatgtaatgaccctataaagaatactttgtacaaatagggcccacttaagtgctagcaaccaaatttctgtgtgtgtgatgagggtgtataaataattaccgtctaggcagaaatgtcaggtaggacacttttcttgaagctctgtgcctaacacaaagaatatctatttggggtagctaaaacatctatagcatggccattatgaactcgggttcaatccaatttgcatccacacacgcatatctgtatacctacagcgttgcacctgcaaaggtaagtaagttacaaaccctgtcctctagatgaacctgatcagcagagaaaaatatcctatatatgcaaatgactgtaatgaattaaatagaataaaagagcacaaaagagagtaactgtttctgcccaggtaggattttggaaaaagaatcatccataagagataagctaagccttaaaggataaaaagtattgtgttactgttaaccactggacagaggatgaccaaatgagtgagggtgtgtcgggcaagggaggaatggcaagaagtctactctgagctaggtaggaatctttcggggacgtgttaaactgtctcattctccttttatctttctccaccttcccctttctgctactctctcaacttcttagttcttttttgttgtaatgtcatcatttttctcaggtctcctgtatatttcagccaacagacatattgtaagttccaggtttgtattgattttagcacatgggaaaccagagtttatattaaagaagaaatctgattgatcctgattctctcatctctggattcattactctagcaagggatatggagtattttcattagctaattggtagacatttgggcttacctgtacctccattttgtggtatacttatttttctgtattctacttagtcaataccctttttatatttttatatttcttaataaatgactttaaattctttccagaataaagaacaataaagagaaagaaagaaagagagaaaaagaaaaaggaagaaagaattttggaacttcacgaattgtgatcattactattgtattagttagcagttgcctcataacaataaccaccaatactcaacagcttaaaacaataaacatttattatttcaatgtcctcataattcaggaatccagacatggcttagatgggtacttctggctcaggacctctcatgaggttgcagcaaggttttgaccagggctatggtttcatctaaagtttcagccaaagcacaaatcattcctaggccattcgtgtggctgttggcaggatatagttccatacaggctgttgaactaagggcttctgttcttcacaggccagaggtcattcctaactccataccacgtagatatctccatggggccattcacaacatggcagctggcttccttcagaatgtgtgagccagggagcaagagagagcacccaagttggaagccacagtccttttgtaacctaatattggaagtgatatcccatcacttttgttgtattctataggaacaaatcattaagtttagctcacaactcaaaggaagaggattatacaagatacaaattccatgaggcaatgatcattaaggacctgcaacaacttttcaaaagctgaggcaggagaatttcttgaactcaggaggcggaggttgcagtaagctgagattgtgccactgcactccagcctgggcaacatagcgagactccatctcaacaacaaaacaaaaacacaaacaaacaaacaagcaaaaaaaaattttgaaagacaatattagctcaattttacaggcaagaaaacaaaaacaatgccttgtctaaaaacccatttccccacaccctgctgctcctttataaagatagctaacatcttcctgtgcattatttcctatgacatccctttatagtagctgatgtgttttccaacctctttcccccaaactacatatttatcaggataattgtctactttccacattatcccaggagacacttttataagatgctgtgcccttgcataagtcctcattcttctagcttctgataatcatcccttttgttatttttctttattctttgttcctgattcctcagccgatgcctcattgtttttcttgatttgttcttgtaactgcaatatcctaattcaagagccaattatcgtatcagtcaggggagcctgtgttatgctgctgtcaaaacaactccaaaagcattttctttctcaagttatgtgtcccacagagattgcccttttcatcttaatcacttaggagcactggctggtggacgagcatccaggctccccacagcagggaaaatagaatgtaataaactgagcactggctttaaatctttggctcggaagagacacatgtcacctttgctcactttttttttaaaccaaagaaaattccatggtggcatataacacagagtaggcaaagaagtgccatcctgctttattcctagaaacctgacatacttgatgaacagctctgacaaataccacaaattataaagtgatatgtacatccaaattatattttttccaaatgcttcattgatcaaatttgataaaatcattttatatggtgtatagcttcataatgtaatactaattggtacttaaaaaaatcttgatccaaaatttagaagatcataccatttgataagcatttcactaatggatttgcttctgttcatgaataaaacacctaccataaatatagtatacttatttatgttcttaaaataccagccatttctttctgtcttaaaatgtaacaaacttgaattgttaactatattaaagaaagttatttggtttcaaaaacagaatgtgattgatttttaaaaaagaacattttatcaggatataagagaatcaaaaggatcagaagtaaaggcagaagatcaagacttggaggccaggagctccaaaagttcatgacagcaagggaaattgcatttgttctctgtctgagtccattagggctactataacaaaataccataagctgggtggcttataaaagaacagaaacttaattcccacagttcaggattctgagaagcctaagagcaaagtgccagcattttcaatgtctggtgaacgctcactttctgggtgacagatggcaccttctctttgtgtcctcacatcgtgaaaggggtagggcagctctctggggcctcttctctaagggcactaatatcattcactagggttccacccttatggcctaatcacttcccaaagactccacctctaacaccctcacattggttatcaggttttaacataggaagcttgggaggacacagatattcagaccatagcagccactgtggacatcaacaggttgaatcccacatgtcctacagaagctaagctgctcaattttaaagagaagcacaaatgttgtgaataatgaaaaattgtttggtggaaattgcttatgactttgtagacatgtgtttacagacttcgtaaacttggtaaacatttgtggtagtatcatgtgggctttactatctgtcttcaatgctaacacaaatgtcctgaaaattataaaatcttttatcacttatgactgtgttgctttacatgaatattaatattagattttgttgagctatttttgtttgtttgttttctagtgacagtgatgaaaagcctctcaaaggaagccttcggtcccttaatagggatatgcagcctactgaaagtgctgacagcttagtcgaatacggagagggagaccatggtctcttcagtgaagatggatcatttattggtgcctacgctggatctaaggagaagggatctgttgaaagcaatggaagttctacagcaacttttccccttcgggcataaacacaacatatgtaagcaacgctactggttcaccccaaccttccatatttatctgttcaaaggagcaagaactttcatataggaatagaaacatgctggccgaagatttcatccagaagtcaacatcctgcaattatgttgaaaagagtagtactttcttcaaaatataaaatgccaagcacttcaggcctatgttttgcttatattgttttcaggtgctcaaaatgcaaaacacaaaacaaatcctgcatttagatacacctcaactaaatccaaagtccccattcagtatattccatatttgcctgattttactattcggtgtgtttgcatagatgttgctacttggtgggtttttctccgtatgcacattggtatacagtctctgagaactggcttggtgactttgcttcactacaggttaaaagaccataagcaaactggttatttaaaatgtaaaaaggaatatgaaagtcttattaaaacacttcattgaaaatatacagtctaaatttattatttaaattttactagcaaaagtcttaggtgaacaatcaactagtatttgttgagctcctatttgcccagagatggtcatatttaaacagaagtatacgtttttcagtttcaacatgaatttttttatttctgtcagttatgacatccacaagcatcactttttgtgtctgttttttttttttttcttggactaaattcaactgcatggaagcggtggtcagaaggttgttttatacgagaacaggcagaaagtgcccattgttcaggattctaatagctacatctacttaatatcttcatttctaaattgactgcttttacctttttctcatgtttatataatggtatgcttgcatatatttcatgaatacattgtacatattatgttaatatttacacaatttaaaatatagatgtgttttattttgaagtgagaaaatgaacattaacaggcatgtttgtacagctagaatatattagtaagatactgtttttcgtcattccagagctacaactaataacacgaggttccaaagctgaagactttgtataaagtatttgggttttgttcttgtattgctttctttcaacagtttcaaaataaaatatcatataaatattgagggaaatgttttcatatttttcaaaataggtttttattgttgaatgtacatctaccccagcccctcaaaagaaaaactgtttacatagaaattcctacacatacgtttgcgtatatgttattttaaacatctttgtggtgagaattttttccccgatattctccttctgtcaaagtcagaacaaattcagggaatttattttctggcagttgtgctccagtccttttaaaattgtacatgaacatgttttagaaacaatatggaggatgatgcatacatgtcggtcaagttcagcgctcgacattttatggaaagatttttttaaccttaccacgaaatacttaactactgtttaagtgaattgacttatttcactttagtttttgaactgtgattattggtatactgttatatcctcaacttggatttatggtaaccccttatagttcatggagaccaaaatttggggtatttataatagtcagcgcaggaatgcacatggaatatctacttgtccttttgaacctcacgagtcatccagaatgtatagacaggaaaagcatgtcttatttaaaactgtaatttatgggctcaggatctgaccgcagtcccgggagtaagcatttcaaagggggaaggcagtgtggtccctaccctgtgtgaatgtgaggatgtagacatccatcagtgcaactcgagctccatcctcctccgatttctaaggttccagttttctggagggacagtcatcatgttttgatttatctgggagaaaactgtggtgcacagcttgtgaggagggcaaggttgtgacgttcgagcttagttctggtgttattctgtctcctcttctttgtcatcagccaaaacgtggtttttaaagagagtcatgcaggttagaaataatgtcaaaaatatttaggaatttaataacctttaagtcagaaactaaaacaaatactgaaatattagctcttcctacacttcgtgttcccctttagctgcctgaaaatcaagattgctcctgctcagatcttctgagtggctaaaacttatggatatgaaaaatgagattgaatgatgactatgctttgctatcattgttacctttcctcaatactatttggcaactactgggactcttcagcacaaaaggaatagatctatgattgaccctgattttaattgtgaaattatatgattcatatattttatgaatcagaataaccttcaaataaaataaatctaagtcggttaaaatggatttcatgattttccctcagaaaatgagtaacagagtccacggcgtgcaatggtaattataaattggtgatgcttgtttgcaaattgcccactcgtgataagtcaacagccaatatttaaaactttgttcgttactggctttaccctaactttctctagtctactgtcaatatcattttaatgtaattgattgtatatagtctcaagaatggttggtgggcatgagttcctagagaactgtccaagggttgggaaaatccaaattctcttcctggttccagcactgattttgtacataaacattaggcaggttgcttaacctttttatttcaaactctctcaactctaaagtgctaataataatctcagttaccttatctttgtcacagggtgttcttttttatgaagaaaaatttgaaaatgataaaagctaagatgccttctaacttcataagcaaacctttaactaattatgtatctgaaagtcacccccacataccaactcaacttttttcctgtgaacacataaatatatttttatagaaaaacaaatctacataaaataaatctactgtttagtgagcagtatgatttgtacatgccattgaaaattattaatcagaagaaaattaagcagggtctttgctatacaaaagtgttttccactaattttgcatgcgtatttataagaaaaatgtgaatttggtggttttattctatcggtataaaggcattgatattttagatgcacccgtgtttgtaaaaatgtagagcacaatggaattatgctggaagtctcaaataatatttttttcctattttatactcatggaagagataagctaaagaggggacaataatgagaaatgttggtgtgcttttctaagcatttaaaacataattgccaattgaaaccctaaatatgtttacataccattaagatatgattcatgtaacaatgttaaattaattataatgggattgggtttgttatctgtggtagtatatatcctagtgttcctatagtgaaataagtagggttcagccaaagctttctttgttttgtaccttaaattgttcgattacgtcatcaaaagagatgaaaggtatgtagaacaggttcacgtgattacctttttcttttggcttggattaatattcatagtagaactttataaaacgtgtttgtattgtaggtggtgtttgtattatgcttatgactatgtatggtttgaaaatattttcattatacatgaaattcaactttccaaataaaagttctacttcatgtaatccaaaaa

SEQ ID NO: 10010 - DNA, 11532 bp, Homo sapiens
aggataattattgatggagctaatttgaccatatctaatgtaactttagaggaccaaggtatttactgctgttcagctcatactgctctagacagtgctgccgatataactcaagtaactgttcttggtaagtgcactaactaatgagaaatctgttcatttcttcatttctgattaaatcccatcgttcctggccaataaagctaatgattctttgagcccctgcacatatattgttagtttcaaatttttgtttaaaaagcaacacaacttcaaatcctttctccttttttcatataaaagaaattaattaatgcttaattttttttccctacatgtgttaatttgccaatagcagtgggaggtaagtgatgctatccgcagaaagaaaaataaagcacgcttgagttcctagcactcttgagctactctttcctggtgtacaaagaaatggggctgaggaatggaggtgggctagactggaggatctcgataggggtcaagaggtggatgcacggtggtcatctctaaaccaaaggcacagactgagttcccagggttccaggaaggatggagaggaacttccagcattctacaaaggaatgtctttgatttttgtcgttgttgttgttgatgaaagtactaatcaggaaacagtgtgcacacttcactagtataatcaatgcaattactcctgaaatcaccaatgtttaaagctcttagaccatctgctggatgttttccaaaatttcccttccagattcactctctaccagctctttgacctagaaaggttgcttttaaggacaacatcagcaaaccactttccttccagctattatttggttcagcaagtggagggccgtttggagtgttgtactgattctccctactccatccctgtggactggctgtgtcccactgccaaagtcatggcttctgcagacagggtctcctcacaccattccttctgatgaggctctagcagctgcatcccaccaccaatatttcaagtctctctcacacccaacctactgaacatcctgcccacatctttttaaagacgttttattaaaacattttggaactatcgtaaatttgtgtgagttattcattgattttctgcagggaccctaacagctacagacatttgttctgtttcggtggccaccatgtagtctttcttttagtttgcagacattccttaaaagtgttggttttgcctacccttctttatcatatgtctacattaatcactgttatcaacagacctttgtgtctttagcactccagctgttggggccacctgttaggttccaaacaagggaggtggtggtacagaccaagggagaaagttcagtctcttctgagagactgataaaaaaatgggtcaacaggctggatcccttcaagtaaagcaaatggccaacctgtctcgggcgaaacaaatggccatcaaggttgggttctaaaataaaagaacagtttccacttacagaaggtatggacttgtagagttgtcgagtcggctcagtagaattgtacctttaggcagaatgtttggccattgggtatttgagcattttcaggtctttacaagcagaaaggtttaatcccctaggatgatttcaacaataattcatcagataaagtagtcgagcttcagataaactggaattcatcccaggcctagtgagtagaggggtaagtgtcaggctccgtgcgctttgtccctaagtattttgagcagtctcagccaccaaaaggaccgggtctcctactgcttggtgctccccttctcaatttccttacaaaatttaaaagttcattcttgcgattaggctgccatttttggaactattaatttttttaattctacataaattttacctacgattatatgtactggttatatacgcagtaatctaccagtgtttacagaataaaaataaaaataaattttggagaatattatgtttaaaatttacattcttttattttttagacaaacttctgatttaccaaagcatctctcgacaattgacaataaaaaaataattatatagacacatacgaggtttctaaaagactatgttttaccccctggaaaacaattttttaaagtacatacttgaccccctttaatcaaaagttatttttaaaagccttgacataaacatgctttcaggatatcattttttaaaagtttcagttgcaagttcatcagttctagctccatacgattctcagaagagccagattttaatatcagatgcaatacacagccttagtttattccaggaagcttcagaaatcagtggactcagtaaatactgaagagaaaccaaagtcctctgagctcagagattctgaaacctgttgaagaattaactttttatttatggctttaatgtttggacacagtcatgaaccacattttttaaaaaacatgttctctcttctgaattggaaacgatgctttttgtcaatgtaaatttctaacaattagcaaatattcaggaggagcaatggacggtgctttccacttggagaagaaagagcccattgaaaggctacattagataatatcttccttttctcttctgctaaaagataaaagtcctccaatgcttgagagaattcaaacccaattttcagagtaaataccattagaaataagatttctttttactgttgctttattttcaaagtaccagaaattttcattttctttagtactcaaaaatttgtgatcatttacttacttaattttccagtttctgtcacaacatttaacaatgccaaatctccctgttctgatataaactgccttcctactctttttgagaactccaggttaagacggtatcaaagttgctataatgaaaattcattgttatcaataatgataaaaatccaacacagttgcagaaaagaaagcagagctcatgatctctttttctataaccataagacctaatgtttattgctttaatataataattatacacatgattgaagtaataatatctttttcactgatttatttagttataaaacatttatgtgtgaggcactgtgggcaatgcaaagcttaataaaatatgacccctattcttggagatgaatcaggcatataaacaaatatgtactggacaaacagaaatgattcatttgagatacatcatgtttcccagacttgggtatacctaatccccatccaaggaacttgtttgcaaatgcagattcctgggcccaccttcctcagtaagccagaaatagggcctaggaattttcattgttattaactactcctaaaagaattctgatgtccctggtcaaggataaccccttgagactgtaatcagagaagagggaggtaatatggtccattggggaggacatgtggagatgctgcattttacaaagaaccccagaccccagagcctgatgcgattgaacacagtggagacatgggcccagaaaagaagggtttttatggaaccaaactggggtccaccaacccagtgcagtaagaccaggtatctatactgaggtttgcagtgggagaaaggaagacacttatctgcagggcaccaaacaagaactggtcagctcatgcttaagtcccaacctccccagtggcttgcaggtgaaggtatttaaaagcaggagtaaatttcaggagagcaaatgctataggcaaaatagtaaattagtacattgaggttacacattgctttatgcctaaaagggtgaggtatcttgaactggagttggggcatggcttacaggtcataggtggattcaaagattttctgatttgcaattggttaaggaagagaagctttgtttaaaaattgggagtcagccaaaaagaatattagctctggctcatggatgtggctccctttaggccctcaggaagaaatttacaaaaaatgatggtcagaactcagacttcagtttccccttatctgaggtctccatgccagcaaagttatttggtgagagtctgggttccagaaaaacaacttagagacatatattaagatgttatcttcagtttctataggagaaccaaacatccctgtgattccagcttccttggctattgtttaaagctactattacctccgttcttatcaagttgtttatttacttcttagggctagctaggtgcctgaattacccttgaaactccacctttcccttccatatgtggggtggggggcgggggtgcttcccaggtccctaagagggtggtacctcctctgtctccgggtagctggcaatgtgtctgaggaagggaatcaggtaaacaaaggcaattatctacattttcccttcctttattaattagatgttccggatccaccagaaaaccttcacttgtctgaaagacagaacaggagtgttcggctgacctgggaagctggagctgaccacaacagcaatattagcggtaggaagacttgggataactgttttcattactctagatagtcaaaattaatagcgaagtcactttttaaccactcttactggtttattcttcttataacatccttttgaacttttaatattgagtataaattttggtataacttatccatactccatacattctaatattttttccctgtttatactaccagagtatattgttgaatttgaaggaaacaaagaagagcctggaaggtgggaggaactgaccagagtccaaggaaagaaaaccacagttatcttacctttggctccatttgtgagataccagttcagggtcatagccgtgaacgaagtagggagaagtcagcctagccagccgtcagaccatcatgaaacaccaccagcaggtatgcaggttctcacatcaggtttctaacaaaatatttgtttgtccccatctttgaacatctaaaaaaaaaagattgatagagtaatgtaggattttagatttctccaaatagtgttaacagttctctaaacagcacacaaaatattcaaagcacacaagtttcagaagtgttacatacgagttcgataaaagcaggaaattaggggagtgacatatgaaaaaaaaacattactttcagtaattttgtgatggctaaatatcaagtttaaccagatatcatcaagtaagttctaaattaaaattcaatatgtatgcatctaacattattaatttttatgcattcagtgtcttttcttgtgtctcaacatcaatctaaatttccaagatgcgtttgaaaaaatctcaaggatgactgctaaaatttgtattactgaattgttattgatcatcaatgtggtcatagcatgatattttatttttccttggctaaaataaatactctaggacataatttcctttttggactgagaaaaagcaagtgaaggttataactggatcagatagaaattaacacttgtgtgattttagtgcatgtcaacctttgcactaaactccacatttagctatttctaataaaacgaatccatctaaaaatattcatgactactgtacaggttttattcattttgatgtccttaaaacttggctgctgatattaatacatggtgtttactttattcttctacaggcaaatattcacaacatatgtttctaatgacaattctaatagaaaaaatagagcaggcttaaattaaaatttttttttaaaaaagcaggttcagaattttaaaaagcagttttaaaaattttaaaagcagattcaaaattaagacacatatactaaaccatctactctccactggataataattatttcactccaagaagactgttttactcttttaaataaaatacatatttaaaatctaccttaaatctttttaggaactggaccagatataaattaataagtacaatcaaacttacttaattatctgtgtttttggggggcaggagttgtgatatgatgacttacctatgggttaaaaggaaaaataatgttaatgtttttaatttttcagctccagataggaatccacaaaacataagggttcaagcctctcaacccaaggaaatgattataaagtgggaggtgtgtatttcttaatacgttatgtatttctttgtgcttttctcttcctcttaggtctgcatgctaactacaatgatagcacaacatttttttaagaacaaagataagatttggaaatgaaattaacttgtgagtcatcatcacaaattttaaagatcattgtgattaaaatgatgttatgaaatcgagtttaacactggtcaacaatttagggaagattatacagattgatttagttgtaatacattaccgaagtttcaaattattaataatttaattaacaatattctagattctcttccattcaaaaaatactgaaaatctttaattaatttagtataatctactagatattatgcatatcaaactgatgaacccccataaagtattcactactcattaaacaccagtagacattttgtattctcctttctagtaattctgaggatggtcttgtgaagaaagcatcatgaacgccttattctagatctggagatggcatccaggattatgaatgtcttgcccatcaccacacaaccagaaatccgcaaagctaggatttatgtatgaggatctttggactccaaacctcactttttcctcctttacatatctcggttaaatgttattaaatagacttcaccatttgaattttgcataaaaatgcccatctacccagataattttaattattctagggtcatttccaaattttttctgtaacagtggggcattttattttctctctactacttggatgtatttaatgaccagtatattggcctacctaaaaggaaattatcattcaaccattctgatgagtaataggcctccaacattgaatttataaaattttgtgtaaacatagaacatttttaatgtatgctgaaatatactaatttatttccacaattcattccaggtataatttttgggagaattttagaatgcacaaagtttagtttgctttttatcctcatatgttggtctttgtactcattacacaatcacatggcccatacctgcaaaatatttagtcaatattttttagatcaaaattagatctttatttccacttcagtgaaattaagttttacaagtttaagatgtggaaaactttttttaaaatggtaatacatagaaatgaaatatattcaataatattatttctttccttgaatgtgtggttatagttactactacattgtcttgataattacttaatttatagtctaaaatgatgttagtcttttagggtgtatctgtattatcctcccttaagttccatagaaattttcataaagtagataatatagttggttagatatcagtaatactgtgtatttgccagtcagttcctcagagaagcacatcatgttccagtaacattagctcattaatcctcactactcctttgggagggctgtggtccatgatggtgtcagtcttatatgtcataaagagaaactgggaatctcagagtttaatgacctcacccagatgccatgggctgagtcatatggaaaaaaggccagaaatcttcagtctttttgactgctcctctcactcataagtcattttttattaccccaaagatacacaagattgattattaatgctctcttcttgtaagaatgggactgtactaagaaagcatctatggccaggtgctgtggctcatgcctgtaatcccagcactttgggaggccaaggcgggcagatcacaagatcaggagtttgagaccagcctggacaatatggtgaaactgcatctctactaaaaatataaaaattagccaggtgtggtggcacatacctgtaatccctgctacttgggaggctgaggcagaaaaatatcttgaacccgggaggtggaggttacagtgagttgagatcatgccactacgctccagcctgggtgacagagcgagactctgtctcaaaaaaaaaaaaaaaaaagcatttaaaattggtctttgaggagcaaacgacatgtcatttagtaattaattgactagaggaaggaagtagtcacaggatttggatctaggctgacagttacattcccaatatgtcccatggtgtctcctattatcttgatgtgtcagagatctaatcactactgacacagccagtgaagtttaagaacattcattcactgagtatggttctgtatggatcatcctgcggaaaggagttagactccaggtttttcccagtttcacaatcagatagtattgtgaatgaattaccagaccccctccagagatgtactagaaataattcctatctacatgataatggtcagagggacataatttgaaaaaaaaaaaaaaaaagctgatctttcccaaaagaattaacaatgaagatgagcagtaggaacagactggacatccctaatttttgtttatttgtttatgttttacatttaacattaaacatgattcaatttaaagtaacattacaatttaacttaatggtagaactaggctttttagttagcattaccttcagacattcacttctcatatattaagtcggtcatgactcactcatatattttgagtgttcgaacatcataatgttctacttgcaaaacaggacaaaagagtctactgcaaccttatcagttaaatacctgtatcaggataatttttgcttgagagtttccattgttcttaagcatatgtatgtgaatttttaactttgctcagcaaaataacacatttcaaacttaaaggacaccaaaagcaaaaccaaaagcccaaaaccccactaatgttgggaagcaggaacatctttaattacctggttatataatcgcatccaagatagttaactcctaatggatctaggttttattatttataatacaagtataataagaagacctactggctttaaaatgaaaataagtggaattaaatgaaatattgtataacataatgactatagtagataacaatgtattgtattcttgaaaattgttgagagactaggttttaagtgttctcatcataaaaaataagtatatgaagtaacatatattttgagtagctcaatttagccactccacaatgtatacatatttcaaaacatgttgtacataataagtagatacaatttttgtttctcaagaataaataaaaatgttcaacaattttttaaaaaatggaatcaaggcaggacggcagtctttctgttttctagattaatagttataaccttgcttgggtcatagatctctttgaaactatgttggacgtgcaagctctttttctagaaaattacacacaaaaagtcatactaacaatatcattggtttctcagatcctctaaaggatacacatgtaccccatctagagattcctacaccccacgttaagaacctcttttctaaagactccttcctcgtgggctccttcacgagaggcagagggaagggaaggctggtggcctcttcctgcttactctgccctggctccttttgttctttcttgaagagattatttgggaaatgtctgaggctcagtaggcattgccttcaagtcaaatacaaagcattcaggctgtttatttgggttcccaggtactaaaaaggccgctaatatagctaaaatatttttgtttaaagtgttatggtttattatttatttatttaaaatttgtcagagaactttattaaatttaactcctttctttggagcaaaatgtgtaaaatgaataatattatttgcacacacttattgtcagcagagactgaagaaaactatcattccagattgcagtacggcactacaagcccatggcctaattcactgggacaatgctaaagcccctggtgaatttatatccatttcacactctaaaatatcttggagcaaaactttccaatgaatccaagtattaacaaggtctgcagaaaatctcagaaagttttcattttgttttgattttttttttccctcagttagtttagtttattcaccttggaataggaatacacttaaaattattttgctgatatgtcactaccctttcaacttaattccaagcaatgcctctaataagtgttttagtaaattagattaagttgagaaggattacagattctgtaagaacactatgtatgacattgttgactcactcacatatccagagaaaattactgtttatataagtgaaccttaaatttaggattaaaatcgtattttaaacttattttatataactgattcatttcaatgcacaatcccattatctttgaaagctaaacaggcagtttaaaccacattattgtttttaaattaaagtgttgctcaattaaaaactaaagtggaaataaacaatttcccatactagaaattattcctccaggctgggtgctgtggcccatgcctataatcccagcactctgggaggccgaggcaggcggatcacctgaggttgggagttcaagaccagcctgaccaacatggagaaaccctgtctctactaaaaatacaaaattagccgggcgtggtggtgcatgcctgtaatcccagctactcaggaggctgaggaaagagaatcgcttgcacccgggagatggaggttgccgtgagccgagatcacaccactgcaatccagcctgggcagcaagagtgaaactccgtctcaagaaaaaaaaaaaaaaaaagaaacgaaaaaaaaagttattcctccaaatatttctatggagaaaaataaagtgggtaagggtgacattttttcttaaagaaaaataaagaatggtcaaggagctgggaaattataagaaagaggagctactgtttttttgtattaaaatatgaacattcatattctccaaaaatatttacatgatctctctcttcttatagaagaaaaatggagaaggatagaaccaggtgcaagaaagagttctcttcaaaaagccatgggagaatcccattcacaaccaaagaattcgtggccatattattttttatttcagcctgttctttgaaaatgaaaaggcggaatgtagtggaaagcataagcaaaaagctaaaacactttgtggaatttctttgtaacttccttcgtgtgtaaaaacttaagactttaccatgaggacataatccaggcatctgattgtaggcttctcgttacttggggagttaagggattaattttcatacttaagctcatatgatgacaaaactttttcacaactgtctctaaaccaagaagggggatttaagatctctcaacaaatgaccatttcattacattgttccttattccacttagggtggttcaccatcatctctgagtcaacacatctgtgatcagactaaatgagtcttgccttctgttttagcctttgaaatccatggagcagaatggaccaggcctagagtacagagtgacctggaagccacagggagccccagtggagtgggaagaagaaacagtc

SEQ ID NO: 10011 - DNA, 337 bp, Homo sapiens
ggctcggaagagacacatgtcacctttgctcactttttttttaaaccaaagaaaattccatggtggcatataacacagagtaggcaaagaagtgccatcctgctttattcctagaaacctgacatacttgatgaacagctctgacaaataccacaaattataaagtgatatgtacatccaaattatattttttccaaatgcttcattgatcaaatttgataaaatcattttatatggtgtatagcttcataatgtaatactaattggtacttaaaaaaatcttgatccaaaatttagaagatcataccatttgataagcattttactaatggatttg

SEQ ID NO: 10012 - DNA, 2488 bp, Homo sapiens
tggaaatatgtttgtcacaggtaaaattgtcacttgggtaaattttatctcaagcaactcctttttagttttaatactttctatgttgcccaaatcaagtcttatttccatgaatcactgttttatgtaataattttcttggtgaggtcaatttacatagttttggtactttcatgtcagatttctaaggtagtataatttagtttagaggaagaatttctacacagatcatgcaattgtctcttcattatatatcagggtaaaatctataaaaaacaaaattggtttgagaacaaagctgtcattacttgcaagatgaaaacagaaaaattgcatgtgtttattaaaacacagaagtatattcctgtgcaaattaatgcagattctgaagcgaaagacaggacttttgagagattttgagtccaagggttcacctcttcaaacacaactgaaaaaactctattttttctatttttaaatctaatcagtttatatatgcccaggtccagcaaaaagaagctgggttgataatgtgttttgcagttattcaagctagtttgaaagagtacctggcagtgattgtgaagaccaatgattgtgctactaaggtctctcaattgccagacacccaccaagtattttttaaatatgctattctgttttgaaactcaaaaccttgtatttttgttaatctagttacctgccaaatcaaacaggaatccaaagtttcataaccctgctgtgttctctggttactagaaataagcatatttttgatgttttaacaaccttttaaaataataatttctaataatgaaatagaatatttctattttaagtagctattgggtatatctttacataactagatgattatattaaatgggttttttagatgaatgatgtgcatgggtagatatttttaaaatgaaatatgttttttccttttttacttaaatttctttttagaacatactgttatgaacattaacatttattcaagtccttgggacaattcttcttcagttacccagtaaaattttcatgatctctgcaaaacatagattagaaatataaaataacataaattttagaatacagtgagatgacttacacaatttgataattttttatataatattttatgattaaccagttaactgaaacctaaaaacctgtattaactgattaatattgcagcaaaatgtcagttcatgttattgtatcaatcacttatggatacatgattatgctgttgtgatatgatttctaacaattgtcttgtcatttttagcttttactattataattttaattaaaatatattaaagtcactatgtcataacagactttatattgtgccatgcagtcctattgctcttttgtttcaaatatcatatagtctaaagcaatgattctcattaaatacatgcatcaaaatcaactgcagttattacatgctaactcaaacttacaaaatcaagctctctgtgatcctggttaatacatctaagtacttgagccgataatccaagtactttggggggtcgaggtgagaggatagcatgtggccagaagttcaagaccagcctgggcaacatagcgagactccatctccacaaaaaagtgttaaaaattagccagacatggtggtgcatgtcttagttctaactactcaggaggctgagaaaggaagattactttagcccaggagctcaaaggtgcagtgagctgtgactgcactccagcccgtctaaaaaaaaaaaaaaaaggaaagaaaagaaaaaaagaaataaaaaggtatacacattttttttctgaagtggatggaaatatgtcatgtcagaggtaaattgtgacttgagtaagttttatgttgagcaactctttttgtttacattttctatgttgcccaaataaagtcttattttcataaatcactgctttacataacaacttttcctgcagccctgggtatggtggcacacagttgtagtcccaggtacactggatgctgaggcaaaaggatcatttgaacccagaacttcaaggtcaacctgggcaacatagcaagatcctatctgtagcaaaaatttttttaatgataattctcatgcaaaattcagtttgcactgttttaaaaaatgaaacacttataagagcatggtcataaggcaattctgacttggtgtcaagccatttaaacttagatataacctaggatttaggatccttgctattgtttacatagtaagtccacatttaatatcagtagattattggaaactgcaactatcagcaaaatggtgaacaatgaaacaaattttaccataggccaattgatacaacaagatataagttcctactgcatatttctggtcacaatattatcactgtacttctaaatggagactaaaacacttataacattcaacactgaaataagtgtgaggtatacatacatttttaaaaagattgataaaaacaa

SEQ ID NO: 10013 - DNA, 2153 bp, Homo sapiens
tggaaatatgtttgtcacaggtaaaattgtcacttgggtaaattttatctcaagcaactcctttttagttttaatactttctatgttgcccaaatcaagtcttatttccatgaatcactgttttatgtaataattttcttggtggggtcaatttacatagttttggtactttcatgtcagattgctaaggtagtataatttagtttagaggaagaatttctacacagatcatgtaattgtctcttcatattgtatcagggtaaaatctataaaaaacaaaattggtttgagaacaaagctgtcattacttgcaagatgtaaacagaaaaattacatgtgtttattgaaacacagaagtatattcctgtgcaaattaactcagattctgaagtgaaagacaggacttttgagagattttgagtccaagggttcacctcttcaaacacaactgaaaaaattctaatttttttatttttaaatctaatcagtttatatatgcccaggtccagcaaaaaaagctgggttgatgatgtgttttgcagttattccagctagtttgaaagagtacctggcagtgattgtgaagaccagtgattatgctactaaggtctctcaattgccagatccccaccaagtattttttaaataagctgttgtgttttgaaactcaaaacctcgtatttttgttaatctagttacctgccaaaccaaacaggaatccaaggtttcataaccctgctgtgtcctctggttactagaaataagcaaatttttgatgttttaacaaccttttaaaataataatttctaataatgaaatagaatatttctattttaagtagctattgggtatatctttacataactagatgattatgttaaatgggttttttagatgaatgatgtgcatgggtagatatttttaaaatgaaatatgttttttccttttttacttaaatttctttttagaacatactgttatgaacattaacatttattcaagtccttgggacaattcttcttcagttacccagttaaaattttcatgatctctgcaaaacacagattagaaatataaaataacataaattttagaatacagtgagatgacttacacaacaatttgataatattttatataatattttatgattaaccagttaactgaaacctaaaaacatgtatcaactgattaatattgtagcaaaatgtcagttcatgttattgtatcaatcacttgtggatacatgattatgctgtcgtgatatgatttctaacaattgtcttgtcatttttagcttttaatattataattttaattagaatatatgaaagtcactatatcataacagactttatattgtgccatgcagtcctattgctcttttgtttcaaatatcatatagtctaaagcaatgattctcattaaatacatgcatcaaaatcaactgcagttattacatgctaactcaaacttacaaaatcaagctctctgagatcctggttaatatatctaagtacttgagccaataatccaagtactttggggggccgaggtgggaggatagcatgtggccagaagttcaagaccagcctgggcaacatagtgagactccatctccacaaaaaaatgttaaaaatcatccagacacggtggtgcatgacttaggtcgaactactcaggaggctgagaaaggaagattactttagcccaggagttcaaaggtgcagtgagctgtgactgcactctggcccgtctcaaaaaaaaaaaaaaaaaagggaagaaaagaaaaaaagaaataaaaaggtatacacattttttttttctgaagtggatggaaatatgtcatgtcagaggtaaattgtgacttgagtaagttttatgttgagcaactctttttgtttacattttctatgtggcccaaattaagtcttattttcataaatcactgctttacgtaacaacttttcctgcagccctgggtgtggtggcacacagttgtagtcccaggtacactggacgctgaggcaaaaggatcatttgaacccagaacttcaaggtcaacctgggcaacatagcaagatcctatctgtaacaaaaatttttttaatggtaattctcatgcaaaattcagtttgcacagttttaaaaaa

SEQ ID NO: 10014 - DNA, 337 bp, Homo sapiens
cacattcactcacattgggacacacagtggggaaatgccaattaaccagacatgcacatcttggggatgtgagaggaagcaggagttcctggagaaaacccatgcaggcatggggagaacatgcagaccctacacagatggtagccctgtccaggaatcaatatttattctcatctacattatagcaaaacaacattgaataaaacaactttatttgaggacctgttttacttgtacatctttgggaaaatctttcaacttttattactcataatgttctcaataaaagtgagttaagaatacatattcaggaggttttttgagacaatcaaatgtg

SEQ ID NO: 10015 - DNA, 446 bp, Homo sapiens
acattattagtaaggaacttaataatatcatgaagtatctttaaccaaagtaataattaaaaagtaggagtaaaccatagtaagttcaaatttagaatttgatagataatggagattactttttaggcctaaatattgaaggatagatgtttatgaaactttgaggttcaaattatttgtagaaatgtttatttaatattatattcaagatattaaaatgacaacaatgggaaaatgtataagagatttgttaaacacatcctgaaagcatggaaataaccatatatcttagcctaatgcatgaaatagtatagcaaatataagcaggatgttttcatttttattttaaaattgtgtttgtcactggatagggataataaatttattctatttattttttgctgttaaacatatactttaataaactaaacacatttgtttctgca

SEQ ID NO: 10016 - DNA, 333 bp, Homo sapiens
ataagagcatgctcatgaggcaattctgacatggtgtcaagccatttaaacttagatataacctaggatttaggatccttgctattgtttacatagtaagtccacatttaatgtcagtagattattggaaactgcaactataagcaaaacggtgaacaatgaaacaaatttcaccataggccaattgatacaacaagagttaagttcctactgcgtatttctggtcacaatattatcactgtacttctaaatgaagactaaaacacttataacattcaacattgaaataagtgtgaggtatatatacattttttaaaagagtaataaaaacaa

SEQ ID NO: 10017 - DNA, 447 bp, Homo sapiens
acattattagttaaggaacttaataatatcatgaagtatctttaaccaaagtaataattaaaaagtaggagtaaacaataataagttcaaatttagaatttgatagataatggagattactttttaggcctaaatattgaaggatagatgtttatgaaactttgaggttcaaattatttgtagaaatgtttatttaatattatactcaagatattaaaatgacaacaataggaaaatgtataagagatttgttaaacacatcctgaaagcatggaaataaccatatatcttagcctaatgcatgaaatagtatagcaaatataagcaggatgtttttatttttattttaaaattgtgtttatcactggatagggataataaatttattctatttattttttgctgttaaacatatactttaataaactaaacatatttgtttctgca

SEQ ID NO: 10018 - DNA, 6837 bp, Homo sapiens
cactgacaccatgccagcctcttcgtctcaaacatgctgcactgatcaccaggaccctgaaggtgctaccagctcctcttacttggccagctcccaagaggaagattcaggccagagtcttcccactgcccatgttcgcccttcccacccattgaagagcttcgccgtgccagcaatcccgcctccaggacctcccacctatgatcctgcattgccaagcacaccattactgtcccagcaaggtgagtgaggatggcagcacacctggagggagcacacctggagtgaccctttggctcaagcttgggacaaagccaccccttctttgaagtatagcaaagcaaatatcctccaagcctatcttagcaattctgttagcatagcagtgtgccattgccccgcccaggaagtttatggcctccccttttctgggaacacttacaaaccggagaataatttgctgggaaccaagggctgaccttttgaattgtgttttatgtgcagcacctttggtggtaagtccaatggcatgggaatggatagcagatctagtctgccccggacccctggaatcacctcacttcgtaaggtccctgcaaactagagaagggatcagggaggccaaggcttggactcatagggtggtgaaagcagaagtaacctcagaatagggaaaggaatcctgtgaagggaaagtcatttacccaaatccacacagctcagtaacagtcccctgacctcaaaggcatgcttgctttctgctcttccaaattgttacctattcatttgctttagaataagccagtggttttcaaaatttctggtctcagtatccctttatagcttaaaagctattgagcacctaaaagagcttttcttcatatgggttatatctatcaatatttaccatattaaaattaaaactaagaaatttttaaagtattttattcatttaaaaaagcaagtatctatcatgttaagataagtagcatatttttatgaaaaacaactattttcctttttttttttttatttgggatggagtctcgctctgtcacccaggctggagtacagtggggcaatctcggctcactgcaagctccgactcccgggttcacgccattctcctgccttagcctcccaagcagctgggactacaggtgcccaccaccatgcgcagctaattttttgtgtatttagtagagacggggtttcaccacattagccaggatggtcttgatctcctgacctcgtgatccgcccaccttggcctcccaaagtgctgggaatataggcgtgagccactgcgcccagccgaaaagcaactattttcaaacaaaaatataagtgagaagagtcgttttattttttgcagatctctttaatgtctggcttaatagaagacagctggattttcctatctgcttctgcattcaatctgttgcaatatggtgttttggttgaaatataagaagaaaatctggcctaacagatatgtaattggaaaagggaagagtatttttataaccttttcagataattgtggatattcttttttgatactacagcaaaactcagcaagttgtagttttttaaaggtttgtttgtaaagtgaaatctgaaaccttatctatgaaatattcatacttcattccattgaaattcattcatctgtcttgcatttaatgcatgatactaaaatatcacacatcggtcatttagaaaatattggtccactacattatgcaaattctgcaaatagtgatacatttcattatccagtatctaaaaacatattcattaatatcatcaaaatgtgtaagtattaagttctcaagaccatggtggcggatgcaagttttccaaaatcctgatttttacttaaaacttaaattttatcattggcaagaaacactatccattgtgttccttgaattgacaggctcactttgttcattttctaaaagatgtctcaagaaccagtttgtctgtctttgaactaacagtgatattccatgataaaaacattcaactcaaaactcaaaactatcacaagtacctttatttaagacagctgttggccaggcgcggtggctcacgcttgtaatcccagcacttcgggaggccgaggcgggtagatcacctgaggtcaggagttcaagaccagcctggccaccatggtgaaaccccgcctctactaaaaatacaaaaagttagccgggtgtggtagcagacacctgtaatcccagctactcgggaggctgaggctggagaatcacttgaacccgggaggtggaggttgcagtgagcagaggttgctccactgcactccagcctgggcaacaaggagagactccgtctcaaaaaaaaagacagctgtcatactttgcacacagctgaagtactttatgcatactttccattttgtcacatacagtaaggtcaagatttagtaaaataaaaaatatgtattcctttattaaggatggttcttagtgaaactggcttttttaaactgcacgtgcgtgtcagtgaatggctttacagtttggcaccactgccttaatttgtgctaaggctccagcagctcacccactattgcctttgtatcctcagtgcaaaggcaaacacagtggaaaggcaaataatgtcttactataaagagagctttggccttccagatatcctgcaagggtttgtggactaccacactttgagaaccactggactaggatattggttttctagagacagtggaatattttctctggcctcatgaatgccctgctatctccctccttccctcttattccagtaacttttcagagcagtatccctgcactgggtctgtatgtctctctcaccccgaagcagcacttggaccttagggccttcatgaggtctaggggaagcaggcttggccacatatctgatggtgccctttcccctcagctctgaaccatcacattcactcagtgaagacagcctccatcgggactctaggaaggagccggcctcctatgccagtggttgttcccagtgcccctgaagtgcaggagaccacaaggatgttggaagactccgagagtgtaagttcgtggggccatcagtccagccagattgcctgggaacatgccccagggcctgagactgctggtcaagctgataatctgtgcataccaggcccgccacccagaactatgaagcagatacactcattcattcagtagatacagtgttgagcatctcttctgagccgggaactgtgctgaggacttggtgtgctttctttcccatatccactcttttttttttttgagacagaatcttgctctgtctcccaggctggaatacagtggcatgatctcggctcactacaacgtctgcgtcctgggttcaagggattctcctgcctcagcctcctgagtagctggaactacaggcacccatcaccatgcctggctattgttttgtatttttaatagagatggggtttcactatgttggccaggctggtcttgaactccctacctcaggtgatccacctgcctcagcctcccaaagtgctgggataacaggcatgagccaccacgctcggcccccatatccactcttgaacatcttaaattagcttttcacactagcccagctaatggccccttcccccacttcctgcctgccttttagttctgtcccttctgtcattgttcttttcttggtttgaaccatccatacattccctcagttctactctgtgacctttcctgagcaagatgctggaggagaaagtgcctgagtggttgttctcgaaacaaaaatcaccagggtctttctttgatctttcactctcaaactccagtaaaaatgttttgcctctgaatttccaggtacaggattctctaagcggaaagcttggggcccagagatccagggacataccaactgtgctgactggggcagagacctagaaggggcaagcagtgggccttctggcctgtgaagtcattgtgaccctggggagtatgtgttgggagaaaggcattgtgcattatcaggaaacgggatcctagtgaccttgggtctatcctgctactttccactcttctgagccaccctgcgtgttagtagccagttttctggggccatttgactactgaccacatgaggctttggcctctctctgggctctcctttctgagctgctccctggatccagcccagtaacagtgttttcttttccatagagctatgaaccagatgagctgaccaaagagatggcccacctggaaggactaatgaaggacctaaacgctatcacaacagcatgacgaccttcaccaggacctgacttcaaacctgagtctggaagtcttggaacttacccttgaaaacaaggaattgtacagagtacgagaggacagcacttgagaacacagaatgagccagcagactggccagcgcctctgtgtagggctggctccaggcatggccacctgccttcccctggtcagcctggaagaagcctgtgtcgaggcagcttccctttgcctgctgatattctgcaggactgggcaccatgggccaaaattttgtgtccagggaagaggcgagaagtgcaacctgcatttcactttgtggtcaggccgtgtctttgtgctgtgactgcatcacctttatggagtgtagacattggcatttatgtacaattttatttgtgtcttattttattttaccttcaaaaacaaaaacgccatccaaaaccaaggaagtccttggtgttctccacaagtggttgacatttgactgcttgttccaattatgtatggaaagtctttgacagtgtgggtcgttcctggggttggcttgttttttggtttcatttttattttttaattctgagtcattgcatcctctaccagctgttaatccatcactctgagggggaggaaatgttgcattgctgtttgtaagctttttttattatttttttattataattattaaaggcctgactctttcctctcatcactgtgagattacagatctatttgaattgaatgaaatgtaacattgaaaagacttgtttgttgctttctgtgcagtttcagtattggggcgggtggggggctgggggttggtaataggaaatggaggggctgctgaggtcctgtgaatgtttctgtcattgtactttcttccagaagcctgcagagaatggaagcatcttctttattgtcctttcctggcatgtccatccttattgtcactacgttgcaactggagtttgatttggatctggttttaaaattcttctgtgcaatagatgggtttgaggatttagcggccctgatgtcttggtcatagcctggtaagaatgtccatgctgaggagccagatgttgtatttctaactgcctgagtcacacagaatagggtaagagcctgaccccattctgtaaatcagaaagcaaggatggagaccctttcctgctgctattattggctctctttgaggaagttggaggttaaggaaggaacttgtttgtttccgtatacgactccttcttctctctagttcagtcttcagccagtccagcgctctcttccacacttcagagccccttcagagaaagcattagcaggaatgagacaaggcagagctgcagtgccccctgaggcttccacacatctttctgaatattatttttcaagtaacaagggcagggacagcggaaacagctgcccaccccccccatcccagcagctcagctaagccctgatgagaatgaagccacaggagttgtctgaggtgaacccagccgctcagccacacatggaagccattgcctttgcacatagttcttgggttctttttcctaaaaaggtaaggagctgaggtgtgtggttttttaatattaagaatatataatggaaaacacacgactgacgctcaggcatcttcccctactccccaacagatccccagaagacagcgtggaaggcagtgtagacagtaaatcgggcttcagttctatagccaagaagagatcagctgctgaaaccaccagtgggtaccccaggccacctgcctttgaacttggggatttgccatgtttgatcttgtcacatacttgcttttttacaagatgaactctttgtatttatgatttggggggcaatgaaaggtgcaatgcaggaactgctgctgccgagctcgctggtcacatgggggtgccaggcgggattctggaaaaccagtgcacttaaactgatcctgaagagagctgtcccagcactctggccaccaggagggccagattccccagaaactaccttttgcccaaagaacatgctcagtatttggggcatttcctcccacaaaccctgactgcttctgttacctcagggccttggtacctggatactgccacagaattggggcgggtgggggaggggcctatttttaaataaaataactgttcaaagttgggggttttttaaaaaattaagaaaaaggaaagctattctgtattgcaccttttcacaatttaatacattttcttacattttcctgtgattttcgaaactaaaccattgtgtgtcctgtagtgtcctggttgagctgccgctcagcagcttcctcggggggatttggaacacctgtgtctgtcgccgcactgcctgtgggaggggcccagagggctgctgggactggcgtctgtacacacttgtttggccttttctgtagttgatgctgtaaactctatggctttttaaaaacgatttcatgtttttatttagtattggaaatccaatacacttttttaatccaatcaaa

SEQ ID NO: 10019 - DNA, 6836 bp, Homo sapiens
cactgacaccatgccagcctcttcgtctcaaacatgctgcactgatcaccaggaccctgaaggtgctaccagctcctcttacttggccagctcccaagaggaagattcaggccagagtcttcccactgcccatgttcgcccttcccacccattgaagagcttcgccgtgccagcaatcccgcctccaggacctcccacctatgatcctgcattgccaagcacaccattactgtcccagcaaggtgagtgaggatggcagcacacctggagggagcacacctggagtgaccctttggctcaagcttgggacaaagccaccccttctttgaagtatagcaaagcaaatatcctccaagcctatcttagcaattctgttagcgtagcagtgtgccattgccccgcccaggaagtttatggcctccccttttctgggaacacttacaaaccggagaataatttgctgggaaccaagggctgaccttttgaattgtgttttatgtgcagcacctttggtggtaagtccaatggcatgggaatggatagcagatctagtctgcccagacccctggaatcacctcacttcgtaaggtccctgcaaactagagaagggatcagggaggccaaggcttggactcatagggtggtgaaagcagaagtaacctcagaatagggaaaggaatcctgtgaagggaaagtcatttacccaaatccacacagctcagtaacagtcccctgacctcaaaggcatgcttgctttctgctcttccaaattgttacctattcatttgctttagaataagccagtggttttcaaaatttctggtctcagtatccctttatagcttaaaagctattgagcacctaaaagagcttttcttcatatgggttatatctatcaatatttaccatattaaaattaaaactaagaaatttttaaagtattttattcatttaaaaaagcaagtctctatcatgttaagataagtagcatatttttatgaaaaacaactattttcctttttttttttttatttgggatggagtctcgctctgtcacccaggctggagtacagtggggcaatctcggctcactgcaagctccgactcccgggttcacgccattctcctgccttagcctcccaagcagctgggactacaggtgcccaccaccatgcgcagctaattttttgtgtatttagtagagacggggtttcaccacattagccaggatggtcttgatctcctgacctcgtgatccgcccacctcggcctcccaaagtgctgggaatataggcgtgagccactgcgcccagccgaaaagcaactattttcaaaacaaaaatatagtgagaagagtcgttttattttttgcagatctctttaatgtctggcttaatagaagacagctggattttcctatctgcttctgcattcaatctgttgcaatatggtgttttggttgaaatataagaagaaaatctggcctaacagatatgtaattggaaaagggaagagtatttttataaccttttcagataattgtggatattcttttttgatactacagcaaaactcagcaagttgtagttttttaaaggtttgtttgtaaagtgaaatctgaaaccttatctatgaaatattcatacttcattccattgaaattcattcatctgtcttgcatttaatgcatgatactaaaatatcacacatcggtcatttagaaaatattggtccactacattatgcaaattctgcaaatagtgatacatttcattatccagtatctaaaaacatattcattaatatcatcaaaatgtgtaagtattaagttctcaagaccatggtggcggatgcaagttttccaaaatcctgatttttacttaaaacttaaattttatcattggcaagaaacactatccattgtgttccttgaattgacaggctcactttgttcattttctaaaagatgtctcaagaaccagtttgtctgtctttgaactaacagtgatattccatgataaaaacattcaactcaaaactcaaaactatcacaagtacctttatttaagacagctgttggccgggcgcggtggctcacgcttgtaatcccagcacttcgggaggccgaggcgggtagatcacctgaggtcaggagttcaagaccagcctggccaccatggtgaaaccccgcctctactaaaaatacaaaaagttagccgggtgtggtagcagacacctgtaatcccagctactcgggaggctgaggctggagaatcacttgaacccgggaggtggaggttgcagtgagcagaggttgctccactgcactccagcctgggcaacaaggagagactccgtctcaaaaaaaaagacagctgtcatactttgcacacagctgaagtactttatgcatactttccattttgtcacatacagtaaggtcaagatttagtaaaataaaaaatatgtattcctttattaaggatggttcttagtgaaactggcttttttaaactgcacgtgcgtgtcagtgaatggctttacagtttggcaccactgccttaatttgtgctaaggctccagcagctcacccactattgcctttgtatcctcagtgcaaaggcaaacacagtggaaaggcaaataatgtcttactataaagagagctttggccttccagatatcctgcaagggtttgtggactaccacactttgagaaccactggactaggatattggttttctagagacagtggaatattttctctggcctcatgaatgccctgctatctccctccttccctcttattccagtaacttttcagagcagtatccctgcactgggtctgtatgtctctctcaccccgaagcagcacttggaccttagggccttcatgaggtctaggggaggcaggcttggccacatatctgatggtgccctttcccctcagctctgaaccatcacattcactcagtgaagacagcctccatcgggactctaggaaggagccggcctcctatgccagtggttgttcccagtgcccctgaagtgcaggagaccacaaggatgttggaagactccgagagtgtaagttcgtggggccatcagtccagccagattgcctgggaacatgccccagggcctgagactgctggtcaagctgataatctgtgcataccaggcccgccacccagaactatgaagcagatacactcattcattcagtagatacagtgttgagcatctcttctgagccgggaactgtgctgaggacttggtgtgctttctttcccatatccactcttttttttttttgagacagaatcttgctctgtctcccaggctggaatacagtggcatgatctcggctcactacaacgtctgcgtcctgggttcaagggattctcctgcctcagcctcctgagtagctggaactacaggcacccatcaccatgcctggctattgttttgtatttttaatagagatggggtttcactatgttggccaggctggtcttgaactccctacctcaggtgatccacctgcctcagcctcccaaagtgctgggataacaggcgtgagccaccacgctcggcccccatatccactcttgaacatcttaaattagcttttcacactagcccagctaatggccccttcccccacatcctgcctgccttttagttctgtcccttctgtcattgttcttttcttggtttgaaccatccatacattccctcagttctactctgtgacctttcctgagcaagatgctggaggagaaagtgcctgagtggttgttctcgaaacaaaaatcaccagggtctttctttgatctttcactctcaaactccagtaaaaatgttttgcctctgaatttccaggtacaggattctctaagcggaaagcttggggcccagagatccagggacataccaactgtgctgactggggcagagacctagaaggggcaagcagtgggccttctggcctgtgaagtcattgtgaccctggggagtatgtgttgggagaaaggcattgtgcattatcaggaaacgggatcctagtgaccttgggtctatcctgctactttccactcttctgagccaccctgcgtgttagtagccagttttctggggccatttgactactgaccacatgaggctttggcctctctctgggctctcctttctgagctgctccctggatccagcccagtaacagtgttttcttttccatagagctatgaaccagatgagctgaccaaagagatggcccacctggaaggactaatgaaggacctaaacgctatcacaacagcatgacgaccttcaccaggacctgacttcaaacctgagtctggaagtcttggaacttacccttgaaaacaaggaattgtacagagtacgagaggacagcacttgagaacacagaatgagccagcagactggccagcgcctctgtgtagggctggctccaggcatggccacctgccttcccctggtcagcctggaagaagcctgtgtcgaggcagcttccctttgcctgctgatattctgcaggactgggcaccatgggccaaaattttgtgtccagggaagaggcgagaagtgcaacctgcatttcactttgtggtcaggccgtgtctttgtgctgtgactgcatcacctttatggagtgtagacattggcatttatgtacaattttatttgtgtcttattttattttaccttcaaaaacaaaaacgccatccaaaaccaaggaagtccttggtgttctccacaagtggttgacatttgactgcttgttccaattatgtatggaaagtctttgacagtgtgggtcgttcctggggttggcttgttttttggtttcatttttattttttaattctgagtcattgcatcctctaccagctgttaatccatcactctgagggggaggaaatgttgcattgctgtttgtaagctttttttattatttttttattataattattaaaggcctgactctttcctctcatcactgtgagattacagatctatttgaattgaatgaaatgtaacattgaaaagacttgtttgttgctttctgtgcagtttcagtattggggcgggtggggggctgggggttggtaataggaaatggaggggctgctgaggtcctgtgaatgtttctgtcattgtactttcttccagaagcctgcagagaatggaagcatcttctttattgtcctttcctggcatgtccatccttattgtcactacgttgcaactggagtttgatttggatctggttttaaaattcttctgtgcaatagatgggtttgaggatttagcggccctgatgtcttggtcatagcctggtaagaatgtccatgctgaggagccagatgttgtatttctaactgcctgagtcacacagaatagggtaagagcctgaccccattctgtaaatcagaaagcaaggatggagaccctttcctgctgctattattggctctctttgaggaagttggaggttaaggaaggaacttgtttgtttccgtatacgactccttcttctgtctagttcagtcttcagccagtccagcgctctcttccacacttcagagccccttcagagaaagcattatcaggaatgatacaaggcacagctgcactgccccctgaggcttccacacatctttctgaatattatttgtaaagtcacactggcctggacagcagaaacagctgcccaccccccccatcccagcagctcagctaagccctgatgagaatgaagccacaggagttgtctgaggtgaacccagccgctcagccacacatggaagccattgcctttgcacatagttcttgggttctttttcctaaaaaggtaaggagctgaggtgtgtggttttttaatattaagaatatataatggaaaacacacgactgacgctcaggcatcttcccctactccccaacagatccccagaagacagcgtggaaggcagtgtagacagtaaatcgggcttcagttctatagccaagaagagatcagctgctgaaaccaccagtgggtaccccaggccacctgcctttgaacttggggatttgccatgtttgatcttgtcacatacttgcttttttacaagatgaactctttgtatttatgatttggggggcaatgaaaggtgcaatgcaggaactgctgctgccgagctcgctggtcacatgggggtgccaggcgggattctggaaaaccagtgcacttaaactgatcctgaagagagctgtcccagcactctggccaccaggagggccagattccccagaaactaccttttgcccaaagaacatgctcagtatttggggcatttcctcccacaaaccctgactgcttctgttacctcagggccttggtacctggatactgccacagaattggggcgggtgggggaggggcctatttttaaataaaataactgttcaaagttgggggttttttaaaaaattaagaaaaaggaaagctattctgtattgcaccttttcacaatttaatacattttcttacattttcctgtgattttcgaaactaaaccattgtgtgtcctgtagtgtcctggttgagctgccgctcagcagcttcctcggggggatttggaacacctgtgtctgtcgccgcactgcctgtgggaggggcccagagggctgctgggactggcgtctgtacacacttgtttggccttttctgtagttgatgctgtaaactctatggctttttaaaaacgatttcatgtttttatttagtattggaaatccaatacacttttttaatccaatcaaa

SEQ ID NO: 10020 - DNA, 10445 bp, Homo sapiens
atttgctgtccaaacaggatgctgtggaagctgcactttttttttccccagggagtgggggctggcccttactgctttataagcaccagctcaagaaggaacctacagcctcttggaaaggaatctcactaggggcttgactgcgtgggtctgtagcgctttcactgtaagaaagcaagatgcattttagaaactttaactacagttttagctccctgattgcctgtgtggcaaacagtgatatcttcagcgaaagtgaaaccagggtaaggcttctaatataacgtgattttctttagttttcaaagcattatgctaactgggactattaactgaatacttgggagaatgtggctctcttgtgggtttgggggttttgaaagaaatccaaagtctttcgagccttgaaaatcaaaagctgttgcctgaggaattaactgaggaaggaatttctaaagatctcaatatttgacaacatccaggcccctgaaccaactcactaggaaggcgagagttggggcatcgtgtgtttttcattctgtgtatgttgtaagtgaacttttcagaaagaggcctcttctgacagtgaatagtgttttacttttgtagccagcgttgtgaataatttcatttcgtcttaggaaataaatgttataaagatatttgtatgtttgtagtaattatgagggcctggcctcaagctcccagatttctctaacaagagaaaatgccgccagagcaaataataaaactggagaaattaagtgtgagatcagtgtgcctcctgggcagcagctctctttgatggtgattaatataatcattttaatcactacacttttcttcttcatttgattaaaatgtaagttttttcatcagcagctatccggctaattgagctttaataatactgtataggaatgaatcctgtatgctctatttgaggggtggtatttgtgcctggtggtgttatatgctttatatccaaagccatattgggacatgcgaaggtttctttttttaaaaaaaatcaaatgtaactccataattgtatataatgcttatgggctcgcaccatagtgtttggactagattgcagagcacattctatgtttttaaagtactacaaagtgagttcacttaacatgagccttatgtgagtaaaatcactattttttaaatgaagtagagatgccatccaaaagctataataactaggtatcagttattagaacaaataagattcttttataagagaaaggcatcatagtaatctagattttaaagataatgtgaattctcttttgttctggtcctaagccctgaacctgtattctaaaaatattcttcaaagtcatctctcccaaattctgaatcataacttcaaaactaaacagtgggtcacagtgcctattgatgaggtcatacaaaattccaaatgtacgaagacacacttttgccagaaacttgcccgtgctcaagagaggtggggaaaaagagtgagaggcggccagatgaactctaccgtccgccagctccgcgttccttcgcacgtgcctctgcgggatccctcgtgggaaagtctcagaaatgtccctaaactgaagaaaagccggggaatgcaaggagagcaaggtcgtaggttgttccgactgctccttaacgacctgcctggcagggaccgactaccctgctcctacccgcagccccatgtggagcaggcatccaccagtgcctccccgcgcttgctagcagtgaacattcctgaagacactctcctctcttatcctgaatcctcgctcccactgcagagacactgcgccttccataggttctccaaggtcctcagtgagctctgtccgcgctgcctaccatccacaccctgcgccatccccttcttcctggccagccccttctgcctttcacacgggctcccacaaactgtcctaagtgtttttgcctggtaaaaagattcacaaaacccggcgactagaagcccatgcagtcttccttggagctttgactgtccaccagttaaactccctctctgaggagttgcagtggcccccagctgcccccaccgacagccacactccaggacccagcctagggggctgtcccctgagcaacctaagcttgtaatcccccacctcgagctttgcattctaagagctcaggacatctcctaattctcactagccctatggcaccagagcgaggtgtgcacagacacgaaagccaggatgcagaaaatggtccatttgcagaacattaatttttaaaccagtatcattttagagagttaaaaagtaacagactgagataaaagcgatcgtggaaatttttaaaaactacttattttaagaaatgcaaaactttctaccaactttgttatttttcaagtcagtatttctttttttcaaattagctgcagttcttttaagccttaaagaaatctttgatatatgcaacactgccctgagctgaacggtggggttggagttggctagccggggaaggctataggacagagaaaaaagggggggtgagtgggggaaggccataggacagagaaacatggggagcaaattaccaaactgtacctccctggaaaatgctcattctactttttaaaaaagtttgttaccgtaagtagtgtctatgtattggcaactgttctgctgattcgatgaatgtaataaatcataccttcttaccttcttgtaaaatcacctgcattgggactaaaggccatagtcccctaagaggggaaaggcttttctctaagaaagaagttaggagttcttgaaaggattgatgatccacttcctcagtaaaaaatgtattgaggaggccaggcacggtggctcatgcctgtaatcccagcactttgggaggccgagggatcacctgaggacaggagcttgagaccagccttgccaacatggcaaagccccgtctctactaaaaatacaaaaattagccaggtgtgctggcaggcacctgtaaccccagctactcgggaggctgaggcaggagaatcacttgaacctgggaggtggaggttgcagtgagccaaaactgcaccactgcactccagcctgggtgacagagcaagactctgtctcgaagaaaaaaaaaaaagtaatgacatcatctagtcaagggtcatatgcaggtaaatttcaactccttttatttttattgttatttttcaggccaaatttgagtccctctttaggacgtatgacaaggacatcacctttcagtattttaagagcttcaaacgagtcagaataaacttcagcaaccccttctccgcagcagatgccaggctccagctgcataagactgagtttctgggaaaggaaatgaagttatattttgctcaggtgagttgggttcattgctatgcatgcttctccctcctccctccctcccttttgtaaagcagcttatacgttgcttatgttatatgctgaccggaaactctgagacttcaccttgagaaagacaaaattcctactctgaatgttcagcgtctcacttgttttaagaagatatcaaggtgcatttgaaagcaacctcagacattgcccctgaccttcctgggttgataatgatgggggaaagaaagccttccctgttcactggggagcttgcagggtgcagcggggtaggcgtggctatgcaaacaccctaaggtttgcgcagcaggtttccatgaatttgctcaagggttggagctcatgacccactctagactgagcagaccagagtggttccctgctcatgtggtgctgggggtactcagcagagaaacaggagtctgcagaagatgcctgcaaatcagcccaggactgccaggtctggcttgaaaggaaaataggggataaccagactgggcgcagatgctaagaaaccctctggttggcagggttcccagccccagggcacccacggcagggagaggggtagctggggttgggcttgccttttctcctgcccactaccattttgaccctcctctggggaacttaggacaggtgacccaccttcaaggcagctcccagagttccatttgatgtccttaggggctgacagattgtcagggaagaagagaggagcttctagaatgcagccagctcctcagtaaagcaagtccccctcaggctctgagcacccccccaacccgcccccaccacacacacacatacacacataccttgctgggatgggagaggaccctgtccaaaggcctcccccagtgggaggaagctcatctgacaccacgccagagagccaaagtgtcttttcttcctcaaagtgaggacagcgaacttgctgggcccttcaagtataaataaagcatttgggatccccgccccacccctgacctttttgccctgggaggcacaggctgagctttgaccttgggtgcctaggccttcctgtgtgagtacactcctttctgcacgggataagattttatgcaaataattacttagtactcctctgaccttttctgtttgtaaaacaatgcatattcattgtgaaaacttggggagggcaatctggaagtgcagagaaaacctacaccgcgcagcttgagatgtaagagctctatggacagccctctcatcactggtcagcatttctaaaaccaaactaggatcgtaggttattgttccttattcttatttcttaaagtctcctgggaagtggcttttttttttttttctggcatctgatccagagtcccggagagggaggtgcagagctgctgctgggtggggaaccctaggggcaggtggagccctggctccctgtccctgagaagctgtgtcctctcagaactgtggcctaggctttggactttcagagcttgcctctgtggtatgaggagcggggagagactgattccaagagccctcctgacctcaatgacagtgacttaaatttccatatatactaaagtcacctctgctgattttctgtccatctaggtcaagcgtaattatttgcagtccctgtgcctgtgactcccatagccctgggagggggctgtcatcctatctgtgccacaaccagagttcatatgtccttttgccctccccattacagaccatcttacaattggtcctggaatcacacctgtcctgacgcctggacattgacctgcccatctcccggaactggcgttaggtgctgttgcctcactgcagttcttccctggcaacaactgacctgtgcttattttctctcctcagaccttacacataggaagctcacacctggctccgccaaatccagacaagcagtttctgatctcccctcccgcctctccgccagtgggatggaaacaagtggaagatgcgaccccagtcataaactatgatctcttatatgccatctccaagctggggccaggtgagcagggccctcgggtgggagggaggcagggggagacacagctgctgccctgcaccagggagcagtaccaccactacccccgtagctctcctgagcccatgccggcatgttttgtgagcttctctgtattcttctgcgccaccgtcccttgtgctgggagcatgcctgcctcttggcaccacctgcagtgttagagagactgcggctgatcgtggggaccctgcatcacgcccctccaccccccgcagtgtcccaggaatccattcctgtgtccactgagcacagcctgcgtgggaggcctgagccccggccccaggttctgtcgctccggatagggatgagtgattggactttggaaagggaaaatcgatgccccctttaagaaatgttatttttaatcaaaataaattctccctttcctgtgattctcacctggccttcttaaaggaaaagggaaggagaaccataggccatggtgagggaagggccgcggtcgggctgccctaccccagggcctgtgggctggtcccctacagagcttgctaaagaaagaggaagttcccgtcctctggagggacaaaagtgtgagcactgcggggagggggtaggttcctcaggctctttgtccaaaatgtgggccttaactggtggaattgtgagcagtagatgagatcatcgagtgaaaggcacttccatcagcacctggctcacagtcagtgttcaatgcaggatttttgaaaaccataaaatgttggtggttcctgtcctgtcctctagggtttgggtgaggaggcaggtgtgagggagagtcttggggtgaagaggtttgagccttctcctgctctgtccgtggagcaagtcaaataaatgctgagaccgtcagctcctcatttctccttgaccagcaatctgatgttcccttgggttgagggttttgttttcttggtccatcagcagtttcatattgaaaagattacatttctgaaaacattgtccaaacggaaattccctctgtgggataaagcaagactcacattacttactgctaattgtggcgtgaaggtcaagatcagaaatggccattttgaggaagcgtgtgctccccccacagcagctcctggcccgggggcatgagcatggctgagggtgtggagtcttcccctaggttaggaatgggagaaaacagggtctccacttgcaaagaggtgtccacagttccagaggcaaatgctgttaataaaaattctgcatactccagaatataccacttccttcaccgagggcttattggagaaggctttttaggaaatagacgtaataaaatcagtttgtccttggttcacttaacagtgagcttgagtgagatttcatatttcacctgtgcttttcaaccaacaggattgcggagattttgcaaattatggtcctaaaccctgagctttctggattttcgatgattagtaggtagataagagacttgcaaagaggtagatttgtaagaggctcttaaccagcattttcagcaatccatctgacctcccatgcctgaattctctctctcagagagctgagctcctttgcctttttcagtgcagttataataacattccagtcccacatgtgatagagaaaagatcaccaccttccttatcagtaaaagtaccttccaggtttagaggagtaaccagtgtggctggaggtaggaagctctcctgggccgctcttgtcgggcggaaatcacacagtggttggtgcggtgcctcctcgcttacccgaactgcaaagaaatcccaagcacaggccgggcgcggtggctcatgcctgtaatcccagcactttggaaggctgaggcaggcggatcacgaggtcaggagatcaagaccatcctggccaacatggtgaaacctcgtctctactaaaaatacaaaaattagctgagtatgatggcatgcgcctgtagtcccagctacttgggaggctgaggcaggagaatcacttgaacctgggaggcggaggttgcactgagccgagatcttgtcactgcattccagcctgggcaacaggcaagactctgtctcaaaaaaaaaaaaaaaaaaaagaaagaaagaaagaaaaagaaaaaagaaaagaaaagaaatcccaagcacaaagccctggaagaaaactgaccatgaggccacaccctgtgggtggagcaggttgaagcaaacctcctgcccctatttcagatccctgcccagcagggcaccaataacgatgcagtctccattcttaaacatctttctaggtgacatgggctggacaagcatgtggtgagccgggttctcattgcctcgggcactcactcatgctgttagctccatgaagtcaatacctttaccgtctcctttactgaggagggaactgaggtgcacagggaagcagaataaagtgcccatgagccctgggtactaaggagccaggctcagagctgccttcatgagcaccagagatgcacactcttcccgtggccagagcggcaccccagcgggaggccccagtcccttcattctacattgccgggtttttcagttgcagaaagctctccccacccttgctggaccagagtggcctgaacttggccaacctggtagaactcaggctgacatagaacagcaggacactcctggtcccggggattagaagttgttctaaggaaaagatgcccaggtcaaaaacgtttccagagcacctggctccgtgcagccacccctgcgtctgctgcagggcctcctgtggcgcccttcctgggcgtgcactgcgaccctcaaataggagctgcatgagggaggcccagggttctgtttccaaatacgtttcttcatccatctttttcctgaaccgaagtttctcacattcacacttgaggaaatgctgacagaaagggagttctctgggtagtttagatatctggtggacatgtgaagtataactagaaaaatgcattccttctatacttctcatgtgcctggactcccagaatgtttgactaaaaacagagtcatgcacaatggaaatctctctttttctgaatgagctagcaaagaaatacaaacccaaaatatgtctggctgtgtctctcagcccaatcgaatggtcacgagcagctggcccagcagagccctgaatgctcttttatgtttgccttttgactcccaaggacttgtctgagtgaccctgcgattattttccctccttaggggaaaagtatgaattgcacgcagcgactgacaccactcccagcgtggtggtccatgtatgtgagagtgatcaagagaaggaggaagaagaggaaatggaaagaatgaggagacctaagccaaaaattatccagaccaggaggccggagtacacgccgatccacctcagctgaactggcacgcgacgaggacgcattccaaatcatactcacgggaggaatcttttactgtggaggtggctggtcacgacttcttcggaggtggcagccgagatcggggtggcagaaatcccagttcatgttgctcagaagagaatcaaggccgtgtccccttgttctaatgctgcacaccagttactgttcatggcacccgggaatgacttgggccaatcactgagtttgtggtgatcgcacaaggacatttgggactgtcttgagaaaacagataatgatagtgttttgtacttgttcttttctggtaggttctgtctgtgccaagggcaggttgatcagtgagctcaggagagagcttcctgtttctaagtggcctgcaggggccactctctactggtaggaagaggtaccacaggaagccgcctagtgcagagaggttgtgaaaacagcagcaatgcaatgtggaaattgtagcgtttcctttcttccctcatgttctcatgtttgtgcatgtatattactgatttacaagactaacctttgttcgtatataaagttacaccgttgttgttttacatcttttgggaagccaggaaagcgtttggaaaacgtatcacctttcccagattctcggattctcgactctttgcaacagcacttgcttgcggaactcttcctggaatgcattcactcagcatccccaaccgtgcaacgtgtaacttgtgcttttgcaaaagaagttgatctgaaattcctctgtagaatttagcttatacaattcagagaatagcagtttcactgccaacttttagtgggtgagaaattttagtttaggtgtttgggatcggacctcagtttctgttgtttcttttatgtggtggtttctatacatgaatcatagccaaaaacttttttggaaactgttggttgagatagttggttcttttaccccacgaagacatcaagatacacttgtaaataaagctgatagcatatattcatacctgttgtacacttgggtgaaaagtatggcagtgggagactaagatgtattaacctacctgtgaatcatatgttgtaggaaaagctgttcccatgtctaacaggacttgaattcaaagcatgtcaagtggatagtagatctgtggcgatatgagagggatgcagtgcctttccccattcattcctgatggaattgttatactaggttaacatttgtaatttttttctagttgtaatgtgtatgtctggtaaataggtattatattttggccttacaataccgtaacaatgtttgtcattttgaaatacttaatgccaagtaacaatgcatgctttggaaatttggaagatggttttattctttgagaagcaaatatgtttgcattaaatgctttgattgttcatatcaagaaattgattgaacgttctcaaaccctgtttacggtacttggtaagagggagccggtttgggagagaccattgcatcgctgtccaagtgtttcttgttaagtgcttttaaactggagaggctaacctcaaaatattttttttaactgcattctataataaatgggcacagtatgctccttacagaaaa

SEQ ID NO: 10021 - DNA, 10503 bp, Homo sapiens
aggacttgactcaggaatttgctgtccaaacaggatgctgtggaagctgcactttttttttccccagggagtgggggctggcccttactgctttataagcaccagctcaagaaggaacctacagcctcttggaaaggaatctcactaggggcttgactgcgtgggtctgtagcgctttcactgtaagaaagcaagatgcattttagaaactttaactacagttttagctccctgattgcctgtgtggcaaacagtgatatcttcagcgaaagtgaaaccagggtaaggcttctaatataacgtgattttctttagttttcaaagcattatgctaactgggactattaactgaatacttgggagaatgtggctctcttgtgggtttgggggttttgaaagaaatccaaagtctttcgagccttgaaaatcaaaagctgttgcctgaggaattaactgaggaaggaatttctaaagatctcaatatttgacaacatccaggcccctgaaccaactcactaggaaggcgagagttggggcatcgtgtgtttttcattctgtgtatgttgtaagtgaacttttcagaaagaggcctcttctgacagtgaatagtgttttacttttgtagccagcgttgtgaataatttcatttcgtcttaggaaataaatgttataaagatatttgtatgtttgtagtaattatgagggcctggcctcaagctcccagatttctctaacaagagaaaatgccgccagagcaaataataaaactggagaaattaagtgtgagatcagtgtgcctcctgggcagcagctctctttgatggtgattaatataatcattttaatcactacacttttcttcttcatttgattaaaatgtaagttttttcatcagcagctatccggctaattgagctttaataatactgtataggaatgaatcctgtatgctctatttgaggggtggtatttgtgcctggtggtgttatatgctttatatccaaagccatattgggacatgcgaaggtttctttttttaaaaaaaatcaaatgtaactccataattgtatataatgcttatgggctcgcaccatagtgtttggactagattgcagagcacattctatgtttttaaagtactacaaagtgagttcacttaacatgagccttatgtgagtaaaatcactattttttaaatgaagtagagatgccatccaaaagctataataactaggtatcagttattagaacaaataagattcttttataagagaaaggcatcatagtaatctagattttaaagataatgtgaattctcttttgttctggtcctaagccctgaacctgtattctaaaaatattcttcaaagtcatctctcccaaattctgaatcataacttcaaaactaaacagtgggtcacagtgcctattgatgaggtcatacaaaattccaaatgtacgaagacacacttttgccagaaacttgcccgtgctcaagagaggtggggaaaaagagtgagaggcggccagatgaactctaccgtccgccagctccgcgttccttcgcacgtgcctctgcgggatccctcgtgggaaagtctcagaaatgtccctaaactgaagaaaagccggggaatgcaaggagagcaaggtcgtaggttgttccgactgctccttaacgacctgcctggcagggaccgactaccctgctcctacccgcagccccatgtggagcaggcatccaccagtgcctccccgcgcttgctagcagtgaacattcctgaagacactctcctctcttatcctgaatcctcgctcccactgcagagacactgcgccttccataggttctccaaggtcctcagtgagctctgtccgcgctgcctaccatccacaccctgcgccatccccttcttcctggccagccccttctgcctttcacacgggctcccacaaactgtcctaagtgtttttgcctggtaaaaagattcacaaaacccggcgactagaagcccatgcagtcttccttggagctttgactgtccaccagttaaactccctctctgaggagttgcagtggcccccagctgcccccaccgacagccacactccaggacccagcctagggggctgtcccctgagcaacctaagcttgtaatcccccacctcgagctttgcattctaagagctcaggacatctcctaattctcactagccctatggcaccagagcgaggtgtgcacagacacgaaagccaggatgcagaaaatggtccatttgcagaacattaatttttaaaccagtatcattttagagagttaaaaagtaacagactgagataaaagcgatcgtggaaatttttaaaaactacttattttaagaaatgcaaaactttctaccaactttgttatttttcaagtcagtatttctttttttcaaattagctgcagttcttttaagccttaaagaaatctttgatatatgcaacactgccctgagctgaacggtggggttggagttggctagccggggaaggctataggacagagaaaaaagggggggtgagtgggggaaggccataggacagagaaacatggggagcaaattaccaaactgtacctccctggaaaatgctcattctactttttaaaaaagtttgttaccgtaagtagtgtctatgtattggcaactgttctgctgattcgatgaatgtaataaatcataccttcttaccttcttgtaaaatcacctgcattgggactaaaggccatagtcccctaagaggggaaaggcttttctctaagaaagaagttaggagttcttgaaaggattgatgatccacttcctcagtaaaaaatgtattgaggaggccaggcacggtggctcatgcctgtaatcccagcactttgggaggccgagggatcacctgaggacaggagcttgagaccagccttgccaacatggcaaagccccgtctctactaaaaatacaaaaattagccaggtgtgctggcaggcacctgtaaccccagctactcgggaggctgaggcaggagaatcacttgaacctgggaggtggaggttgcagtgagccaaaactgcaccactgcactccagcctgggtgacagagcaagactctgtctcgaagaaaaaaaaaaaagtaatgacatcatctagtcaagggtcatatgcaggtaaatttcaactccttttatttttattgttatttttcaggccaaatttgagtccctctttaggacgtatgacaaggacatcacctttcagtattttaagagcttcaaacgagtcagaataaacttcagcaaccccttctccgcagcagatgccaggctccagctgcataagactgagtttctgggaaaggaaatgaagttatattttgctcaggtgagttgggttcattgctatgcatgcttctccctcctccctccctcccttttgtaaagcagcttatacgttgcttatgttatatgctgaccggaaactctgagacttcaccttgagaaagacaaaattcctactctgaatgttcagcgtctcacttgttttaagaagatatcaaggtgcatttgaaagcaacctcagacattgcccctgaccttcctgggttgataatgatgggggaaagaaagccttccctgttcactggggagcttgcagggtgcagcggggtaggcgtggctatgcaaacaccctaaggtttgcgcagcaggtttccatgaatttgctcaagggttggagctcatgacccactctagactgagcagaccagagtggttccctgctcatgtggtgctgggggtactcagcagagaaacaggagtctgcagaagatgcctgcaaatcagcccaggactgccaggtctggcttgaaaggaaaataggggataaccagactgggcgcagatgctaagaaaccctctggttggcagggttcccagccccagggcacccacggcagggagaggggtagctggggttgggcttgccttttctcctgcccactaccattttgaccctcctctggggaacttaggacaggtgacccaccttcaaggcagctcccagagttccatttgatgtccttaggggctgacagattgtcagggaagaagagaggagcttctagaatgcagccagctcctcagtaaagcaagtccccctcaggctctgagcacccccccaacccgcccccaccacacacacacatacacacataccttgctgggatgggagaggaccctgtccaaaggcctcccccagtgggaggaagctcatctgacaccacgccagagagccaaagtgtcttttcttcctcaaagtgaggacagcgaacttgctgggcccttcaagtataaataaagcatttgggatccccgccccacccctgacctttttgccctgggaggcacaggctgagctttgaccttgggtgcctaggccttcctgtgtgagtacactcctttctgcacgggataagattttatgcaaataattacttagtactcctctgaccttttctgtttgtaaaacaatgcatattcattgtgaaaacttggggagggcaatctggaagtgcagagaaaacctacaccgcgcagcttgagatgtaagagctctatggacagccctctcatcactggtcagcatttctaaaaccaaactaggatcgtaggttattgttccttattcttatttcttaaagtctcctgggaagtggcttttttttttttttctggcatctgatccagagtcccggagagggaggtgcagagctgctgctgggtggggaaccctaggggcaggtggagccctggctccctgtccctgagaagctgtgtcctctcagaactgtggcctaggctttggactttcagagcttgcctctgtggtatgaggagcggggagagactgattccaagagccctcctgacctcaatgacagtgacttaaatttccatatatactaaagtcacctctgctgattttctgtccatctaggtcaagcgtaattatttgcagtccctgtgcctgtgactcccatagccctgggagggggctgtcatcctatctgtgccacaaccagagttcatatgtccttttgccctccccattacagaccatcttacaattggtcctggaatcacacctgtcctgacgcctggacattgacctgcccatctcccggaactggcgttaggtgctgttgcctcactgcagttcttccctggcaacaactgacctgtgcttattttctctcctcagaccttacacataggaagctcacacctggctccgccaaatccagacaagcagtttctgatctcccctcccgcctctccgccagtgggatggaaacaagtggaagatgcgaccccagtcataaactatgatctcttatatgccatctccaagctggggccaggtgagcagggccctcgggtgggagggaggcagggggagacacagctgctgccctgcaccagggagcagtaccaccactacccccgtagctctcctgagcccatgccggcatgttttgtgagcttctctgtattcttctgcgccaccgtcccttgtgctgggagcatgcctgcctcttggcaccacctgcagtgttagagagactgcggctgatcgtggggaccctgcatcacgcccctccaccccccgcagtgtcccaggaatccattcctgtgtccactgagcacagcctgcgtgggaggcctgagccccggccccaggttctgtcgctccggatagggatgagtgattggactttggaaagggaaaatcgatgccccctttaagaaatgttatttttaatcaaaataaattctccctttcctgtgattctcacctggccttcttaaaggaaaagggaaggagaaccataggccatggtgagggaagggccgcggtcgggctgccctaccccagggcctgtgggctggtcccctacagagcttgctaaagaaagaggaagttcccgtcctctggagggacaaaagtgtgagcactgcggggagggggtaggttcctcaggctctttgtccaaaatgtgggccttaactggtggaattgtgagcagtagatgagatcatcgagtgaaaggcacttccatcagcacctggctcacagtcagtgttcaatgcaggatttttgaaaaccataaaatgttggtggttcctgtcctgtcctctagggtttgggtgaggaggcaggtgtgagggagagtcttggggtgaagaggtttgagccttctcctgctctgtccgtggagcaagtcaaataaatgctgagaccgtcagctcctcatttctccttgaccagcaatctgatgttcccttgggttgagggttttgttttcttggtccatcagcagtttcatattgaaaagattacatttctgaaaacattgtccaaacggaaattccctctgtgggataaagcaagactcacattacttactgctaattgtggcgtgaaggtcaagatcagaaatggccattttgaggaagcgtgtgctccccccacagcagctcctggcccgggggcatgagcatggctgagggtgtggagtcttcccctaggttaggaatgggagaaaacagggtctccacttgcaaagaggtgtccacagttccagaggcaaatgctgttaataaaaattctgcatactccagaatataccacttccttcaccgagggcttattggagaaggctttttaggaaatagacgtaataaaatcagtttgtccttggttcacttaacagtgagcttgagtgagatttcatatttcacctgtgcttttcaaccaacaggattgcggagattttgcaaattatggtcctaaaccctgagctttctggattttcgatgattagtaggtagataagagacttgcaaagaggtagatttgtaagaggctcttaaccagcattttcagcaatccatctgacctcccatgcctgaattctctctctcagagagctgagctcctttgcctttttcagtgcagttataataacattccagtcccacatgtgatagagaaaagatcaccaccttccttatcagtaaaagtaccttccaggtttagaggagtaaccagtgtggctggaggtaggaagctctcctgggccgctcttgtcgggcggaaatcacacagtggttggtgcggtgcctcctcgcttacccgaactgcaaagaaatcccaagcacaggccgggcgcggtggctcatgcctgtaatcccagcactttggaaggctgaggcaggcggatcacgaggtcaggagatcaagaccatcctggccaacatggtgaaacctcgtctctactaaaaatacaaaaattagctgagtatgatggcatgcgcctgtagtcccagctacttgggaggctgaggcaggagaatcacttgaacctgggaggcggaggttgcactgagccgagatcttgtcactgcattccagcctgggcaacaggcaagactctgtctcaaaaaaaaaaaaaaaaaaaagaaagaaagaaagaaaaagaaaaaagaaaagaaaagaaatcccaagcacaaagccctggaagaaaactgaccatgaggccacaccctgtgggtggagcaggttgaagcaaacctcctgcccctatttcagatccctgcccagcagggcaccaataacgatgcagtctccattcttaaacatctttctaggtgacatgggctggacaagcatgtggtgagccgggttctcattgcctcgggcactcactcatgctgttagctccatgaagtcaatacctttaccgtctcctttactgaggagggaactgaggtgcacagggaagcagaataaagtgcccatgagccctgggtactaaggagccaggctcagagctgccttcatgagcaccagagatgcacactcttcccgtggccagagcggcaccccagcgggaggccccagtcccttcattctacattgccgggtttttcagttgcagaaagctctccccacccttgctggaccagagtggcctgaacttggccaacctggtagaactcaggctgacatagaacagcaggacactcctggtcccggggattagaagttgttctaaggaaaagatgcccaggtcaaaaacgtttccagagcacctggctccgtgcagccacccctgcgtctgctgcagggcctcctgtggcgcccttcctgggcgtgcactgcgaccctcaaataggagctgcatgagggaggcccagggttctgtttccaaatacgtttcttcatccatctttttcctgaaccgaagtttctcacattcacacttgaggaaatgctgacagaaagggagttctctgggtagtttagatatctggtggacatgtgaagtataactagaaaaatgcattccttctatacttctcatgtgcctggactcccagaatgtttgactaaaaacagagtcatgcacaatggaaatctctctttttctgaatgagctagcaaagaaatacaaacccaaaatatgtctggctgtgtctctcagcccaatcgaatggtcacgagcagctggcccagcagagccctgaatgctcttttatgtttgccttttgactcccaaggacttgtctgagtgaccctgcgattattttccctccttaggggaaaagtatgaattgcacgcagcgactgacaccactcccagcgtggtggtccatgtatgtgagagtgatcaagagaaggaggaagaagaggaaatggaaagaatgaggagacctaagccaaaaattatccagaccaggaggccggagtacacgccgatccacctcagctgaactggcacgcgacgaggacgcattccaaatcatactcacgggaggaatcttttactgtggaggtggctggtcacgacttcttcggaggtggcagccgagatcggggtggcagaaatcccagttcatgttgctcagaagagaatcaaggccgtgtccccttgttctaatgctgcacaccagttactgttcatggcacccgggaatgacttgggccaatcactgagtttgtggtgatcgcacaaggacatttgggactgtcttgagaaaacagataatgatagtgttttgtacttgttcttttctggtaggttctgtctgtgccaagggcaggttgatcagtgagctcaggagagagcttcctgtttctaagtggcctgcaggggccactctctactggtaggaagaggtaccacaggaagccgcctagtgcagagaggttgtgaaaacagcagcaatgcaatgtggaaattgtagcgtttcctttcttccctcatgttctcatgtttgtgcatgtatattactgatttacaagactaacctttgttcgtatataaagttacaccgttgttgttttacatcttttgggaagccaggaaagcgtttggaaaacgtatcacctttcccagattctcggattctcgactctttgcaacagcacttgcttgcggaactcttcctggaatgcattcactcagcatccccaaccgtgcaacgtgtaacttgtgcttttgcaaaagaagttgatctgaaattcctctgtagaatttagcttatacaattcagagaatagcagtttcactgccaacttttagtgggtgagaaattttagtttaggtgtttgggatcggacctcagtttctgttgtttcttttatgtggtggtttctatacatgaatcatagccaaaaacttttttggaaactgttggttgagatagttggttcttttaccccacgaagacatcaagatacacttgtaaataaagctgatagcatatattcatacctgttgtacacttgggtgaaaagtatggcagtgggagactaagatgtattaacctacctgtgaatcatatgttgtaggaaaagctgttcccatgtctaacaggacttgaattcaaagcatgtcaagtggatagtagatctgtggcgatatgagagggatgcagtgcctttccccattcattcctgatggaattgttatactaggttaacatttgtaatttttttctagttgtaatgtgtatgtctggtaaataggtattatattttggccttacaataccgtaacaatgtttgtcattttgaaatacttaatgccaagtaacaatgcatgctttggaaatttggaagatggttttattctttgagaagcaaatatgtttgcattaaatgctttgattgttcatatcaagaaattgattgaacgttctcaaaccctgtttacggtacttggtaagagggagccggtttgggagagaccattgcatcgctgtccaagtgtttcttgttaagtgcttttaaactggagaggctaacctcaaaatattttttttaactgcattctataataaatgggcacagtatgctccttacagaaaagttgtcattttatttctagaataaatctgtgaaccttctaaa

SEQ ID NO: 10022 - DNA, 10503 bp, Homo sapiens; identical to SEQ ID NO: 10021

SEQ ID NO: 10023 - DNA, 10503 bp, Homo sapiens; identical to SEQ ID NO: 10021

SEQ ID NO: 10024 - DNA, 987 bp, Homo sapiens
cacatctcatcttccactggaacgtttagataaaggagtgtggggtgtaataaagaactaagctagagcgagagaaacactgaaaaactaattacgaaatgtcacacaagtaccacaaagagagtgattacttgattaattaatgataggaaccctacatttaagtctttcagttatacttgcatcagtcctctttgcctatcagaatgcggtttgtttctgccaacgaataactatcaaaccactgaggcctaactgatgtgtgattaatgtgggctccattaattgtgtggctgagttttatgcatgaagctgtatccttgatttttcacctttaatttcctcctgtttaactgctggtcataaaattgtttcaaatgtatctgctgagtctgagagcaagttttgcaacttgaaaagtgcctgagtcagtttgggcatcttgtttggtaaaaccgacttgggggaactcttaacgctgtaagatgaattgctacttggcttccactcccagccctgctggctcccttcctgccactgctcactggcactgcatctcatctattatcattaagcacatgcatagcattgataatggcaaaaggcttaataactttctttctgatagcccatcatatgtggctctattcaaccttattttagacagctagagatgatgacatctgtctttctggtctttttcacattcatttaccatctctgttaatatcacctgattttcttttggggcagcaccccttcccatctctgcttttattttctgtgtttcaagtagggctggtctcatttccctggctccggagctaggcctggacaattagaattccagtgattggttcggggataggcatgtgacccaagctcggtcaactctcggtcaactagagagacaacctaggtcaactagacaggcaaccctaggactttagcaggaactattaggaggaaataaaaaaaaaaaagctc

SEQ ID NO: 10025 - DNA, 987 bp, Homo sapiens; identical to SEQ ID NO: 10024

SEQ ID NO: 10026 - DNA, 2530 bp, Homo sapiens
tgcttgtgaaagaattatcagtgagtgaaaggccatcaccccaggaagccaaatgagggagcagcaacatgtatatgagcttcctatggaattgtccttatgtgaagctttgaaggtgtacagccactctcccgggtcttcaggttcctaccatttccatttctgttaaagtggatctgcatatcttcagcttactaggtgacccggatgctgacatctgctgctgcagaaaggaagacttttcattgtaatttcgcttagacccttttatcagtggagctccagttttcttacctagctgtcacttttttaaatgcctctgggggttatttttgctttccttggcccccaccaatttatacatctccattttctgacctctggactaactggttgctcagcaaggttctgaaggagagtttcttgcattggacaggcccagtcttctcccatcattgccctgctgtgactccaaagaaaggagcttcttgctgacagtgccctgtggagcaaggctgtgtttcctaccccacacggtgctcagtgggtgccagccctcagtgtggctttgtgattgctgccctaaaggagaatgctctttccttcctcactggtactgcctgctgttttctaagcattgctcctgcacagacatggagtcccagccccagcaaggctcttctgttcccatctgttgacaatgtcttgtggagcatttttgctgaggaaaaggtcacttgtaaacagaggagaaagggaaagagtacaaagccctaagtttattgtaagtgaaaactgagggaattcctgtcttctttaggagtaatgattcatagatctagataggtggaaatatcattcaaaatagtcacttgagctcacaaaaaaagcaaggaagaattctcatgtcctttgtcttccttctgtagccattaactgctgaatccatgtgaggaagacaggcttcccttccttccccctccttagtgattttttctttaacagcataagtaaagaggactttctggttcatttttgtttgttttgttttgttttgttttgtttacagatgaggtcttcctgtgttgcccaggctggagtgcggtggctattcacagatgctatcatagcacactacagcctacaactcttgggctcaagcatcacgcctagcagtttctggttcctttaacagcaaaaggaaagagaggttctgattcttacctcagggttttttggttgttcattgtttttgtttttgtttttgttttgacactgcagagcacaaggctaaaggttacagctgagatctttggaaccaaaggcagagcaagcagagcccgttgtctgggccccacaccactgcaggcaggtggatagaagtgcggcccctctcatagtatgcccataagtcagggcatagggcagaactacctgtcatgttgctacaccatcctgtcttctcagcatctccttgcctgttttctttattagtccaaaggaaaacaacagcaacaaaatctgtttttaaaatgtcttatatgaacatatatcaaatatccatgcgctgaaacccacataccatcacttggcaattttttagaataagaccccattattatctattgctataaacctagccagttctcttgctcttctgtattttcctatttccctgccatcatctgctatttctgccacttctcttagactccttgtctgcaaagcccaagctagaactcactgtctatggcagaaggacatccagagcccattctggagttttgttttttccttctgccagatgctttgtgtcctgtcttccttcctcctcatatttctgtttctcatttgtgttcagttttgtgcagcattgctagcactgcttttgtgaccagaaaaggccataacatggtccaggatcatcattcttctgactctagatgggacacttgacagtgacttgaaacatttgcatattcaggaatgcatgagatttcaagagagcctacagtatgaaatcattttcacaaaataagcagcttgcttctgaaatgctgtctttcccagtagctactcacctgcctctggtggctgggattcagatgccacaaaactgtcagtatctatagaccaggtctgtgccacctcctctctcctctgtgctcagtgaggaggcagtaaatgaagttacaggctagcacaatacctaactcatgtttcccagtacacctgtagatattactgtacttttatgttctcaagaaataagttgttgcctattcagtgttacagatttctttgtttctttttaattaaaatacaagaagcagctgaggaaagggagacaaggtattttatttctgactgattttagaaaaaacttgtgtacatgtgtttggaactgttgaaatgccaagttttctgtataagtgtttttgtaattaaactttcagattttctttgttttttaagaagttgatgtgcttgtttgacatttgtctcattaaaacttttctacgttgaattc

SEQ ID NO: 10027 - DNA, 7314 bp, Homo sapiens
agctcgggaagcagagctccgccagcttcgcaaatccaacatggagtttgaggagaggaatgcagccctgcaaaagcacgtggagagcatgcgcacagcagtggagaagctggaggtggatgtgatccaggagcggagccgcaacacagtcttacagcagcacctggagaccctgcggcaggtgctgaccagcagctttgccagcatgcccttgcctggtaagtcctcctgcctgagaactgtcagtgacaggggtgtgtgtgttgtgtggagtggggtgctgtttatgttagtactggtgtggagagattgaaatctcctccagaggaaaattaattaaactacattttttcttctctggatataatagaatgtcagtattggctaaaatcgtccaatgtttcaggctctctggtcattcaaatttttgtccatttatattttaatatctattttcccctcttttaagcttaatttgctattcagaacactggaaactgagtagtaaatcttgagagtgtttcttcttatgtatgtttgtttgctttttagttgtttttgttttaacgggaaggaagggagaatgaacactggtatttcttatatactctttcattttgaagatagtcatagcagaaagctgagcgagtctaaccttctgttacatgcagctgctcatatatactatacagcaattatatagcccatctgtttatttagagtatgtggactaatttcatttctttgagatctaaaagtctctcctctaaaattaaaagcatgtctgtggagcagaccacattagaatcactgtttctttgaaattgtgttttatggtacaactgaatagggaggattttcttactttcttcttatctcacttcaggaagtggagagacacctacagtggacaccattgactcatatatgaacagactgcacagtattattttagctaatccccaagacaatgaaaacttcatagctacagttcgagaagttgtgaacagactcgatcgttagggaatggtgagtgctcactgataaatatttatatgccagcacatcatcaaaaataagatgtcatcagactttatcaatactactaaaaccctgggattacattggatgaacaagttggagacttggttaagattcctgttgcatggttgttaaatgtagtaaataatattagaaaagagaatcactgtagtcccagctacttgggaggctgaggtgggaggattgcttgagcccagcagttcaagtccagagagatcctgtctctaaaaataaaagaaaacagactcaagacagttttttcttatgcttgcttcagaatggtttaatgggaaaagcatggtttttgtggcttgacctcatttctagctttgtcacttattagctgtattcttgggcattagtttcccaaaaggttttgaaaagtgagtgggaaacttagaagaaatcatccccaaaacagcactcagaacaaaataaatataacttaatttttaatcttccttttctctggaaaatactaatgataatttagaagtagtcagtgagacattgtatgtatgtgagcctacataagtaggaagcttttatattcaccactcaataacacagtgactgttgtctgttaaatgttgatgtggactcaccatacaaacaggtaactccctggttttgatagattaaaaaataaactcttcagccaggtgcaatggctcacacctgtaagcctagcagtttgggaggtcaaggcaggcagatcgctggagtccaggttcaagaccagtctgggcaacatgacaaaaccccgtatctacaaaaaatacaaaaaattagccaggcatggtggtatgcgcttgtggtcccagctgcttgggaggctaaagtgggaggatcacttgggcttagaaggtcaaggcgaggctgcagtgagccattatcagaccactgcatgccagcctgggtgacagagcaagacactgtctcaaaaatttttttaaataaaaaataaataaactcttggtggggcacagtggctcacacctgtagtcctagcactttgggaggttgaggcagtattgcctgagcccaggagttcaagaccagcttgggcaaaatagtgagacccctgctttaaaaaaaaatgaaaaaaattagctgagcatgatggcgcacacctatagtcctagctactcaggaggctgaggcaggaggatcacttaatcccaggagttcaggtttcagtaagctagggtcacactagtgtattctagccagggtaacagagcaagattctgtctcaaaaaaaaaaaaaacaaaataaaaatataaaattctcaataagcaaaaaagagagagaaaataagtttttaaaaaatatgttcaacaaatgagcagtagtatgtatccttttttttttttttttccaaaaaaaatctacccatgacactttttggtactaatggtcatttctcaaatggaattggtatttattcattcaaattcctagagataggatacccctttactatgccatcccacaaaactggcatccctttgctctattggttaagttattccatacctgcagacatataaactgtgtggaaattttaagattagactctacaatgaggtggccatatatggatactaaaataagagtcaacagcaggatatgttccttagaatggtcatgggtttgaatctttatttgtcctgtgagtacatgagcacactcatatacataatttatattctggtttggtttggactttgagcaacatatataaagataaatgcctagtaaagacaaaggcagaagtctttatacttcttggtgatgcccttggatggtaactgtacaaggcaatgcattatattttagcctcagccatgctctgatggggaaaggattactatccttctagggagtagccagatggaatggactgtacttcttagagatggctggactccctgcagaataaagaagtggcattactgctgctgcttatgaagggaacagcttgtaaatctaggcctgggatattcaggagctcatcatccttcccattttcgtacagtgttttcaattagcactcttgtaggcttgaaaagtgagagctgggagaaacagtgtggaagattgtgaaagaaaacattaattgataacatcgtgtctcttcacatagatacagggcagctaattaagtattgacccaaaagtggttttccattttgagcattttgccagtaagactctcctaaagcttttttcatctcaagagtataaactatattatttgttttctgatgagtctttgaaaacttagaatattactattatccttgattttaacctacaaatattttgcccctgaaaaaatagctaaaagtgtgaactgttatattactacagattcttacagtctagccatgcaaacataactaacaatagatggttccccacacccccaaaactgtcaaaggaaacaattacaaagactgtgattaatactggtttggcctcattatacaaatatgtacagacagcgaggctgatgtccccagcactcatgatgcaattaattactctgacaagagtttggcaaagttttcatccactgtcaggagccagtgagtgaagggaagctaatggtctacaagtttcagaggagcatattagggacctttagaaatctaacattttatatatgaagaaactgaatcccagagaggagaaacatcttgcttgaaaatatctgcgtagatgagtacagaatccaagactagaaccacagatatctaaactctctcattcactgggtttctaaaacattgctctaaggaagaggtggatgggggaaggggaaagcactaaaaaatcctgaaatagagcattaagatacataggaagtaaacagataaaaattgtaatccaggaattataatgttatagaattttagctcattttaaaattattttgataaatatacagtggaagaattaccctacctgtctgtcacctttcttgtagctgagtagtacctagagacaagtggagctaggaggaggccatgagggtgattttaagttgaaaggtgactaccttatataaactattaaaatgcatatgttgcctgatttcaatgataatatttggctgtttgagtttagggaaaaaaaatcttatgtgactgtatttttattaatatgagaaatgttcttgattatatgcacataatacatctctatacatgcagatatccttagttaacacttgaagaaaattggttttgattgaccatacattcttcagactaaagtagggtactcattttccctcctcaggtttgtccctgatagttgcttttctgtgtttagctgatgattttcctacctcccattgttgctgaactggaacagggccatgtttctcattgaaatgttatgtaaaacatctcaatgaggttgcctgcttacagctttatgagttcttcagtttacatacaccctgcactcactttaacgcttatgaaaccaaagcatttttaaaatccatagcgctaaccccttccattcaatacttactttcttggtgttattttccttgtttgtttttgtttttgttttgttttgttttcctgattctacaggtcttagaactccaagatgttccataagtgtttttacttgtgaggaatgagaagccatccatggaaatttgaactgagtgggggcagagaaagagtgcagatccctttgcttgtgaaagaattatcagtgagtgaaaggccatcaccccaggaagccaaatgagggagcagcaacatgtatatgagcttcctatggaattgtccttatgtgaagctttgaaggtgtacagccactctcccgggtcttcaggttcctaccatttccatttctgttaaagtggatctgcatatcttcagcttactaggtgacccggatgctgacatctgctgctgcagaaaggaagacttttcattgtaatttcgcttagacccttttatcagtggagctccagttttcttacctagctgtcacttttttaaatgcctctgggggttatttttgctttccttggcccccaccaatttatacatctccattttctgacctctggactaactggttgctcagcaaggttctgaaggagagtttcttgcattggacaggcccagtcttctcccatcattgccctgctgtgactccaaagaaaggagcttcttgctgacagtgccctgtggagcaaggctgtgtttcctaccccacacggtgctcagtgggtgccagccctcagtgtggctttgtgattgctgccctaaaggagaatgctctttccttcctcactggtactgcctgctgttttctaagcattgctcctgcacagacatggagtcccagccccagcaaggctcttctgttcccatctgttgacaatgtcttgtggagcatttttgctgaggaaaaggtcacttgtaaacagaggagaaagggaaagagtacaaagccctaagtttattgtaagtgaaaactgagggaattcctgtcttctttaggagtaatgattcatagatctagataggtggaaatatcattcaaaatagtcacttgagctcacaaaaaaagcaaggaagaattctcatgtcctttgtcttccttctgtagccattaactgctgaatccatgtgaggaagacaggcttcccttccttccccctccttagtgattttttctttaacagcataagtaaagaggactttctggttcatttttgtttgttttgttttgttttgttttgtttacagatgaggtcttcctgtgttgcccaggctggagtgcggtggctattcacagatgctatcatagcacactacagcctacaactcttgggctcaagcatcacgcctagcagtttctggttcctttaacagcaaaaggaaagagaggttctgattcttacctcagggttttttggttgttcattgtttttgtttttgtttttgttttgacactgcagagcacaaggctaaaggttacagctgagatctttggaaccaaaggcagagcaagcagagcccgttgtctgggccccacaccactgcaggcaggtggatagaagtgcggcccctctcatagtatgcccataagtcagggcatagggcagaactacctgtcatgttgctacaccatcctgtcttctcagcatctccttgcctgttttctttattagtccaaaggaaaacaacagcaacaaaatctgtttttaaaatgtcttatatgaacatatatcaaatatccatgcgctgaaacccacataccatcacttggcaattttttagaataagaccccattattatctattgctataaacctagccagttctcttgctcttctgtattttcctatttccctgccatcatctgctatttctgccacttctcttagactccttgtctgcaaagcccaagctagaactcactgtctatggcagaaggacatccagagcccattctggagttttgttttttccttctgccagatgctttgtgtcctgtcttccttcctcctcatatttctgtttctcatttgtgttcagttttgtgcagcattgctagcactgcttttgtgaccagaaaaggccataacatggtccaggatcatcattcttctgactctagatgggacacttgacagtgacttgaaacatttgcatattcaggaatgcatgagatttcaagagagcctacagtatgaaatcattttcacaaaataagcagcttgcttctgaaatgctgtctttcccagtagctactcacctgcctctggtggctgggattcagatgccacaaaactgtcagtatctatagaccaggtctgtgccacctcctctctcctctgtgctcagtgaggaggcagtaaatgaagttacaggctagcacaatacctaactcatgtttcccagtacacctgtagatattactgtacttttatgttctcaagaaataagttgttgcctattcagtgttacagatttctttgtttctttttaattaaaatacaagaagcagctgaggaaagggagacaaggtattttatttctgactgattttagaaaaaacttgtgtacatgtgtttggaactgttgaaatgccaagttttctgtataagtgtttttgtaattaaactttcagattttctttgttttttaagaagttgatgtgcttgtttgacatttgtctcattaaaacttttctacgttgaattc

SEQ ID NO: 10028 - DNA, 327 bp, Homo sapiens
aaatatacagtggaagaattaccctacctgtctgtcacctttcttgtagctgagtagtacctagagacaagtggagctaggaggaggccatgagggtgattttaagttgaaaggtgactaccttatataaactattaaaatgcatatgttgcctgatttcaatgataatatttggctgtttgagtttagggaaaaaaaatcttatgtgactgtatttttattaatatgagaaatgttcttgattatatgcacataatacatctctatacatgcagatatccttagttaacacttgaagaaaattggttttgattgaccatacattct

SEQ ID NO: 10029 - DNA, 99 bp, Homo sapiens
acaggggacttagttctcagaagaaattcattgctcaaaagcaatggtagtgttatccctccttaggactactcaaagaccagtgaaggaaagctaggg

SEQ ID NO: 10030 - DNA, 163 bp, Homo sapiens
gggattacaggcgcctgccaccacacctggctaatttttgtatttttagtacagacagggtttcaccatgttggccaggctggtcttgaactcctgacctcaggtgatctgcccgcctcggcctcccaaagtgctgggattacaggcgtgagccaccgcgccc

SEQ ID NO: 10031 - DNA, 125 bp, Homo sapiens; identical to SEQ ID NO: 6934

SEQ ID NO: 10032 - DNA, 1208 bp, Homo sapiens
  SITE (1186): n equals a,t,g, or c
caaggtttcaccattttgggcaggctggtcttgaactcctgacctcaggtgatctgcctgccttggcctcccaaagtgctgggattagaggcgtaagccaccgcgcccagcccctatcctttttgttttttattataaaagtaatatctgaatacatgattgtttaaataaatgctgtgtaagtgtataaaatgaaaagtaaaaggcccccatgaatggacattaagatacttccgatgtgttttgttttctattgctgcagtatttgttactgtacttgtgatggtacatgtgcatatattgctctaaaacaaatttctagaagttgaattccaaacagtgactgttccagatgtcttattttttaggaccccaagcctcttaaatttaggtctttccgttattcccttaccttctcccttatcccttcaaatctttgcccactgccatcacattaatgccttctttgaccttattttatctgttatagtaatgagctgccctgttctttctatctttaatctccccactccaccttgtccttattatctcagctagtttaattcttaaaagtgagtatattaatccttggaatctttcttttttatatatatatatagtactgatatttttcagttagtagcttctgattataactttcccaaattgaggctttcatttccttagaacaaggaactgccctggctgggcagtttagtcaaaggcttgtcagggtgtttagtagacagttgtgcaagtggagctattcacagggactgtattactatgttcctttgttactaaaaaaaaattcttgcagtccctgtagttcgcaacagatactctgactcatatttctctacataggagaaagagtatggactttggagtgatacatctatagctcggttaggatctagactctgctcccaaactggtagtgtattttggggtgcactgctatgtttctgagccttcatttcttccttataaagagtttattagtttgtagccaggcgcagtggctcacacctgtaattccagcactttgggaggctgaggttggtggatcacctgaggtcaggagttcaagaccagcctggccaacagggtgaaaccccgtttctactaaaattacaaaaattagccggacgtagtggcacatgtttgtaatcccactactcangaggctgaagtgagagaatcgc

SEQ ID NO: 10033 - DNA, 1322 bp, Homo sapiens
caaggtttcaccattttgggcaggctggtcttgaactcctgacctcaggtgatctgcctgccttggcctcccaaagtgctgggattagaggcgtaagccaccgcgcccagcccctatcctttttgttttttattataaaagtaatatctgaatacatgattgtttaaataaatgctgtgtaagtgtataaaatgaaaagtaaaaggcccccatgaatggacattaagatacttccgatgtgttttgttttctattgctgcagtatttgttactgtacttgtgatggtacatgtgcatatattgctctaaaacaaatttctagaagttgaattccaaacagtgactgttccagatgtcttattttttaggaccccaagcctcttaaatttaggtctttccgttattcccttaccttctcccttatcccttcaaatctttgcccactgccatcacattaatgccttctttgaccttattttatctgttatagtaatgagctgccctgttctttctatctttaatctccccactccaccttgtccttattatctcagctagtttaattcttaaaagtgagtatattaatccttggaatctttcttttttatatatatatatagtactgatatttttcagttagtagcttctgattataactttcccaaattgaggctttcatttccttagaacaaggaactgccctggctgggcagtttagtcaaaggcttgtcagggtgtttagtagacagttgtgcaagtggagctattcacagggactgtattactatgttcctttgttactaaaaaaaaattcttgcagtccctgtagttcgcaacagatactctgactcatatttctctacataggagaaagagtatggactttggagtgatacatctatagctcggttaggatctagactctgctcccaaactggtagtgtattttggggtgcactgctatgtttctgagccttcatttcttccttataaagagtttattagtttgtagccaggcgcagtggctcacacctgtaattccagcactttgggaggctgaggttggtggatcacctgaggtcaggagttcaagaccagcctggccaacagggtgaaaccccgtttctactaaaattacaaaaattagccggacgtagtggcacatgtttgtaatcccaactactcaggaggctgaggtgagagaatcgcttgaatccaggaggcagaggttgcagtgagctgaaattgtaccactgcactccagcctaggcgacagagtgagactccgtgtcaaataaaaaataaaaaaaaaacgaaaaaaa

SEQ ID NO: 10034 - DNA, 285 bp, Homo sapiens
ttttttttgagacagagtctcgctctgtcacctaggctggagtgcagtggcgcgatcttggctcactgcaagctccgcctcctggattcacgccattctcctgcctcagcctcccaagtagctgggactacaggcgcccgccaccacggccggctaattttttgtatttttagtagagatggggtttcaccgtgttagccaggatagtctggatctcctgacctcatgatccgcccgccatggcctcccaaagtgctgggattacaggcatgagccactgtgcct

SEQ ID NO: 10035 - DNA, 143 bp, Homo sapiens
gaccttttttttttttttttttttttttgagatggagtctcgctctgtggcccaggctggagtgcagtggcgcaatcttggctcactgcaagccgcctcctgggttcatgccattctcctgcctcagcgtcctgagtagctgg

SEQ ID NO: 10036 - DNA, 285 bp, Homo sapiens; identical to SEQ ID NO: 10034

SEQ ID NO: 10037 - DNA, 1322 bp, Homo sapiens; identical to SEQ ID NO: 10033

SEQ ID NO: 10038 - DNA, 143 bp, Homo sapiens; identical to SEQ ID NO: 10035

SEQ ID NO: 10039 - DNA, 285 bp, Homo sapiens; identical to SEQ ID NO: 10034

SEQ ID NO: 10040 - DNA, 2393 bp, Homo sapiens
aattccagaaagggaactaaattctgcttaaaaagagaaggcttctcaaagggagtaatgtttgacttgagacccagagaaggagaaaggaaggaagcttgcagaggagccttggtgacaagaggcatgctctattgtggggacagtaggaataggggagaagccttggccttgtcactttctgctttttggtttatgcagttgtctctgcctaagatttttttctacctttgtttctgcctccagttactccccctggaagtgtcactctcttttaaattcagagagccttgtttatggcactgatgtggtgcccagtgcattctgctttgtactaaatatgctgtatctcacctttgtgtcagcaccaaactgtgttctttataattctgcagcttctagtacatttgtgcatagtagcaactcaatgcacatttgttgaatgttgaatgaatgctagtcaaggcaagacaagcaaaattctcaaataagtcaaaataatccctaattatttccagatggaatggtaatcaatttgcttcaggaataaattagccaatggatgtttgataacataaccgaccctaagtaactcgatttagctgctgaagccagcttttaaagatgcagtttatccactggccatgggatatcggccatgattactggagcaagccctagtaatacaatctttatataataaatataatcttactaaatgtcagtgagaattatctttatataataaatacagtctttaaaattgtatttatatttggcatttatgcctctcagcactatgtaatttcttattagaagtacactttaacttgagaattccattagaatcattaaattttctgaatagaaagcttaacagtgtttaaaaataaatttttagtggcttcatgatgtcaaaacaatcacttgaaagctgaaaaatatgttaaacctacttttgtatttatgtcccagtttgcttttttcaattcacaaaaaaagatttgacttgattacaaagaagaaaacacagaaagagcaaaaaagaaaagaaagatgaaaggaaggaagaaagggagacaaaaaaagaaacaaaaagaaaaaaagagaaagactgattatctagttgttttgtgattaggtagacataactcgagaatcttggagccatccttatctcttccctctccattacctgccacaaacaaccccccactaaatagtaaattcttactccaaaatgtctttgatattccttctttcttattcatttccatgtcactgcctgacttcaagcttttatgaagcttgaagttatatatcaaattgtaactgatctcctaattctcattttgtgtgtgcattccccaaatcattcttgacatatctgtgcaaatctcagcatgtcactttcccagtagtaggtatccatcagctccctgttaatctccatgaccagagattctgtccacctctccagcctcatcttgtgagcttctttccaatcacctcatcctttgcctccttagcttttgcctcggctggcctgataaacctctacctgcctgccaagtttcagttcaagccttagctctctgtcaagctcccgcagtccctcacccggactcacatgctccttgcacctgcagtgggtcagctgctttacatatattgtactctttacttctcacgtagctgtttaaggtgggtggtctttgtctccactttgcaggtgagaaaagtgaagctcagagagcttaagtaatttgctgacagtcacacagtaagaaaatcagtggcaaactgaaatacaaagaacctgagctcactcctcaacatgttgctccttggctttagctttgcccacacctgcttttattttgttacgacgtttgtcacatttactgtgtttgcaattctccatttctgctacactcgttgaaagcatcagccccacctttcatctttatgtctccaaagacctgcacagtgtctggctcatgagaggtagttaagaaatatttattaaggtgatgaatgaaccaagcaatatacaaacaatatacatattcttttctttgtggtggtgtggagaagaaagggagaagtaataagttccactttctggagtggaagggttctagtgggacaatagaagattgtatgacctccagaaccatcttaagagtgattttaggattagctactaagggccaggcacaatggcacacacctatagtcccagctagttagaggctgaggcaggagcattgcttgaacccagaagttaaaggttgtagtacactgtgattgcatctatgaatagccactgcactccacctgggcaacatagcaagaacctgtctctcaaaaaaaaaaaaaaaaaaaaaaag

SEQ ID NO: 10041 - DNA, 2452 bp, Homo sapiens
aagtgattcttaaatattaagtgataaatgcatttaaaatgtgtccggaatgggctttgtgaattccagaaagggaactaaattctgcttaaaaagagaaggcttctcaaagggagtaatgtttgacttgagacccagagaaggagaaaggaaggaagcttgcagaggagccttggtgacaagaggcatgctctattgtggggacagtaggaataggggagaagccttggccttgtcactttctgctttttggtttatgcagttgtctctgcctaagatttttttctacctttgtttctgcctccagttactccccctggaagtgtcactctcttttaaattcagagagccttgtttatggcactgatgtggtgcccagtgcattctgctttgtactaaatatgctgtatctcacctttgtgtcagcaccaaactgtgttctttataattctgcagcttctagtacatttgtgcatagtagcaactcaatgcacatttgttgaatgttgaatgaatgctagtcaaggcaagacaagcaaaattctcaaataagtcaaaataatccctaattatttccagatggaatggtaatcaatttgcttcaggaataaattagccaatggatgtttgataacataaccgaccctaagtaactcgatttagctgctgaagccagcttttaaagatgcagtttatccactggccatgggatatcggccatgattactggagcaagccctagtaatacaatctttatataataaatataatcttactaaatgtcagtgagaattatctttatataataaatacagtctttaaaattgtatttatatttggcatttatgcctctcagcactatgtaatttcttattagaagtacactttaacttgagaattccattagaatcattaaattttctgaatagaaagcttaacagtgtttaaaaataaatttttagtggcttcatgatgtcaaaacaatcacttgaaagctgaaaaatatgttaaacctacttttgtatttatgtcccagtttgcttttttcaattcacaaaaaaagatttgacttgattacaaagaagaaaacacagaaagagcaaaaaagaaaagaaagatgaaaggaaggaagaaagggagacaaaaaaagaaacaaaaagaaaaaaagagaaagactgattatctagttgttttgtgattaggtagacataactcgagaatcttggagccatccttatctcttccctctccattacctgccacaaacaaccccccactaaatagtaaattcttactccaaaatgtctttgatattccttctttcttattcatttccatgtcactgcctgacttcaagcttttatgaagcttgaagttatatatcaaattgtaactgatctcctaattctcattttgtgtgtgcattccccaaatcattcttgacatatctgtgcaaatctcagcatgtcactttcccagtagtaggtatccatcagctccctgttaatctccatgaccagagattctgtccacctctccagcctcatcttgtgagcttctttccaatcacctcatcctttgcctccttagcttttgcctcggctggcctgataaacctctacctgcctgccaagtttcagttcaagccttagctctctgtcaagctcccgcagtccctcacccggactcacatgctccttgcacctgcagtgggtcagctgctttacatatattgtactctttacttctcacgtagctgtttaaggtgggtggtctttgtctccactttgcaggtgagaaaagtgaagctcagagagcttaagtaatttgctgacagtcacacagtaagaaaatcagtggcaaactgaaatacaaagaacctgagctcactcctcaacatgttgctccttggctttagctttgcccacacctgcttttattttgttacgacgtttgtcacatttactgtgtttgcaattctccatttctgctacactcgttgaaagcatcagccccacctttcatctttatgtctccaaagacctgcacagtgtctggctcatgagaggtagttaagaaatatttattaaggtgatgaatgaaccaagcaatatacaaacaatatacatattcttttctttgtggtggtgtggagaagaaagggagaagtaataagttccactttctggagtggaagggttctagtgggacaatagaagattgtatgacctccagaaccatcttaagagtgattttaggattagctactaagggccaggcacaatggcacacacctatagtcccagctagttagaggctgaggcaggagcattgcttgaacccagaagttaaaggttgtagtacactgtgattgcatctatgaatagccactgcactccacctgggcaacatagcaagaacctgtctctcaaaaaaaaaaaaaaaaaaaaaa

SEQ ID NO: 10042 - DNA, 298 bp, Homo sapiens
ccttggaaagcttgctccttcactctccaggggatcaaaacctgggagactgtctgctgctgaaactacactcccggaatctgtgagttctcctgttgttctttttccctcaggatcctccatttccagcatctatcatagtccaagcagagcacataagcactcttttggagtacatatggctttcatggtctggtgatggaatctgggaacacagttatgtttggatgaggtcagttctgagtggcaagctcatgttacttaattagtttagcataagtgtaaacctttcaataga

SEQ ID NO: 10043 - DNA, 298 bp, Homo sapiens; identical to SEQ ID NO: 10042

SEQ ID NO: 10044 - DNA, 39062 bp, Homo sapiens; identical to SEQ ID NO: 8778

SEQ ID NO: 10045 - DNA, 5417 bp, Homo sapiens
atggctacaacagtccctgatggttgccgcaatggcctgaaatccaagtactacagactttgtgataaggctgaagcttggggcatcgtcctagaaacggtggccacagccggggttgtgacctcggtggccttcatgctcactctcccgatcctcgtctgcaaggtgcaggactccaacaggcgaaaaatgctgcctactcagtttctcttcctcctgggtgtgttgggcatctttggcctcaccttcgccttcatcatcggactggacgggagcacagggcccacacgcttcttcctctttgggatcctcttttccatctgcttctcctgcctgctggctcatgctgtcagtctgaccaagctcgtccgggggaggaagcccctttccctgttggtgattctgggtctggccgtgggcttcagcctagtccaggatgttatcgctattgaatatattgtcctgaccatgaataggaccaacgtcaatgtcttttctgagctttccgctcctcgtcgcaatgaagactttgtcctcctgctcacctacgtcctcttcttgatggcgctgaccttcctcatgtcctccttcaccttctgtggttccttcacgggctggaagagacatggggcccacatctacctcacgatgctcctctccattgccatctgggtggcctggatcaccctgctcatgcttcctgactttgaccgcaggtgggatgacaccatcctcagctccgccttggctgccaatggctgggtgttcctgttggcttatgttagtcccgagttttggctgctcacaaagcaacgaaaccccatggattatcctgttgaggatgctttctgtaaacctcaactcgtgaagaagagctatggtgtggagaacagagcctactctcaagaggaaatcactcaaggtacagatgcagcctggctaggcagagaatcccttgtagaaaggtgggggagaatcataggatattataactgtaaggaacatgcaagattttccagattatacccttgatagaatagataagttccttaaggctcagatcttgcttaaagtcgtccagcctgttagagacaagtagaacacgaagctggcctctggagtctttattgagtactttgtacaattggtgtagactgggagagccctcctcacttcccctttcttgtgctgtaatttcctgtggggcagaacacctcagaggtttctgtgcatcaaaataagatgcagcaaagacatggaaaaaggataacgagacaaattcccagcaataagtagatgaggttgtgttttttataaaagataacgaggcattccttccagaaatgtggagcctttgtagatttcagtgcataaaaccaagccatgatttcctgcagtgatcacagagcagagaagggagaaagcccttttatcacaaaccagcaggaagtctctgtaaaattggtaaggattctggtttagtgtgaagaaccacattttttgtgtatgtttctgggcccatgggaaggaacagatcatatttgacatacaagaatcaaatgattcaggccaggcatggtggctcactcctgtaatcctagccctctgggaggctgaggtgggaggattgcttgagcccagaagtttgagaccagcttgggcaaaatagcaagacttcatctctatttaaaaaaaaaaaaaaaaaaaaaaaaagaatcaagtgattttgctcttatctggagttgagacaagccagatgttctcgtgttgttttcataagcaaaagaggctaaactgatggccagaaagtactcctgctcatagggacctattcattggtctccagggtttacactgacctttaagtctaatcacagggggtgggtggttttgggataggaatgaggaacctccaaggccatgttcttagctccagctaaaaataggtctttcctttgctcttaagcctgaggtgtggaacttcctggtgctactcactgcagctatggtccctgtctagggcacttggaagtctgaagggaggcggaggagggcaggaggggttatttaaccacccagcccctcctgtccgttccgtggcttcactccatcacctcactcctgtacttcctgttctcattcactgatgagtcttccttccttcattcatttcaagggccactgtcagctttctcccttaaaatgcttctctggcctccatgctttgctgctcactttcctccctgggtcccctgagccaccccatcccatcaaatccttcctgagcccttccacagttggaaccaacaacctctgaagctttgctcgcagtccagatgaaccaagtcgctgtgctttcctgcctgtgcctgtgctccaggtgtgtctgtcctctgcctggtgtgaccatctccctcttctgcccttctccaggatcaggcattccccagtttcccctggtaatcactccaccctgtgcatctgtaggactttgaaatgctcttatcagggtctgtctcattgcactgttatttatgtacctgtcatatgttccttactctccagtgtcagctgcaaggagggatcattctggttaatctttatgtgcttcaccatctctctcttttttttttttttttgagacagagtctcgctctgtcacccaggctggagtgcagggacataatcttggctcgccacaagctctgcctcccaggttcaagcaattctcctgcctcagcctcccgagtagctgggattacagacgtgcaccattatgcccaactaatttttttgtgtttttagtagagacggggtttcaccatcttggccaggctggtctcgaactcctgacctcatgatccgcccgcctaggccttccaaagtgctgggattacaggcatgagccaccgtgcccagccacgatctcttaaataaaggcgtttaagtgtttgttcagcaaattgggcccataaatttggtgggaaataaatgaattgctttgaactgcattcatgatgattgcatgtgtttatccttgtttcccaagcctttggttttccccaaatacacagaaaacagttgctcatcaatcctgcctcttcccaatgaaaatgatacaaatatatacatattttccttgtcaggcagttgaaataggtaaatccccagtgagattcactctaggtacacccctggccagatctatatctgaaatgactggtttttatgactttttcttttttttttttttgtttgagacagagtcttgttctgtcgcccaggctggagtgcagtggtgcgatctcggctcactgcaagctccacctcctgggttcacaccattctcctgcctcagcctcccgagtagctgggactacaggtgcccgccaccacgcctggctaattttttgtatttttaatagagatggggtttcaccttgttagccaggatggtctcgatctcctgaccttgtgatctgcccacctcggccgcccaaagttctgggattacaggcgtgagccaccatgcccagcccatgacttttcaaatgtgcttttgaagtggtcctaggatgaggtggggctctggtgaagttctgaaaaggggcgtccctagtcatcatagttattcattcattcaaccaatattgtgtttgctttgtgcctggtcctaggcttgaggacctagtctctgtccctccaagaaacttaaggtctgctggagagacaggcaattaaatgggcaagatgtcacactgtgataagtgatacaatggggtgaacataggtgggggccccagtggtttaatttctcctgttcctccatttcaggttttgaagagacaggggacacgctctatgccccctattccacacattttcagctgcaggtaagtgatttttttctccctcttcatcaaaggcattagcacctcaggaacactgatcctttggaaacagacgatgttacctttctcatggcccctagatggccacttgaaggaatgatgggtcttctttcctctaagcggcctcacggggttagtgggtaagaatgagtgcttggcatagagaggacttgggggtgggaggcctgggagaaagggaaggaaatgagacttctgcccagactggagacctgttgaaatggcaggaactggagtgggtttcacgatatgactgtttccttttcagaaccagcctccccaaaaggaattctccatcccacgggcccacgcttggccgagcccttacaaagactatgaagtaaagaaagagggcagctaactctgtcctgaagagtgggacaaatgcagccgggcggcagatctagcgggagctcaaagggatgtgggcgaaatcttgagtcttctgagaaaactgtacaagacactacgggaacagtttgcctccctcccagcctcaaccacaattcttccatgctggggctgatgtgggctagtaagactccagttcttagaggcgctgtagtatttttttttttttgtctcatcctttggatacttcttttaagtgggagtctcaggcaactcaagtttagacccttactctttttgtttgttttttgaaacaggatcttgctctgtcacccaggcttgagtgcagtggtgcgatcacagcccagtgcagcctcgaccacctgtgctcaagcaatcctcccatctccatctcccaaagtgctgggatgacaggcgtgagccacagctcccagcctaggcccttaatcttgctgttattttccatggactaaaggtctggtcatctgagctcacgctggctcacacagctctaggggcctgctcctctaactcacagtgggttttgtgaggctctgtggcccagagcagacctgcatatctgagcaaaaatagcaaaagcctctctcagcccactggcctgaatctacactggaagccaacttgctggcacccccgctccccaacccttcttgcctgggtaggagaggctaaagatcaccctaaatttactcatctctctagtgctgcctcacattgggcctcagcagctccccagcaccaattcacaggtcacccctctcttcttgcactgtccccaaacttgctgtcaattccgagatctaatctccccctacgctctgccaggaattctttcagacctcactagcacaagcccggttgctccttgtcaggagaatttgtagatcattctcacttcaaattcctggggctgatacttctctcatcttgcaccccaacctctgtaaatagatttaccgcatttacggctgcattctgtaagtgggcatggtctcctaatggaggagtgttcattgtataataagttattcacctgagtatgcaataaagatgtggtggccactctttcatggtggtggcagcagttaccagtaa

SEQ ID NO: 10046 - DNA, 1752 bp, Homo sapiens
ggtccagaatggctacaacagtccctgatggttgccgcaatggcctgaaatccaagtactacagactttgtgataaggctgaagcttggggcatcgtcctagaaacggtggccacagccggggttgtgacctcggtggccttcatgctcactctcccgatcctcgtctgcaaggtgcaggactccaacaggcgaaaaatgctgcctactcagtttctcttcctcctgggtgtgttgggcatctttggcctcaccttcgccttcatcatcggactggacgggagcacagggcccacacgcttcttcctctttgggatcctcttttccatctgcttctcctgcctgctggctcatgctgtcggtctgaccaagctcgtccgggggaggaagcccctttccctgttggtgattctgggtctggccgtgggcttcagcctagtccaggatgttatcgctattgaatatattgtcctgaccatgaataggaccaacgtcaatgtcttttctgagctttccgctcctcgtcgcaatgaagactttgtcctcctgctcacctacgtcctcttcttgatggcgctgaccttcctcatgtcctccttcaccttctgtggttccttcacgggctggaagagacatggggcccacatctacctcacgatgctcctctccattgccatctgggtggcctggatcaccctgctcatgcttcctgactttgaccgcaggtgggatgacaccatcctcagctccgccttggctgccaatggctgggtgttcctgttggcttatgttagtcccgagttttggctgctcacaaagcaacgaaaccccatggattatcctgttgaggatgctttctgtaaacctcaactcgtgaagaagagctatggtgtggagaacagagcctactctcaagaggaaatcactcaaggtacagatgcagcctggctaggcagagaatcccttgtagaaaggtgggggagaatcataggatattataactgtaaggaacatgcaagattttccagattatacccttgatagaatagataagttccttaaggctcagatcttgcttaaagtcgtccagcctgttagagacaagtagaacacgaagctggcctctggagtctttattgagtactttgtacaattcgtgtagactgggagagccctcctcacttcccctttcttgtgctgtaatttcctgtggggcagaacacctcagaggtttctgtgcatcaaaataagatgcagcaaagacatggaaaaaggataacgagacaaattcccagcaataagtagatgaggttgtgttttttataaaagataacgaggcattccttccagaaatgtggagcctttgtagatttcagtgcataaaaccaagccatgatttcctgcagtgatcccacagcagagaagggagaaagcccttttatcacaaaccagcaggaagtctctgtaaaattggtaaggattctggtttagtgtgaagaaccacattttttgtgtatgtttctgggcccatgggaaggaacagatcatatttgacatacaagaatcaaatgattcaggccaggcatggtggctcactcctgtaatcctagccctctgggaggctgaggtgggaggattgcttgagcccagaagtttgagaccagcttgggcaaaatagcaagacttcatctctatttaaaaaaaaaaaaaaaaaaaaaaaaaaaatcaagtgattttgctcttatctggagtt

SEQ ID NO: 10047 - DNA, 5425 bp, Homo sapiens
ggtccagaatggctacaacagtccctgatggttgccgcaatggcctgaaatccaagtactacagactttgtgataaggctgaagcttggggcatcgtcctagaaacggtggccacagccggggttgtgacctcggtggccttcatgctcactctcccgatcctcgtctgcaaggtgcaggactccaacaggcgaaaaatgctgcctactcagtttctcttcctcctgggtgtgttgggcatctttggcctcaccttcgccttcatcatcggactggacgggagcacagggcccacacgcttcttcctctttgggatcctcttttccatctgcttctcctgcctgctggctcatgctgtcagtctgaccaagctcgtccgggggaggaagcccctttccctgttggtgattctgggtctggccgtgggcttcagcctagtccaggatgttatcgctattgaatatattgtcctgaccatgaataggaccaacgtcaatgtcttttctgagctttccgctcctcgtcgcaatgaagactttgtcctcctgctcacctacgtcctcttcttgatggcgctgaccttcctcatgtcctccttcaccttctgtggttccttcacgggctggaagagacatggggcccacatctacctcacgatgctcctctccattgccatctgggtggcctggatcaccctgctcatgcttcctgactttgaccgcaggtgggatgacaccatcctcagctccgccttggctgccaatggctgggtgttcctgttggcttatgttagtcccgagttttggctgctcacaaagcaacgaaaccccatggattatcctgttgaggatgctttctgtaaacctcaactcgtgaagaagagctatggtgtggagaacagagcctactctcaagaggaaatcactcaaggtacagatgcagcctggctaggcagagaatcccttgtagaaaggtgggggagaatcataggatattataactgtaaggaacatgcaagattttccagattatacccttgatagaatagataagttccttaaggctcagatcttgcttaaagtcgtccagcctgttagagacaagtagaacacgaagctggcctctggagtctttattgagtactttgtacaattggtgtagactgggagagccctcctcacttcccctttcttgtgctgtaatttcctgtggggcagaacacctcagaggtttctgtgcatcaaaataagatgcagcaaagacatggaaaaaggataacgagacaaattcccagcaataagtagatgaggttgtgttttttataaaagataacgaggcattccttccagaaatgtggagcctttgtagatttcagtgcataaaaccaagccatgatttcctgcagtgatcacagagcagagaagggagaaagcccttttatcacaaaccagcaggaagtctctgtaaaattggtaaggattctggtttagtgtgaagaaccacattttttgtgtatgtttctgggcccatgggaaggaacagatcatatttgacatacaagaatcaaatgattcaggccaggcatggtggctcactcctgtaatcctagccctctgggaggctgaggtgggaggattgcttgagcccagaagtttgagaccagcttgggcaaaatagcaagacttcatctctatttaaaaaaaaaaaaaaaaaaaaaaaaagaatcaagtgattttgctcttatctggagttgagacaagccagatgttctcgtgttgttttcataagcaaaagaggctaaactgatggccagaaagtactcctgctcatagggacctattcattggtctccagggtttacactgacctttaagtctaatcacagggggtgggtggttttgggataggaatgaggaacctccaaggccatgttcttagctccagctaaaaataggtctttcctttgctcttaagcctgaggtgtggaacttcctggtgctactcactgcagctatggtccctgtctagggcacttggaagtctgaagggaggcggaggagggcaggaggggttatttaaccacccagcccctcctgtccgttccgtggcttcactccatcacctcactcctgtacttcctgttctcattcactgatgagtcttccttccttcattcatttcaagggccactgtcagctttctcccttaaaatgcttctctggcctccatgctttgctgctcactttcctccctgggtcccctgagccaccccatcccatcaaatccttcctgagcccttccacagttggaaccaacaacctctgaagctttgctcgcagtccagatgaaccaagtcgctgtgctttcctgcctgtgcctgtgctccaggtgtgtctgtcctctgcctggtgtgaccatctccctcttctgcccttctccaggatcaggcattccccagtttcccctggtaatcactccaccctgtgcatctgtaggactttgaaatgctcttatcagggtctgtctcattgcactgttatttatgtacctgtcatatgttccttactctccagtgtcagctgcaaggagggatcattctggttaatctttatgtgcttcaccatctctctcttttttttttttttttgagacagagtctcgctctgtcacccaggctggagtgcagggacataatcttggctcgccacaagctctgcctcccaggttcaagcaattctcctgcctcagcctcccgagtagctgggattacagacgtgcaccattatgcccaactaatttttttgtgtttttagtagagacggggtttcaccatcttggccaggctggtctcgaactcctgacctcatgatccgcccgcctaggccttccaaagtgctgggattacaggcatgagccaccgtgcccagccacgatctcttaaataaaggcgtttaagtgtttgttcagcaaattgggcccataaatttggtgggaaataaatgaattgctttgaactgcattcatgatgattgcatgtgtttatccttgtttcccaagcctttggttttccccaaatacacagaaaacagttgctcatcaatcctgcctcttcccaatgaaaatgatacaaatatatacatattttccttgtcaggcagttgaaataggtaaatccccagtgagattcactctaggtacacccctggccagatctatatctgaaatgactggtttttatgactttttcttttttttttttttgtttgagacagagtcttgttctgtcgcccaggctggagtgcagtggtgcgatctcggctcactgcaagctccacctcctgggttcacaccattctcctgcctcagcctcccgagtagctgggactacaggtgcccgccaccacgcctggctaattttttgtatttttaatagagatggggtttcaccttgttagccaggatggtctcgatctcctgaccttgtgatctgcccacctcggccgcccaaagttctgggattacaggcgtgagccaccatgcccagcccatgacttttcaaatgtgcttttgaagtggtcctaggatgaggtggggctctggtgaagttctgaaaaggggcgtccctagtcatcatagttattcattcattcaaccaatattgtgtttgctttgtgcctggtcctaggcttgaggacctagtctctgtccctccaagaaacttaaggtctgctggagagacaggcaattaaatgggcaagatgtcacactgtgataagtgatacaatggggtgaacataggtgggggccccagtggtttaatttctcctgttcctccatttcaggttttgaagagacaggggacacgctctatgccccctattccacacattttcagctgcaggtaagtgatttttttctccctcttcatcaaaggcattagcacctcaggaacactgatcctttggaaacagacgatgttacctttctcatggcccctagatggccacttgaaggaatgatgggtcttctttcctctaagcggcctcacggggttagtgggtaagaatgagtgcttggcatagagaggacttgggggtgggaggcctgggagaaagggaaggaaatgagacttctgcccagactggagacctgttgaaatggcaggaactggagtgggtttcacgatatgactgtttccttttcagaaccagcctccccaaaaggaattctccatcccacgggcccacgcttggccgagcccttacaaagactatgaagtaaagaaagagggcagctaactctgtcctgaagagtgggacaaatgcagccgggcggcagatctagcgggagctcaaagggatgtgggcgaaatcttgagtcttctgagaaaactgtacaagacactacgggaacagtttgcctccctcccagcctcaaccacaattcttccatgctggggctgatgtgggctagtaagactccagttcttagaggcgctgtagtatttttttttttttgtctcatcctttggatacttcttttaagtgggagtctcaggcaactcaagtttagacccttactctttttgtttgttttttgaaacaggatcttgctctgtcacccaggcttgagtgcagtggtgcgatcacagcccagtgcagcctcgaccacctgtgctcaagcaatcctcccatctccatctcccaaagtgctgggatgacaggcgtgagccacagctcccagcctaggcccttaatcttgctgttattttccatggactaaaggtctggtcatctgagctcacgctggctcacacagctctaggggcctgctcctctaactcacagtgggttttgtgaggctctgtggcccagagcagacctgcatatctgagcaaaaatagcaaaagcctctctcagcccactggcctgaatctacactggaagccaacttgctggcacccccgctccccaacccttcttgcctgggtaggagaggctaaagatcaccctaaatttactcatctctctagtgctgcctcacattgggcctcagcagctccccagcaccaattcacaggtcacccctctcttcttgcactgtccccaaacttgctgtcaattccgagatctaatctccccctacgctctgccaggaattctttcagacctcactagcacaagcccggttgctccttgtcaggagaatttgtagatcattctcacttcaaattcctggggctgatacttctctcatcttgcaccccaacctctgtaaatagatttaccgcatttacggctgcattctgtaagtgggcatggtctcctaatggaggagtgttcattgtataataagttattcacctgagtatgcaataaagatgtggtggccactctttcatggtggtggcagcagttaccagtaa

SEQ ID NO: 10048 - DNA, 776 bp, Homo sapiens
ctgagagcttcatgttggagctgaagttcaaggttcacttcctttgggtttgtacttgacccttcttcatgtgtctctcccgttccctctaaaacaagtgtgtttcccctcatttttgaggctgtcaatggtgtgagagccaggatcatcacggggcctgaggttttactccagaaaagcagaggagtggcaaccttggcttggggtttggcagcccaggaaaggcagggaggagagctcaaagccggtttcatgtttcacccaaggtctaattgtgggagaggacaaatccagatcccctgtttgacagaattagttcacaaatgtctcttggcaaaaacatgtgacacctaaccatgataattgacttaatccaagaaagagctctgtagggcagagcaataggaaatctctctttcgttatggaaaaaaaataatccctctacatagaaactgagtgacatgtaaaaatgtgtagctaagtcagggagttacttcctaagagcctgacgctctgcttttcatcaaaaggaaaaaccagcgtgaggcagaggcgagggaggtggaggtgagtggatgatgtgctgagttagggatgtttatatgccgcaaaggtttggttggtaggcttcgcgctaagattagcctggctttgtactgaaaagggggaaggacacatagtgacacagatccttctggtctttcccaggaggtgtgacctaatgaggtttgttgtgagaataaagcaatgtggtttcacatatattatctatcat

SEQ ID NO: 10049 - DNA, 89 bp, Homo sapiens
ggaggcggagcttgcagtgagccgagatcgtgccactgcactccagcctgggcgacagagcgagactctgtctcaaaaaaaaaaaaaaa

SEQ ID NO: 10050 - DNA, 129 bp, Homo sapiens
gctactctggaggctgaggcaggagaatcacttgagcccgggaggcggagcttgcagtgagccgagatcgtgccactgcactccagcctgggcgacagagcgagactctgtctcaaaaaaaaaaaaaaa

SEQ ID NO: 10051 - DNA, 160 bp, Homo sapiens
ccgggcatggtggcacatgcctgtagtaccagctactctggaggctgaggcaggagaatcacttgagcccgggaggcggagcttgcagtgagccgagatcgtgccactgcactccagcctgggcgacagagcgagactctgtctcaaaaaaaaaaaaaaa

SEQ ID NO: 10052 - DNA, 776 bp, Homo sapiens; identical to SEQ ID NO: 10048

SEQ ID NO: 10053 - DNA, 185 bp, Homo sapiens
cccaggctggagtgcagtggtgcgatctcggctcactgcacgctctgcctcccgggttccagcgactctcctgcctcagcctcccgagtagctgggactacaggtgcccaccaccacgcccagccaactttttgtatttttagtagagacggggtttcaccgtgttagccaggatggtctcgatc

SEQ ID NO: 10054 - DNA, 242 bp, Homo sapiens
gcctttttttttttttttttttgagacggagtctcgctgtcgcccaggctggagtgcagtggcgcaatctcggctcactgcaggctccgccccctggggttcacgccattctcctgcctcagcctcccgagtagctgggactacaggcgcccgccacctcgcccggctaattttttgtatttttagtagagacggggtttcaccgtgttagccaggatggtctcgatctcctgacctcgtga

SEQ ID NO: 10055 - DNA, 38771 bp, Homo sapiens; identical to SEQ ID NO: 7638
  SITE (29356): n equals a,t,g, or c
  SITE (29357): n equals a,t,g, or c
  SITE (29358): n equals a,t,g, or c
  SITE (29359): n equals a,t,g, or c
  SITE (29360): n equals a,t,g, or c
  SITE (29361): n equals a,t,g, or c
  SITE (29362): n equals a,t,g, or c
  SITE (29363): n equals a,t,g, or c
  SITE (29364): n equals a,t,g, or c
  SITE (29365): n equals a,t,g, or c
  SITE (29366): n equals a,t,g, or c
  SITE (29367): n equals a,t,g, or c
  SITE (29368): n equals a,t,g, or c
  SITE (29369): n equals a,t,g, or c
  SITE (29370): n equals a,t,g, or c
  SITE (29371): n equals a,t,g, or c
  SITE (29372): n equals a,t,g, or c
  SITE (29373): n equals a,t,g, or c
  SITE (29374): n equals a,t,g, or c
  SITE (29375): n equals a,t,g, or c
  SITE (29376): n equals a,t,g, or c
  SITE (29377): n equals a,t,g, or c
  SITE (29378): n equals a,t,g, or c
  SITE (29379): n equals a,t,g, or c
  SITE (29380): n equals a,t,g, or c
  SITE (29381): n equals a,t,g, or c
  SITE (29382): n equals a,t,g, or c
  SITE (29383): n equals a,t,g, or c
  SITE (29384): n equals a,t,g, or c
  SITE (29385): n equals a,t,g, or c
  SITE (29386): n equals a,t,g, or c
  SITE (29387): n equals a,t,g, or c
  SITE (29388): n equals a,t,g, or c
  SITE (29389): n equals a,t,g, or c
  SITE (29390): n equals a,t,g, or c
  SITE (29391): n equals a,t,g, or c
  SITE (29392): n equals a,t,g, or c
  SITE (29393): n equals a,t,g, or c
  SITE (29394): n equals a,t,g, or c
  SITE (29395): n equals a,t,g, or c
  SITE (29396): n equals a,t,g, or c
  SITE (29397): n equals a,t,g, or c
  SITE (29398): n equals a,t,g, or c
  SITE (29399): n equals a,t,g, or c
  SITE (29400): n equals a,t,g, or c
  SITE (29401): n equals a,t,g, or c
  SITE (29402): n equals a,t,g, or c
  SITE (29403): n equals a,t,g, or c
  SITE (29404): n equals a,t,g, or c
  SITE (29405): n equals a,t,g, or c
  SITE (29406): n equals a,t,g, or c
  SITE (29407): n equals a,t,g, or c
  SITE (29408): n equals a,t,g, or c
  SITE (29409): n equals a,t,g, or c
  SITE (29410): n equals a,t,g, or c
  SITE (29411): n equals a,t,g, or c
  SITE (29412): n equals a,t,g, or c
  SITE (29413): n equals a,t,g, or c
  SITE (29414): n equals a,t,g, or c
  SITE (29415): n equals a,t,g, or c
  SITE (29416): n equals a,t,g, or c
  SITE (29417): n equals a,t,g, or c
  SITE (29418): n equals a,t,g, or c
  SITE (29419): n equals a,t,g, or c
  SITE (29420): n equals a,t,g, or c
  SITE (29421): n equals a,t,g, or c
  SITE (29422): n equals a,t,g, or c
  SITE (29423): n equals a,t,g, or c
  SITE (29424): n equals a,t,g, or c
  SITE (29425): n equals a,t,g, or c
  SITE (29426): n equals a,t,g, or c
  SITE (29427): n equals a,t,g, or c
  SITE (29428): n equals a,t,g, or c
  SITE (29429): n equals a,t,g, or c
  SITE (29430): n equals a,t,g, or c
  SITE (29431): n equals a,t,g, or c
  SITE (29432): n equals a,t,g, or c
  SITE (29433): n equals a,t,g, or c
  SITE (29434): n equals a,t,g, or c
  SITE (29435): n equals a,t,g, or c
  SITE (29436): n equals a,t,g, or c
  SITE (29437): n equals a,t,g, or c
  SITE (29438): n equals a,t,g, or c
  SITE (29439): n equals a,t,g, or c
  SITE (29440): n equals a,t,g, or c
  SITE (29441): n equals a,t,g, or c
  SITE (29442): n equals a,t,g, or c
  SITE (29443): n equals a,t,g, or c
  SITE (29444): n equals a,t,g, or c
  SITE (29445): n equals a,t,g, or c
  SITE (29446): n equals a,t,g, or c
  SITE (29447): n equals a,t,g, or c
  SITE (29448): n equals a,t,g, or c
  SITE (29449): n equals a,t,g, or c
  SITE (29450): n equals a,t,g, or c
  SITE (29451): n equals a,t,g, or c
  SITE (29452): n equals a,t,g, or c
  SITE (29453): n equals a,t,g, or c
  SITE (29454): n equals a,t,g, or c
  SITE (29455): n equals a,t,g, or c
  SITE (29456): n equals a,t,g, or c
  SITE (29457): n equals a,t,g, or c
  SITE (29458): n equals a,t,g, or c
  SITE (29459): n equals a,t,g, or c
  SITE (29460): n equals a,t,g, or c
  SITE (29461): n equals a,t,g, or c
  SITE (29462): n equals a,t,g, or c
  SITE (29463): n equals a,t,g, or c
  SITE (29464): n equals a,t,g, or c
  SITE (29465): n equals a,t,g, or c
  SITE (29466): n equals a,t,g, or c
  SITE (29467): n equals a,t,g, or c
  SITE (29468): n equals a,t,g, or c
  SITE (29469): n equals a,t,g, or c
  SITE (29470): n equals a,t,g, or c
  SITE (29471): n equals a,t,g, or c
  SITE (29472): n equals a,t,g, or c
  SITE (29473): n equals a,t,g, or c
  SITE (29474): n equals a,t,g, or c
  SITE (29475): n equals a,t,g, or c
  SITE (29476): n equals a,t,g, or c
  SITE (29477): n equals a,t,g, or c
  SITE (29478): n equals a,t,g, or c
  SITE (29479): n equals a,t,g, or c
  SITE (29480): n equals a,t,g, or c
  SITE (29481): n equals a,t,g, or c
  SITE (29482): n equals a,t,g, or c
  SITE (29483): n equals a,t,g, or c
  SITE (29484): n equals a,t,g, or c
  SITE (29485): n equals a,t,g, or c
  SITE (29486): n equals a,t,g, or c
  SITE (29487): n equals a,t,g, or c
  SITE (29488): n equals a,t,g, or c
  SITE (29489): n equals a,t,g, or c
  SITE (29490): n equals a,t,g, or c
  SITE (29491): n equals a,t,g, or c
  SITE (29492): n equals a,t,g, or c
  SITE (29493): n equals a,t,g, or c
  SITE (29494): n equals a,t,g, or c
  SITE (29495): n equals a,t,g, or c
  SITE (29496): n equals a,t,g, or c
  SITE (29497): n equals a,t,g, or c
  SITE (29498): n equals a,t,g, or c
  SITE (29499): n equals a,t,g, or c
  SITE (29500): n equals a,t,g, or c
  SITE (29501): n equals a,t,g, or c
  SITE (29502): n equals a,t,g, or c
  SITE (29503): n equals a,t,g, or c
  SITE (29504): n equals a,t,g, or c
  SITE (29505): n equals a,t,g, or c
  SITE (29506): n equals a,t,g, or c
  SITE (29507): n equals a,t,g, or c
  SITE (29508): n equals a,t,g, or c
  SITE (29509): n equals a,t,g, or c
  SITE (29510): n equals a,t,g, or c
  SITE (29511): n equals a,t,g, or c
  SITE (29512): n equals a,t,g, or c
  SITE (29513): n equals a,t,g, or c
  SITE (29514): n equals a,t,g, or c
  SITE (29515): n equals a,t,g, or c
  SITE (29516): n equals a,t,g, or c
  SITE (29517): n equals a,t,g, or c
  SITE (29518): n equals a,t,g, or c
  SITE (29519): n equals a,t,g, or c
  SITE (29520): n equals a,t,g, or c
  SITE (29521): n equals a,t,g, or c
  SITE (29522): n equals a,t,g, or c
  SITE (29523): n equals a,t,g, or c
  SITE (29524): n equals a,t,g, or c
  SITE (29525): n equals a,t,g, or c
  SITE (29526): n equals a,t,g, or c
  SITE (29527): n equals a,t,g, or c
  SITE (29528): n equals a,t,g, or c
  SITE (29529): n equals a,t,g, or c
  SITE (29530): n equals a,t,g, or c
  SITE (29531): n equals a,t,g, or c
  SITE (29532): n equals a,t,g, or c
  SITE (29533): n equals a,t,g, or c
  SITE (29534): n equals a,t,g, or c
  SITE (29535): n equals a,t,g, or c
  SITE (29536): n equals a,t,g, or c
  SITE (29537): n equals a,t,g, or c
  SITE (29538): n equals a,t,g, or c
  SITE (29539): n equals a,t,g, or c
  SITE (29540): n equals a,t,g, or c
  SITE (29541): n equals a,t,g, or c
  SITE (29542): n equals a,t,g, or c
  SITE (29543): n equals a,t,g, or c
  SITE (29544): n equals a,t,g, or c
  SITE (29545): n equals a,t,g, or c
  SITE (29546): n equals a,t,g, or c
  SITE (29547): n equals a,t,g, or c
  SITE (29548): n equals a,t,g, or c
  SITE (29549): n equals a,t,g, or c
  SITE (29550): n equals a,t,g, or c
  SITE (29551): n equals a,t,g, or c
  SITE (29552): n equals a,t,g, or c
  SITE (29553): n equals a,t,g, or c
  SITE (29554): n equals a,t,g, or c
  SITE (29555): n equals a,t,g, or c
  SITE (29556): n equals a,t,g, or c
  SITE (29557): n equals a,t,g, or c
  SITE (29558): n equals a,t,g, or c
  SITE (29559): n equals a,t,g, or c
  SITE (29560): n equals a,t,g, or c
  SITE (29561): n equals a,t,g, or c
  SITE (29562): n equals a,t,g, or c
  SITE (29563): n equals a,t,g, or c
  SITE (29564): n equals a,t,g, or c
  SITE (29565): n equals a,t,g, or c
  SITE (29566): n equals a,t,g, or c
  SITE (29567): n equals a,t,g, or c
  SITE (29568): n equals a,t,g, or c
  SITE (29569): n equals a,t,g, or c
  SITE (29570): n equals a,t,g, or c
  SITE (29571): n equals a,t,g, or c
  SITE (29572): n equals a,t,g, or c
  SITE (29573): n equals a,t,g, or c
  SITE (29574): n equals a,t,g, or c
  SITE (29575): n equals a,t,g, or c
  SITE (29576): n equals a,t,g, or c
  SITE (29577): n equals a,t,g, or c
  SITE (29578): n equals a,t,g, or c
  SITE (29579): n equals a,t,g, or c
  SITE (29580): n equals a,t,g, or c
  SITE (29581): n equals a,t,g, or c
  SITE (29582): n equals a,t,g, or c
  SITE (29583): n equals a,t,g, or c
  SITE (29584): n equals a,t,g, or c
  SITE (29585): n equals a,t,g, or c
  SITE (29586): n equals a,t,g, or c
  SITE (29587): n equals a,t,g, or c
  SITE (29588): n equals a,t,g, or c
  SITE (29589): n equals a,t,g, or c
  SITE (29590): n equals a,t,g, or c
  SITE (29591): n equals a,t,g, or c
  SITE (29592): n equals a,t,g, or c
  SITE (29593): n equals a,t,g, or c
  SITE (29594): n equals a,t,g, or c
  SITE (29595): n equals a,t,g, or c
  SITE (29596): n equals a,t,g, or c
  SITE (29597): n equals a,t,g, or c
  SITE (29598): n equals a,t,g, or c
  SITE (29599): n equals a,t,g, or c
  SITE (29600): n equals a,t,g, or c
  SITE (29601): n equals a,t,g, or c
  SITE (29602): n equals a,t,g, or c
  SITE (29603): n equals a,t,g, or c
  SITE (29604): n equals a,t,g, or c
  SITE (29605): n equals a,t,g, or c
  SITE (29606): n equals a,t,g, or c
  SITE (29607): n equals a,t,g, or c
  SITE (29608): n equals a,t,g, or c
  SITE (29609): n equals a,t,g, or c
  SITE (29610): n equals a,t,g, or c
  SITE (29611): n equals a,t,g, or c
  SITE (29612): n equals a,t,g, or c
  SITE (29613): n equals a,t,g, or c
  SITE (29614): n equals a,t,g, or c
  SITE (29615): n equals a,t,g, or c
  SITE (29616): n equals a,t,g, or c
  SITE (29617): n equals a,t,g, or c
  SITE (29618): n equals a,t,g, or c
  SITE (29619): n equals a,t,g, or c
  SITE (29620): n equals a,t,g, or c
  SITE (29621): n equals a,t,g, or c
  SITE (29622): n equals a,t,g, or c
  SITE (29623): n equals a,t,g, or c
  SITE (29624): n equals a,t,g, or c
  SITE (29625): n equals a,t,g, or c
  SITE (29626): n equals a,t,g, or c
  SITE (29627): n equals a,t,g, or c
  SITE (29628): n equals a,t,g, or c
  SITE (29629): n equals a,t,g, or c
  SITE (29630): n equals a,t,g, or c
  SITE (29631): n equals a,t,g, or c
  SITE (29632): n equals a,t,g, or c
  SITE (29633): n equals a,t,g, or c
  SITE (29634): n equals a,t,g, or c
  SITE (29635): n equals a,t,g, or c
  SITE (29636): n equals a,t,g, or c
  SITE (29637): n equals a,t,g, or c
  SITE (29638): n equals a,t,g, or c
  SITE (29639): n equals a,t,g, or c
  SITE (29640): n equals a,t,g, or c
  SITE (29641): n equals a,t,g, or c
  SITE (29642): n equals a,t,g, or c
  SITE (29643): n equals a,t,g, or c
  SITE (29644): n equals a,t,g, or c
  SITE (29645): n equals a,t,g, or c
  SITE (29646): n equals a,t,g, or c
  SITE (29647): n equals a,t,g, or c
  SITE (29648): n equals a,t,g, or c
  SITE (29649): n equals a,t,g, or c
  SITE (29650): n equals a,t,g, or c
  SITE (29651): n equals a,t,g, or c
  SITE (29652): n equals a,t,g, or c
  SITE (29653): n equals a,t,g, or c
  SITE (29654): n equals a,t,g, or c
  SITE (29655): n equals a,t,g, or c
  SITE (29656): n equals a,t,g, or c
  SITE (29657): n equals a,t,g, or c
  SITE (29658): n equals a,t,g, or c
  SITE (29659): n equals a,t,g, or c
  SITE (29660): n equals a,t,g, or c
  SITE (29661): n equals a,t,g, or c
  SITE (29662): n equals a,t,g, or c
  SITE (29663): n equals a,t,g, or c
  SITE (29664): n equals a,t,g, or c
  SITE (29665): n equals a,t,g, or c
  SITE (29666): n equals a,t,g, or c
  SITE (29667): n equals a,t,g, or c
  SITE (29668): n equals a,t,g, or c
  SITE (29669): n equals a,t,g, or c
  SITE (29670): n equals a,t,g, or c
  SITE (29671): n equals a,t,g, or c
  SITE (29672): n equals a,t,g, or c
  SITE (29673): n equals a,t,g, or c
  SITE (29674): n equals a,t,g, or c
  SITE (29675): n equals a,t,g, or c
  SITE (29676): n equals a,t,g, or c
  SITE (29677): n equals a,t,g, or c
  SITE (29678): n equals a,t,g, or c
  SITE (29679): n equals a,t,g, or c
  SITE (29680): n equals a,t,g, or c
  SITE (29681): n equals a,t,g, or c
  SITE (29682): n equals a,t,g, or c
  SITE (29683): n equals a,t,g, or c
  SITE (29684): n equals a,t,g, or c
  SITE (29685): n equals a,t,g, or c
  SITE (29686): n equals a,t,g, or c
  SITE (29687): n equals a,t,g, or c
  SITE (29688): n equals a,t,g, or c
  SITE (29689): n equals a,t,g, or c
  SITE (29690): n equals a,t,g, or c
  SITE (29691): n equals a,t,g, or c
  SITE (29692): n equals a,t,g, or c
  SITE (29693): n equals a,t,g, or c
  SITE (29694): n equals a,t,g, or c
  SITE (29695): n equals a,t,g, or c
  SITE (29696): n equals a,t,g, or c
  SITE (29697): n equals a,t,g, or c
  SITE (29698): n equals a,t,g, or c
  SITE (29699): n equals a,t,g, or c
  SITE (29700): n equals a,t,g, or c
  SITE (29701): n equals a,t,g, or c
  SITE (29702): n equals a,t,g, or c
  SITE (29703): n equals a,t,g, or c
  SITE (29704): n equals a,t,g, or c
  SITE (29705): n equals a,t,g, or c
  SITE (29706): n equals a,t,g, or c
  SITE (29707): n equals a,t,g, or c
  SITE (29708): n equals a,t,g, or c
  SITE (29709): n equals a,t,g, or c
  SITE (29710): n equals a,t,g, or c
  SITE (29711): n equals a,t,g, or c
  SITE (29712): n equals a,t,g, or c
  SITE (29713): n equals a,t,g, or c
  SITE (29714): n equals a,t,g, or c
  SITE (29715): n equals a,t,g, or c
  SITE (29716): n equals a,t,g, or c
  SITE (29717): n equals a,t,g, or c
  SITE (29718): n equals a,t,g, or c
  SITE (29719): n equals a,t,g, or c
  SITE (29720): n equals a,t,g, or c
  SITE (29721): n equals a,t,g, or c
  SITE (29722): n equals a,t,g, or c
  SITE (29723): n equals a,t,g, or c
  SITE (29724): n equals a,t,g, or c
  SITE (29725): n equals a,t,g, or c
  SITE (29726): n equals a,t,g, or c
  SITE (29727): n equals a,t,g, or c
  SITE (29728): n equals a,t,g, or c
  SITE (29729): n equals a,t,g, or c
  SITE (29730): n equals a,t,g, or c
  SITE (29731): n equals a,t,g, or c
  SITE (29732): n equals a,t,g, or c
  SITE (29733): n equals a,t,g, or c
  SITE (29734): n equals a,t,g, or c
  SITE (29735): n equals a,t,g, or c
  SITE (29736): n equals a,t,g, or c
  SITE (29737): n equals a,t,g, or c
  SITE (29738): n equals a,t,g, or c
  SITE (29739): n equals a,t,g, or c
  SITE (29740): n equals a,t,g, or c
  SITE (29741): n equals a,t,g, or c
  SITE (29742): n equals a,t,g, or c
  SITE (29743): n equals a,t,g, or c
  SITE (29744): n equals a,t,g, or c
  SITE (29745): n equals a,t,g, or c
  SITE (29746): n equals a,t,g, or c
  SITE (29747): n equals a,t,g, or c
  SITE (29748): n equals a,t,g, or c
  SITE (29749): n equals a,t,g, or c
  SITE (29750): n equals a,t,g, or c
  SITE (29751): n equals a,t,g, or c
  SITE (29752): n equals a,t,g, or c
  SITE (29753): n equals a,t,g, or c
  SITE (29754): n equals a,t,g, or c
  SITE (29755): n equals a,t,g, or c
  SITE (29756): n equals a,t,g, or c
  SITE (29757): n equals a,t,g, or c
  SITE (29758): n equals a,t,g, or c
  SITE (29759): n equals a,t,g, or c
  SITE (29760): n equals a,t,g, or c
  SITE (29761): n equals a,t,g, or c
  SITE (29762): n equals a,t,g, or c
  SITE (29763): n equals a,t,g, or c
  SITE (29764): n equals a,t,g, or c
  SITE (29765): n equals a,t,g, or c
  SITE (29766): n equals a,t,g, or c
  SITE (29767): n equals a,t,g, or c
  SITE (29768): n equals a,t,g, or c
  SITE (29769): n equals a,t,g, or c
  SITE (29770): n equals a,t,g, or c
  SITE (29771): n equals a,t,g, or c
  SITE (29772): n equals a,t,g, or c
  SITE (29773): n equals a,t,g, or c
  SITE (29774): n equals a,t,g, or c
  SITE (29775): n equals a,t,g, or c
  SITE (29776): n equals a,t,g, or c
  SITE (29777): n equals a,t,g, or c
  SITE (29778): n equals a,t,g, or c
  SITE (29779): n equals a,t,g, or c
  SITE (29780): n equals a,t,g, or c
  SITE (29781): n equals a,t,g, or c
  SITE (29782): n equals a,t,g, or c
  SITE (29783): n equals a,t,g, or c
  SITE (29784): n equals a,t,g, or c
  SITE (29785): n equals a,t,g, or c
  SITE (29786): n equals a,t,g, or c
  SITE (29787): n equals a,t,g, or c
  SITE (29788): n equals a,t,g, or c
  SITE (29789): n equals a,t,g, or c
  SITE (29790): n equals a,t,g, or c
  SITE (29791): n equals a,t,g, or c
  SITE (29792): n equals a,t,g, or c
  SITE (29793): n equals a,t,g, or c
  SITE (29794): n equals a,t,g, or c
  SITE (29795): n equals a,t,g, or c
  SITE (29796): n equals a,t,g, or c
  SITE (29797): n equals a,t,g, or c
  SITE (29798): n equals a,t,g, or c
  SITE (29799): n equals a,t,g, or c
  SITE (29800): n equals a,t,g, or c
  SITE (29801): n equals a,t,g, or c
  SITE (29802): n equals a,t,g, or c
  SITE (29803): n equals a,t,g, or c
  SITE (29804): n equals a,t,g, or c
  SITE (29805): n equals a,t,g, or c
  SITE (29806): n equals a,t,g, or c
  SITE (29807): n equals a,t,g, or c
  SITE (29808): n equals a,t,g, or c
  SITE (29809): n equals a,t,g, or c
  SITE (29810): n equals a,t,g, or c
  SITE (29811): n equals a,t,g, or c
  SITE (29812): n equals a,t,g, or c
  SITE (29813): n equals a,t,g, or c
  SITE (29814): n equals a,t,g, or c
  SITE (29815): n equals a,t,g, or c
  SITE (29816): n equals a,t,g, or c
  SITE (29817): n equals a,t,g, or c
  SITE (29818): n equals a,t,g, or c
  SITE (29819): n equals a,t,g, or c
  SITE (29820): n equals a,t,g, or c
  SITE (29821): n equals a,t,g, or c
  SITE (29822): n equals a,t,g, or c
  SITE (29823): n equals a,t,g, or c
  SITE (29824): n equals a,t,g, or c
  SITE (29825): n equals a,t,g, or c
  SITE (29826): n equals a,t,g, or c
  SITE (29827): n equals a,t,g, or c
  SITE (29828): n equals a,t,g, or c
  SITE (29829): n equals a,t,g, or c
  SITE (29830): n equals a,t,g, or c
  SITE (29831): n equals a,t,g, or c
  SITE (29832): n equals a,t,g, or c
  SITE (29833): n equals a,t,g, or c
  SITE (29834): n equals a,t,g, or c
  SITE (29835): n equals a,t,g, or c
  SITE (29836): n equals a,t,g, or c
  SITE (29837): n equals a,t,g, or c
  SITE (29838): n equals a,t,g, or c
  SITE (29839): n equals a,t,g, or c
  SITE (29840): n equals a,t,g, or c
  SITE (29841): n equals a,t,g, or c
  SITE (29842): n equals a,t,g, or c
  SITE (29843): n equals a,t,g, or c
  SITE (29844): n equals a,t,g, or c
  SITE (29845): n equals a,t,g, or c
  SITE (29846): n equals a,t,g, or c
  SITE (29847): n equals a,t,g, or c
  SITE (29848): n equals a,t,g, or c
  SITE (29849): n equals a,t,g, or c
  SITE (29850): n equals a,t,g, or c
  SITE (29851): n equals a,t,g, or c
  SITE (29852): n equals a,t,g, or c
  SITE (29853): n equals a,t,g, or c
  SITE (29854): n equals a,t,g, or c
  SITE (29855): n equals a,t,g, or c
  SITE (29856): n equals a,t,g, or c
  SITE (29857): n equals a,t,g, or c
  SITE (29858): n equals a,t,g, or c
  SITE (29859): n equals a,t,g, or c
  SITE (29860): n equals a,t,g, or c
  SITE (29861): n equals a,t,g, or c
  SITE (29862): n equals a,t,g, or c
  SITE (29863): n equals a,t,g, or c
  SITE (29864): n equals a,t,g, or c
  SITE (29865): n equals a,t,g, or c
  SITE (29866): n equals a,t,g, or c
  SITE (29867): n equals a,t,g, or c
  SITE (29868): n equals a,t,g, or c
  SITE (29869): n equals a,t,g, or c
  SITE (29870): n equals a,t,g, or c
  SITE (29871): n equals a,t,g, or c
  SITE (29872): n equals a,t,g, or c
  SITE (29873): n equals a,t,g, or c
  SITE (29874): n equals a,t,g, or c
  SITE (29875): n equals a,t,g, or c
  SITE (29876): n equals a,t,g, or c
  SITE (29877): n equals a,t,g, or c
  SITE (29878): n equals a,t,g, or c
  SITE (29879): n equals a,t,g, or c
  SITE (29880): n equals a,t,g, or c
  SITE (29881): n equals a,t,g, or c
  SITE (29882): n equals a,t,g, or c
  SITE (29883): n equals a,t,g, or c
  SITE (29884): n equals a,t,g, or c
  SITE (29885): n equals a,t,g, or c
  SITE (29886): n equals a,t,g, or c
  SITE (29887): n equals a,t,g, or c
  SITE (29888): n equals a,t,g, or c
  SITE (29889): n equals a,t,g, or c
  SITE (29890): n equals a,t,g, or c
  SITE (29891): n equals a,t,g, or c
  SITE (29892): n equals a,t,g, or c
  SITE (29893): n equals a,t,g, or c
  SITE (29894): n equals a,t,g, or c
  SITE (29895): n equals a,t,g, or c
  SITE (29896): n equals a,t,g, or c
  SITE (29897): n equals a,t,g, or c
  SITE (29898): n equals a,t,g, or c
  SITE (29899): n equals a,t,g, or c
  SITE (29900): n equals a,t,g, or c
  SITE (29901): n equals a,t,g, or c
  SITE (29902): n equals a,t,g, or c
  SITE (29903): n equals a,t,g, or c
  SITE (29904): n equals a,t,g, or c
  SITE (29905): n equals a,t,g, or c
  SITE (29906): n equals a,t,g, or c
  SITE (29907): n equals a,t,g, or c
  SITE (29908): n equals a,t,g, or c
  SITE (29909): n equals a,t,g, or c
  SITE (29910): n equals a,t,g, or c
  SITE (29911): n equals a,t,g, or c
  SITE (29912): n equals a,t,g, or c
  SITE (29913): n equals a,t,g, or c
  SITE (29914): n equals a,t,g, or c
  SITE (29915): n equals a,t,g, or c
  SITE (29916): n equals a,t,g, or c
  SITE (29917): n equals a,t,g, or c
  SITE (29918): n equals a,t,g, or c
  SITE (29919): n equals a,t,g, or c
  SITE (29920): n equals a,t,g, or c
  SITE (29921): n equals a,t,g, or c
  SITE (29922): n equals a,t,g, or c
  SITE (29923): n equals a,t,g, or c
  SITE (29924): n equals a,t,g, or c
  SITE (29925): n equals a,t,g, or c
  SITE (29926): n equals a,t,g, or c
  SITE (29927): n equals a,t,g, or c
  SITE (29928): n equals a,t,g, or c
  SITE (29929): n equals a,t,g, or c
  SITE (29930): n equals a,t,g, or c
  SITE (29931): n equals a,t,g, or c
  SITE (29932): n equals a,t,g, or c
  SITE (29933): n equals a,t,g, or c
  SITE (29934): n equals a,t,g, or c
  SITE (29935): n equals a,t,g, or c
  SITE (29936): n equals a,t,g, or c
  SITE (29937): n equals a,t,g, or c
  SITE (29938): n equals a,t,g, or c
  SITE (29939): n equals a,t,g, or c
  SITE (29940): n equals a,t,g, or c
  SITE (29941): n equals a,t,g, or c
  SITE (29942): n equals a,t,g, or c
  SITE (29943): n equals a,t,g, or c
  SITE (29944): n equals a,t,g, or c
  SITE (29945): n equals a,t,g, or c
  SITE (29946): n equals a,t,g, or c
  SITE (29947): n equals a,t,g, or c
  SITE (29948): n equals a,t,g, or c
  SITE (29949): n equals a,t,g, or c
  SITE (29950): n equals a,t,g, or c
  SITE (29951): n equals a,t,g, or c
  SITE (29952): n equals a,t,g, or c
  SITE (29953): n equals a,t,g, or c
  SITE (29954): n equals a,t,g, or c
  SITE (29955): n equals a,t,g, or c
  SITE (29956): n equals a,t,g, or c
  SITE (29957): n equals a,t,g, or c
  SITE (29958): n equals a,t,g, or c
  SITE (29959): n equals a,t,g, or c
  SITE (29960): n equals a,t,g, or c
  SITE (29961): n equals a,t,g, or c
  SITE (29962): n equals a,t,g, or c
  SITE (29963): n equals a,t,g, or c
  SITE (29964): n equals a,t,g, or c
  SITE (29965): n equals a,t,g, or c
  SITE (29966): n equals a,t,g, or c
  SITE (29967): n equals a,t,g, or c
  SITE (29968): n equals a,t,g, or c
  SITE (29969): n equals a,t,g, or c
  SITE (29970): n equals a,t,g, or c
  SITE (29971): n equals a,t,g, or c
  SITE (29972): n equals a,t,g, or c
  SITE (29973): n equals a,t,g, or c
  SITE (29974): n equals a,t,g, or c
  SITE (29975): n equals a,t,g, or c
  SITE (29976): n equals a,t,g, or c
  SITE (29977): n equals a,t,g, or c
  SITE (29978): n equals a,t,g, or c
  SITE (29979): n equals a,t,g, or c
  SITE (29980): n equals a,t,g, or c
  SITE (29981): n equals a,t,g, or c
  SITE (29982): n equals a,t,g, or c
  SITE (29983): n equals a,t,g, or c
  SITE (29984): n equals a,t,g, or c
  SITE (29985): n equals a,t,g, or c
  SITE (29986): n equals a,t,g, or c
  SITE (29987): n equals a,t,g, or c
  SITE (29988): n equals a,t,g, or c
  SITE (29989): n equals a,t,g, or c
  SITE (29990): n equals a,t,g, or c
  SITE (29991): n equals a,t,g, or c
  SITE (29992): n equals a,t,g, or c
  SITE (29993): n equals a,t,g, or c
  SITE (29994): n equals a,t,g, or c
  SITE (29995): n equals a,t,g, or c
  SITE (29996): n equals a,t,g, or c
  SITE (29997): n equals a,t,g, or c
  SITE (29998): n equals a,t,g, or c
  SITE (29999): n equals a,t,g, or c
  SITE (30000): n equals a,t,g, or c
  SITE (30001): n equals a,t,g, or c
  SITE (30002): n equals a,t,g, or c
  SITE (30003): n equals a,t,g, or c
  SITE (30004): n equals a,t,g, or c
  SITE (30005): n equals a,t,g, or c
  SITE (30006): n equals a,t,g, or c
  SITE (30007): n equals a,t,g, or c
  SITE (30008): n equals a,t,g, or c
  SITE (30009): n equals a,t,g, or c
  SITE (30010): n equals a,t,g, or c
  SITE (30011): n equals a,t,g, or c
  SITE (30012): n equals a,t,g, or c
  SITE (30013): n equals a,t,g, or c
  SITE (30014): n equals a,t,g, or c
  SITE (30015): n equals a,t,g, or c
  SITE (30016): n equals a,t,g, or c
  SITE (30017): n equals a,t,g, or c
  SITE (30018): n equals a,t,g, or c
  SITE (30019): n equals a,t,g, or c
  SITE (30020): n equals a,t,g, or c
  SITE (30021): n equals a,t,g, or c
  SITE (30022): n equals a,t,g, or c
  SITE (30023): n equals a,t,g, or c
  SITE (30024): n equals a,t,g, or c
  SITE (30025): n equals a,t,g, or c
  SITE (30026): n equals a,t,g, or c
  SITE (30027): n equals a,t,g, or c
  SITE (30028): n equals a,t,g, or c
  SITE (30029): n equals a,t,g, or c
  SITE (30030): n equals a,t,g, or c
  SITE (30031): n equals a,t,g, or c
  SITE (30032): n equals a,t,g, or c
  SITE (30033): n equals a,t,g, or c
  SITE (30034): n equals a,t,g, or c
  SITE (30035): n equals a,t,g, or c
  SITE (30036): n equals a,t,g, or c
  SITE (30037): n equals a,t,g, or c
  SITE (30038): n equals a,t,g, or c
  SITE (30039): n equals a,t,g, or c
  SITE (30040): n equals a,t,g, or c
  SITE (30041): n equals a,t,g, or c
  SITE (30042): n equals a,t,g, or c
  SITE (30043): n equals a,t,g, or c
  SITE (30044): n equals a,t,g, or c
  SITE (30045): n equals a,t,g, or c
  SITE (30046): n equals a,t,g, or c
  SITE (30047): n equals a,t,g, or c
  SITE (30048): n equals a,t,g, or c
  SITE (30049): n equals a,t,g, or c
  SITE (30050): n equals a,t,g, or c
  SITE (30051): n equals a,t,g, or c
  SITE (30052): n equals a,t,g, or c
  SITE (30053): n equals a,t,g, or c
  SITE (30054): n equals a,t,g, or c
  SITE (30055): n equals a,t,g, or c
  SITE (30056): n equals a,t,g, or c
  SITE (30057): n equals a,t,g, or c
  SITE (30058): n equals a,t,g, or c
  SITE (30059): n equals a,t,g, or c
  SITE (30060): n equals a,t,g, or c
  SITE (30061): n equals a,t,g, or c
  SITE (30062): n equals a,t,g, or c
  SITE (30063): n equals a,t,g, or c
  SITE (30064): n equals a,t,g, or c
  SITE (30065): n equals a,t,g, or c
  SITE (30066): n equals a,t,g, or c
  SITE (30067): n equals a,t,g, or c
  SITE (30068): n equals a,t,g, or c
  SITE (30069): n equals a,t,g, or c
  SITE (30070): n equals a,t,g, or c
  SITE (30071): n equals a,t,g, or c
  SITE (30072): n equals a,t,g, or c
  SITE (30073): n equals a,t,g, or c
  SITE (30074): n equals a,t,g, or c
  SITE (30075): n equals a,t,g, or c
  SITE (30076): n equals a,t,g, or c
  SITE (30077): n equals a,t,g, or c
  SITE (30078): n equals a,t,g, or c
  SITE (30079): n equals a,t,g, or c
  SITE (30080): n equals a,t,g, or c
  SITE (30081): n equals a,t,g, or c
  SITE (30082): n equals a,t,g, or c
  SITE (30083): n equals a,t,g, or c
  SITE (30084): n equals a,t,g, or c
  SITE (30085): n equals a,t,g, or c
  SITE (30086): n equals a,t,g, or c
  SITE (30087): n equals a,t,g, or c
  SITE (30088): n equals a,t,g, or c
  SITE (30089): n equals a,t,g, or c
  SITE (30090): n equals a,t,g, or c
  SITE (30091): n equals a,t,g, or c
  SITE (30092): n equals a,t,g, or c
  SITE (30093): n equals a,t,g, or c
  SITE (30094): n equals a,t,g, or c
  SITE (30095): n equals a,t,g, or c
  SITE (30096): n equals a,t,g, or c
  SITE (30097): n equals a,t,g, or c
  SITE (30098): n equals a,t,g, or c
  SITE (30099): n equals a,t,g, or c
  SITE (30100): n equals a,t,g, or c
  SITE (30101): n equals a,t,g, or c
  SITE (30102): n equals a,t,g, or c
  SITE (30103): n equals a,t,g, or c
  SITE (30104): n equals a,t,g, or c
  SITE (30105): n equals a,t,g, or c
  SITE (30106): n equals a,t,g, or c
  SITE (30107): n equals a,t,g, or c
  SITE (30108): n equals a,t,g, or c
  SITE (30109): n equals a,t,g, or c
  SITE (30110): n equals a,t,g, or c
  SITE (30111): n equals a,t,g, or c
  SITE (30112): n equals a,t,g, or c
  SITE (30113): n equals a,t,g, or c
  SITE (30114): n equals a,t,g, or c
  SITE (30115): n equals a,t,g, or c
  SITE (30116): n equals a,t,g, or c
  SITE (30117): n equals a,t,g, or c
  SITE (30118): n equals a,t,g, or c
  SITE (30119): n equals a,t,g, or c
  SITE (30120): n equals a,t,g, or c
  SITE (30121): n equals a,t,g, or c
  SITE (30122): n equals a,t,g, or c
  SITE (30123): n equals a,t,g, or c
  SITE (30124): n equals a,t,g, or c
  SITE (30125): n equals a,t,g, or c
  SITE (30126): n equals a,t,g, or c
  SITE (30127): n equals a,t,g, or c
  SITE (30128): n equals a,t,g, or c
  SITE (30129): n equals a,t,g, or c
  SITE (30130): n equals a,t,g, or c
  SITE (30131): n equals a,t,g, or c
  SITE (30132): n equals a,t,g, or c
  SITE (30133): n equals a,t,g, or c
  SITE (30134): n equals a,t,g, or c
  SITE (30135): n equals a,t,g, or c
  SITE (30136): n equals a,t,g, or c
  SITE (30137): n equals a,t,g, or c
  SITE (30138): n equals a,t,g, or c
  SITE (30139): n equals a,t,g, or c
  SITE (30140): n equals a,t,g, or c
  SITE (30141): n equals a,t,g, or c
  SITE (30142): n equals a,t,g, or c
  SITE (30143): n equals a,t,g, or c
  SITE (30144): n equals a,t,g, or c
  SITE (30145): n equals a,t,g, or c
  SITE (30146): n equals a,t,g, or c
  SITE (30147): n equals a,t,g, or c
  SITE (30148): n equals a,t,g, or c
  SITE (30149): n equals a,t,g, or c
  SITE (30150): n equals a,t,g, or c
  SITE (30151): n equals a,t,g, or c
  SITE (30152): n equals a,t,g, or c
  SITE (30153): n equals a,t,g, or c
  SITE (30154): n equals a,t,g, or c
  SITE (30155): n equals a,t,g, or c
  SITE (30156): n equals a,t,g, or c
  SITE (30157): n equals a,t,g, or c
  SITE (30158): n equals a,t,g, or c
  SITE (30159): n equals a,t,g, or c
  SITE (30160): n equals a,t,g, or c
  SITE (30161): n equals a,t,g, or c
  SITE (30162): n equals a,t,g, or c
  SITE (30163): n equals a,t,g, or c
  SITE (30164): n equals a,t,g, or c
  SITE (30165): n equals a,t,g, or c
  SITE (30166): n equals a,t,g, or c
  SITE (30167): n equals a,t,g, or c
  SITE (30168): n equals a,t,g, or c
  SITE (30169): n equals a,t,g, or c
  SITE (30170): n equals a,t,g, or c
  SITE (30171): n equals a,t,g, or c
  SITE (30172): n equals a,t,g, or c
  SITE (30173): n equals a,t,g, or c
  SITE (30174): n equals a,t,g, or c
  SITE (30175): n equals a,t,g, or c
  SITE (30176): n equals a,t,g, or c
  SITE (30177): n equals a,t,g, or c
  SITE (30178): n equals a,t,g, or c
  SITE (30179): n equals a,t,g, or c
  SITE (30180): n equals a,t,g, or c
  SITE (30181): n equals a,t,g, or c
  SITE (30182): n equals a,t,g, or c
  SITE (30183): n equals a,t,g, or c
  SITE (30184): n equals a,t,g, or c
  SITE (30185): n equals a,t,g, or c
  SITE (30186): n equals a,t,g, or c
  SITE (30187): n equals a,t,g, or c
  SITE (30188): n equals a,t,g, or c
  SITE (30189): n equals a,t,g, or c
  SITE (30190): n equals a,t,g, or c
  SITE (30191): n equals a,t,g, or c
  SITE (30192): n equals a,t,g, or c
  SITE (30193): n equals a,t,g, or c
  SITE (30194): n equals a,t,g, or c
  SITE (30195): n equals a,t,g, or c
  SITE (30196): n equals a,t,g, or c
  SITE (30197): n equals a,t,g, or c
  SITE (30198): n equals a,t,g, or c
  SITE (30199): n equals a,t,g, or c
  SITE (30200): n equals a,t,g, or c
  SITE (30201): n equals a,t,g, or c
  SITE (30202): n equals a,t,g, or c
  SITE (30203): n equals a,t,g, or c
  SITE (30204): n equals a,t,g, or c
  SITE (30205): n equals a,t,g, or c
  SITE (30206): n equals a,t,g, or c
  SITE (30207): n equals a,t,g, or c
  SITE (30208): n equals a,t,g, or c
  SITE (30209): n equals a,t,g, or c
  SITE (30210): n equals a,t,g, or c
  SITE (30211): n equals a,t,g, or c
  SITE (30212): n equals a,t,g, or c
  SITE (30213): n equals a,t,g, or c
  SITE (30214): n equals a,t,g, or c
  SITE (30215): n equals a,t,g, or c
  SITE (30216): n equals a,t,g, or c
  SITE (30217): n equals a,t,g, or c
  SITE (30218): n equals a,t,g, or c
  SITE (30219): n equals a,t,g, or c
  SITE (30220): n equals a,t,g, or c
  SITE (30221): n equals a,t,g, or c
  SITE (30222): n equals a,t,g, or c
  SITE (30223): n equals a,t,g, or c
  SITE (30224): n equals a,t,g, or c
  SITE (30225): n equals a,t,g, or c
  SITE (30226): n equals a,t,g, or c
  SITE (30227): n equals a,t,g, or c
  SITE (30228): n equals a,t,g, or c
  SITE (30229): n equals a,t,g, or c
  SITE (30230): n equals a,t,g, or c
  SITE (30231): n equals a,t,g, or c
  SITE (30232): n equals a,t,g, or c
  SITE (30233): n equals a,t,g, or c
  SITE (30234): n equals a,t,g, or c
  SITE (30235): n equals a,t,g, or c
  SITE (30236): n equals a,t,g, or c
  SITE (30237): n equals a,t,g, or c
  SITE (30238): n equals a,t,g, or c
  SITE (30239): n equals a,t,g, or c
  SITE (30240): n equals a,t,g, or c
  SITE (30241): n equals a,t,g, or c
  SITE (30242): n equals a,t,g, or c
  SITE (30243): n equals a,t,g, or c
  SITE (30244): n equals a,t,g, or c
  SITE (30245): n equals a,t,g, or c
  SITE (30246): n equals a,t,g, or c
  SITE (30247): n equals a,t,g, or c
  SITE (30248): n equals a,t,g, or c
  SITE (30249): n equals a,t,g, or c
  SITE (30250): n equals a,t,g, or c
  SITE (30251): n equals a,t,g, or c
  SITE (30252): n equals a,t,g, or c
  SITE (30253): n equals a,t,g, or c
  SITE (30254): n equals a,t,g, or c
  SITE (30255): n equals a,t,g, or c
  SITE (30256): n equals a,t,g, or c
  SITE (30257): n equals a,t,g, or c
  SITE (30258): n equals a,t,g, or c
  SITE (30259): n equals a,t,g, or c
  SITE (30260): n equals a,t,g, or c
  SITE (30261): n equals a,t,g, or c
  SITE (30262): n equals a,t,g, or c
  SITE (30263): n equals a,t,g, or c
  SITE (30264): n equals a,t,g, or c
  SITE (30265): n equals a,t,g, or c
  SITE (30266): n equals a,t,g, or c
  SITE (30267): n equals a,t,g, or c
  SITE (30268): n equals a,t,g, or c
  SITE (30269): n equals a,t,g, or c
  SITE (30270): n equals a,t,g, or c
  SITE (30271): n equals a,t,g, or c
  SITE (30272): n equals a,t,g, or c
  SITE (30273): n equals a,t,g, or c
  SITE (30274): n equals a,t,g, or c
  SITE (30275): n equals a,t,g, or c
  SITE (30276): n equals a,t,g, or c
  SITE (30277): n equals a,t,g, or c
  SITE (30278): n equals a,t,g, or c
  SITE (30279): n equals a,t,g, or c
  SITE (30280): n equals a,t,g, or c
  SITE (30281): n equals a,t,g, or c
  SITE (30282): n equals a,t,g, or c
  SITE (30283): n equals a,t,g, or c
  SITE (30284): n equals a,t,g, or c
  SITE (30285): n equals a,t,g, or c
  SITE (30286): n equals a,t,g, or c
  SITE (30287): n equals a,t,g, or c
  SITE (30288): n equals a,t,g, or c
  SITE (30289): n equals a,t,g, or c
  SITE (30290): n equals a,t,g, or c
  SITE (30291): n equals a,t,g, or c
  SITE (30292): n equals a,t,g, or c
  SITE (30293): n equals a,t,g, or c
  SITE (30294): n equals a,t,g, or c
  SITE (30295): n equals a,t,g, or c
  SITE (30296): n equals a,t,g, or c
  SITE (30297): n equals a,t,g, or c
  SITE (30298): n equals a,t,g, or c
  SITE (30299): n equals a,t,g, or c
  SITE (30300): n equals a,t,g, or c
  SITE (30301): n equals a,t,g, or c
  SITE (30302): n equals a,t,g, or c
  SITE (30303): n equals a,t,g, or c
  SITE (30304): n equals a,t,g, or c
  SITE (30305): n equals a,t,g, or c
  SITE (30306): n equals a,t,g, or c
  SITE (30307): n equals a,t,g, or c
  SITE (30308): n equals a,t,g, or c
  SITE (30309): n equals a,t,g, or c
  SITE (30310): n equals a,t,g, or c
  SITE (30311): n equals a,t,g, or c
  SITE (30312): n equals a,t,g, or c
  SITE (30313): n equals a,t,g, or c
  SITE (30314): n equals a,t,g, or c
  SITE (30315): n equals a,t,g, or c
  SITE (30316): n equals a,t,g, or c
  SITE (30317): n equals a,t,g, or c
  SITE (30318): n equals a,t,g, or c
  SITE (30319): n equals a,t,g, or c
  SITE (30320): n equals a,t,g, or c
  SITE (30321): n equals a,t,g, or c
  SITE (30322): n equals a,t,g, or c
  SITE (30323): n equals a,t,g, or c
  SITE (30324): n equals a,t,g, or c
  SITE (30325): n equals a,t,g, or c
  SITE (30326): n equals a,t,g, or c
  SITE (30327): n equals a,t,g, or c
  SITE (30328): n equals a,t,g, or c
  SITE (30329): n equals a,t,g, or c
  SITE (30330): n equals a,t,g, or c
  SITE (30331): n equals a,t,g, or c
  SITE (30332): n equals a,t,g, or c
  SITE (30333): n equals a,t,g, or c
  SITE (30334): n equals a,t,g, or c
  SITE (30335): n equals a,t,g, or c
  SITE (30336): n equals a,t,g, or c
  SITE (30337): n equals a,t,g, or c
  SITE (30338): n equals a,t,g, or c
  SITE (30339): n equals a,t,g, or c
  SITE (30340): n equals a,t,g, or c
  SITE (30341): n equals a,t,g, or c
  SITE (30342): n equals a,t,g, or c
  SITE (30343): n equals a,t,g, or c
  SITE (30344): n equals a,t,g, or c
  SITE (30345): n equals a,t,g, or c
  SITE (30346): n equals a,t,g, or c
  SITE (30347): n equals a,t,g, or c
  SITE (30348): n equals a,t,g, or c
  SITE (30349): n equals a,t,g, or c
  SITE (30350): n equals a,t,g, or c
  SITE (30351): n equals a,t,g, or c
  SITE (30352): n equals a,t,g, or c
  SITE (30353): n equals a,t,g, or c
  SITE (30354): n equals a,t,g, or c
  SITE (30355): n equals a,t,g, or c
  SITE (30356): n equals a,t,g, or c
  SITE (30357): n equals a,t,g, or c
  SITE (30358): n equals a,t,g, or c
  SITE (30359): n equals a,t,g, or c
  SITE (30360): n equals a,t,g, or c
  SITE (30361): n equals a,t,g, or c
  SITE (30362): n equals a,t,g, or c
  SITE (30363): n equals a,t,g, or c
  SITE (30364): n equals a,t,g, or c
  SITE (30365): n equals a,t,g, or c
  SITE (30366): n equals a,t,g, or c
  SITE (30367): n equals a,t,g, or c
  SITE (30368): n equals a,t,g, or c
  SITE (30369): n equals a,t,g, or c
  SITE (30370): n equals a,t,g, or c
  SITE (30371): n equals a,t,g, or c
  SITE (30372): n equals a,t,g, or c
  SITE (30373): n equals a,t,g, or c
  SITE (30374): n equals a,t,g, or c
  SITE (30375): n equals a,t,g, or c
  SITE (30376): n equals a,t,g, or c
  SITE (30377): n equals a,t,g, or c
  SITE (30378): n equals a,t,g, or c
  SITE (30379): n equals a,t,g, or c
  SITE (30380): n equals a,t,g, or c
  SITE (30381): n equals a,t,g, or c
  SITE (30382): n equals a,t,g, or c
  SITE (30383): n equals a,t,g, or c
  SITE (30384): n equals a,t,g, or c
  SITE (30385): n equals a,t,g, or c
  SITE (30386): n equals a,t,g, or c
  SITE (30387): n equals a,t,g, or c
  SITE (30388): n equals a,t,g, or c
  SITE (30389): n equals a,t,g, or c
  SITE (30390): n equals a,t,g, or c
  SITE (30391): n equals a,t,g, or c
  SITE (30392): n equals a,t,g, or c
  SITE (30393): n equals a,t,g, or c
  SITE (30394): n equals a,t,g, or c
  SITE (30395): n equals a,t,g, or c
  SITE (30396): n equals a,t,g, or c
  SITE (30397): n equals a,t,g, or c
  SITE (30398): n equals a,t,g, or c
  SITE (30399): n equals a,t,g, or c
  SITE (30400): n equals a,t,g, or c
  SITE (30401): n equals a,t,g, or c
  SITE (30402): n equals a,t,g, or c
  SITE (30403): n equals a,t,g, or c
  SITE (30404): n equals a,t,g, or c
  SITE (30405): n equals a,t,g, or c
  SITE (30406): n equals a,t,g, or c
  SITE (30407): n equals a,t,g, or c
  SITE (30408): n equals a,t,g, or c
  SITE (30409): n equals a,t,g, or c
  SITE (30410): n equals a,t,g, or c
  SITE (30411): n equals a,t,g, or c
  SITE (30412): n equals a,t,g, or c
  SITE (30413): n equals a,t,g, or c
  SITE (30414): n equals a,t,g, or c
  SITE (30415): n equals a,t,g, or c
  SITE (30416): n equals a,t,g, or c
  SITE (30417): n equals a,t,g, or c
  SITE (30418): n equals a,t,g, or c
  SITE (30419): n equals a,t,g, or c
  SITE (30420): n equals a,t,g, or c
  SITE (30421): n equals a,t,g, or c
  SITE (30422): n equals a,t,g, or c
  SITE (30423): n equals a,t,g, or c
  SITE (30424): n equals a,t,g, or c
  SITE (30425): n equals a,t,g, or c
  SITE (30426): n equals a,t,g, or c
  SITE (30427): n equals a,t,g, or c
  SITE (30428): n equals a,t,g, or c
  SITE (30429): n equals a,t,g, or c
  SITE (30430): n equals a,t,g, or c
  SITE (30431): n equals a,t,g, or c
  SITE (30432): n equals a,t,g, or c
  SITE (30433): n equals a,t,g, or c
  SITE (30434): n equals a,t,g, or c
  SITE (30435): n equals a,t,g, or c
  SITE (30436): n equals a,t,g, or c
  SITE (30437): n equals a,t,g, or c
  SITE (30438): n equals a,t,g, or c
  SITE (30439): n equals a,t,g, or c
  SITE (30440): n equals a,t,g, or c
  SITE (30441): n equals a,t,g, or c
  SITE (30442): n equals a,t,g, or c
  SITE (30443): n equals a,t,g, or c
  SITE (30444): n equals a,t,g, or c
  SITE (30445): n equals a,t,g, or c
  SITE (30446): n equals a,t,g, or c
  SITE (30447): n equals a,t,g, or c
  SITE (30448): n equals a,t,g, or c
  SITE (30449): n equals a,t,g, or c
  SITE (30450): n equals a,t,g, or c
  SITE (30451): n equals a,t,g, or c
  SITE (30452): n equals a,t,g, or c
  SITE (30453): n equals a,t,g, or c
  SITE (30454): n equals a,t,g, or c
  SITE (30455): n equals a,t,g, or c
  SITE (30456): n equals a,t,g, or c
  SITE (30457): n equals a,t,g, or c
  SITE (30458): n equals a,t,g, or c
  SITE (30459): n equals a,t,g, or c
  SITE (30460): n equals a,t,g, or c
  SITE (30461): n equals a,t,g, or c
  SITE (30462): n equals a,t,g, or c
  SITE (30463): n equals a,t,g, or c
  SITE (30464): n equals a,t,g, or c
  SITE (30465): n equals a,t,g, or c
  SITE (30466): n equals a,t,g, or c
  SITE (30467): n equals a,t,g, or c
  SITE (30468): n equals a,t,g, or c
  SITE (30469): n equals a,t,g, or c
  SITE (30470): n equals a,t,g, or c
  SITE (30471): n equals a,t,g, or c
  SITE (30472): n equals a,t,g, or c
  SITE (30473): n equals a,t,g, or c
  SITE (30474): n equals a,t,g, or c
  SITE (30475): n equals a,t,g, or c
  SITE (30476): n equals a,t,g, or c
  SITE (30477): n equals a,t,g, or c
  SITE (30478): n equals a,t,g, or c
  SITE (30479): n equals a,t,g, or c
  SITE (30480): n equals a,t,g, or c
  SITE (30481): n equals a,t,g, or c
  SITE (30482): n equals a,t,g, or c
  SITE (30483): n equals a,t,g, or c
  SITE (30484): n equals a,t,g, or c
  SITE (30485): n equals a,t,g, or c
  SITE (30486): n equals a,t,g, or c
  SITE (30487): n equals a,t,g, or c
  SITE (30488): n equals a,t,g, or c
  SITE (30489): n equals a,t,g, or c
  SITE (30490): n equals a,t,g, or c
  SITE (30491): n equals a,t,g, or c
  SITE (30492): n equals a,t,g, or c
  SITE (30493): n equals a,t,g, or c
  SITE (30494): n equals a,t,g, or c
  SITE (30495): n equals a,t,g, or c
  SITE (30496): n equals a,t,g, or c
  SITE (30497): n equals a,t,g, or c
  SITE (30498): n equals a,t,g, or c
  SITE (30499): n equals a,t,g, or c
  SITE (30500): n equals a,t,g, or c
  SITE (30501): n equals a,t,g, or c
  SITE (30502): n equals a,t,g, or c
  SITE (30503): n equals a,t,g, or c
  SITE (30504): n equals a,t,g, or c
  SITE (30505): n equals a,t,g, or c
  SITE (30506): n equals a,t,g, or c
  SITE (30507): n equals a,t,g, or c
  SITE (30508): n equals a,t,g, or c
  SITE (30509): n equals a,t,g, or c
  SITE (30510): n equals a,t,g, or c
  SITE (30511): n equals a,t,g, or c
  SITE (30512): n equals a,t,g, or c
  SITE (30513): n equals a,t,g, or c
  SITE (30514): n equals a,t,g, or c
  SITE (30515): n equals a,t,g, or c
  SITE (30516): n equals a,t,g, or c
  SITE (30517): n equals a,t,g, or c
  SITE (30518): n equals a,t,g, or c
  SITE (30519): n equals a,t,g, or c
  SITE (30520): n equals a,t,g, or c
  SITE (30521): n equals a,t,g, or c
  SITE (30522): n equals a,t,g, or c
  SITE (30523): n equals a,t,g, or c
  SITE (30524): n equals a,t,g, or c
  SITE (30525): n equals a,t,g, or c
  SITE (30526): n equals a,t,g, or c
  SITE (30527): n equals a,t,g, or c
  SITE (30528): n equals a,t,g, or c
  SITE (30529): n equals a,t,g, or c
  SITE (30530): n equals a,t,g, or c
  SITE (30531): n equals a,t,g, or c
  SITE (30532): n equals a,t,g, or c
  SITE (30533): n equals a,t,g, or c
  SITE (30534): n equals a,t,g, or c
  SITE (30535): n equals a,t,g, or c
  SITE (30536): n equals a,t,g, or c
  SITE (30537): n equals a,t,g, or c
  SITE (30538): n equals a,t,g, or c
  SITE (30539): n equals a,t,g, or c
  SITE (30540): n equals a,t,g, or c
  SITE (30541): n equals a,t,g, or c
  SITE (30542): n equals a,t,g, or c
  SITE (30543): n equals a,t,g, or c
  SITE (30544): n equals a,t,g, or c
  SITE (30545): n equals a,t,g, or c
  SITE (30546): n equals a,t,g, or c
  SITE (30547): n equals a,t,g, or c
  SITE (30548): n equals a,t,g, or c
  SITE (30549): n equals a,t,g, or c
  SITE (30550): n equals a,t,g, or c
  SITE (30551): n equals a,t,g, or c
  SITE (30552): n equals a,t,g, or c
  SITE (30553): n equals a,t,g, or c
  SITE (30554): n equals a,t,g, or c
  SITE (30555): n equals a,t,g, or c
  SITE (30556): n equals a,t,g, or c
  SITE (30557): n equals a,t,g, or c
  SITE (30558): n equals a,t,g, or c
  SITE (30559): n equals a,t,g, or c
  SITE (30560): n equals a,t,g, or c
  SITE (30561): n equals a,t,g, or c
  SITE (30562): n equals a,t,g, or c
  SITE (30563): n equals a,t,g, or c
  SITE (30564): n equals a,t,g, or c
  SITE (30565): n equals a,t,g, or c
  SITE (30566): n equals a,t,g, or c
  SITE (30567): n equals a,t,g, or c
  SITE (30568): n equals a,t,g, or c
  SITE (30569): n equals a,t,g, or c
  SITE (30570): n equals a,t,g, or c
  SITE (30571): n equals a,t,g, or c
  SITE (30572): n equals a,t,g, or c
  SITE (30573): n equals a,t,g, or c
  SITE (30574): n equals a,t,g, or c
  SITE (30575): n equals a,t,g, or c
  SITE (30576): n equals a,t,g, or c
  SITE (30577): n equals a,t,g, or c
  SITE (30578): n equals a,t,g, or c
  SITE (30579): n equals a,t,g, or c
  SITE (30580): n equals a,t,g, or c
  SITE (30581): n equals a,t,g, or c
  SITE (30582): n equals a,t,g, or c
  SITE (30583): n equals a,t,g, or c
  SITE (30584): n equals a,t,g, or c
  SITE (30585): n equals a,t,g, or c
  SITE (30586): n equals a,t,g, or c
  SITE (30587): n equals a,t,g, or c
  SITE (30588): n equals a,t,g, or c
  SITE (30589): n equals a,t,g, or c
  SITE (30590): n equals a,t,g, or c
  SITE (30591): n equals a,t,g, or c
  SITE (30592): n equals a,t,g, or c
  SITE (30593): n equals a,t,g, or c
  SITE (30594): n equals a,t,g, or c
  SITE (30595): n equals a,t,g, or c
  SITE (30596): n equals a,t,g, or c
  SITE (30597): n equals a,t,g, or c
  SITE (30598): n equals a,t,g, or c
  SITE (30599): n equals a,t,g, or c
  SITE (30600): n equals a,t,g, or c
  SITE (30601): n equals a,t,g, or c
  SITE (30602): n equals a,t,g, or c
  SITE (30603): n equals a,t,g, or c
  SITE (30604): n equals a,t,g, or c
  SITE (30605): n equals a,t,g, or c
  SITE (30606): n equals a,t,g, or c
  SITE (30607): n equals a,t,g, or c
  SITE (30608): n equals a,t,g, or c
  SITE (30609): n equals a,t,g, or c
  SITE (30610): n equals a,t,g, or c
  SITE (30611): n equals a,t,g, or c
  SITE (30612): n equals a,t,g, or c
  SITE (30613): n equals a,t,g, or c
  SITE (30614): n equals a,t,g, or c
  SITE (30615): n equals a,t,g, or c
  SITE (30616): n equals a,t,g, or c
  SITE (30617): n equals a,t,g, or c
  SITE (30618): n equals a,t,g, or c
  SITE (30619): n equals a,t,g, or c
  SITE (30620): n equals a,t,g, or c
  SITE (30621): n equals a,t,g, or c
  SITE (30622): n equals a,t,g, or c
  SITE (30623): n equals a,t,g, or c
  SITE (30624): n equals a,t,g, or c
  SITE (30625): n equals a,t,g, or c
  SITE (30626): n equals a,t,g, or c
  SITE (30627): n equals a,t,g, or c
  SITE (30628): n equals a,t,g, or c
  SITE (30629): n equals a,t,g, or c
  SITE (30630): n equals a,t,g, or c
  SITE (30631): n equals a,t,g, or c
  SITE (30632): n equals a,t,g, or c
  SITE (30633): n equals a,t,g, or c
  SITE (30634): n equals a,t,g, or c
  SITE (30635): n equals a,t,g, or c
  SITE (30636): n equals a,t,g, or c
  SITE (30637): n equals a,t,g, or c
  SITE (30638): n equals a,t,g, or c
  SITE (30639): n equals a,t,g, or c
  SITE (30640): n equals a,t,g, or c
  SITE (30641): n equals a,t,g, or c
  SITE (30642): n equals a,t,g, or c
  SITE (30643): n equals a,t,g, or c
  SITE (30644): n equals a,t,g, or c
  SITE (30645): n equals a,t,g, or c
  SITE (30646): n equals a,t,g, or c
  SITE (30647): n equals a,t,g, or c
  SITE (30648): n equals a,t,g, or c
  SITE (30649): n equals a,t,g, or c
  SITE (30650): n equals a,t,g, or c
  SITE (30651): n equals a,t,g, or c
  SITE (30652): n equals a,t,g, or c
  SITE (30653): n equals a,t,g, or c
  SITE (30654): n equals a,t,g, or c
  SITE (30655): n equals a,t,g, or c
  SITE (30656): n equals a,t,g, or c
  SITE (30657): n equals a,t,g, or c
  SITE (30658): n equals a,t,g, or c
  SITE (30659): n equals a,t,g, or c
  SITE (30660): n equals a,t,g, or c
  SITE (30661): n equals a,t,g, or c
  SITE (30662): n equals a,t,g, or c
  SITE (30663): n equals a,t,g, or c
  SITE (30664): n equals a,t,g, or c
  SITE (30665): n equals a,t,g, or c
  SITE (30666): n equals a,t,g, or c
  SITE (30667): n equals a,t,g, or c
  SITE (30668): n equals a,t,g, or c
  SITE (30669): n equals a,t,g, or c
  SITE (30670): n equals a,t,g, or c
  SITE (30671): n equals a,t,g, or c
  SITE (30672): n equals a,t,g, or c
  SITE (30673): n equals a,t,g, or c
  SITE (30674): n equals a,t,g, or c
  SITE (30675): n equals a,t,g, or c
  SITE (30676): n equals a,t,g, or c
  SITE (30677): n equals a,t,g, or c
  SITE (30678): n equals a,t,g, or c
  SITE (30679): n equals a,t,g, or c
  SITE (30680): n equals a,t,g, or c
  SITE (30681): n equals a,t,g, or c
  SITE (30682): n equals a,t,g, or c
  SITE (30683): n equals a,t,g, or c
  SITE (30684): n equals a,t,g, or c
  SITE (30685): n equals a,t,g, or c
  SITE (30686): n equals a,t,g, or c
  SITE (30687): n equals a,t,g, or c
  SITE (30688): n equals a,t,g, or c
  SITE (30689): n equals a,t,g, or c
  SITE (30690): n equals a,t,g, or c
  SITE (30691): n equals a,t,g, or c
  SITE (30692): n equals a,t,g, or c
  SITE (30693): n equals a,t,g, or c
  SITE (30694): n equals a,t,g, or c
  SITE (30695): n equals a,t,g, or c
  SITE (30696): n equals a,t,g, or c
  SITE (30697): n equals a,t,g, or c
  SITE (30698): n equals a,t,g, or c
  SITE (30699): n equals a,t,g, or c
  SITE (30700): n equals a,t,g, or c
  SITE (30701): n equals a,t,g, or c
  SITE (30702): n equals a,t,g, or c
  SITE (30703): n equals a,t,g, or c
  SITE (30704): n equals a,t,g, or c
  SITE (30705): n equals a,t,g, or c
  SITE (30706): n equals a,t,g, or c
  SITE (30707): n equals a,t,g, or c
  SITE (30708): n equals a,t,g, or c
  SITE (30709): n equals a,t,g, or c
  SITE (30710): n equals a,t,g, or c
  SITE (30711): n equals a,t,g, or c
  SITE (30712): n equals a,t,g, or c
  SITE (30713): n equals a,t,g, or c
  SITE (30714): n equals a,t,g, or c
  SITE (30715): n equals a,t,g, or c
  SITE (30716): n equals a,t,g, or c
  SITE (30717): n equals a,t,g, or c
  SITE (30718): n equals a,t,g, or c
  SITE (30719): n equals a,t,g, or c
  SITE (30720): n equals a,t,g, or c
  SITE (30721): n equals a,t,g, or c
  SITE (30722): n equals a,t,g, or c
  SITE (30723): n equals a,t,g, or c
  SITE (30724): n equals a,t,g, or c
  SITE (30725): n equals a,t,g, or c
  SITE (30726): n equals a,t,g, or c
  SITE (30727): n equals a,t,g, or c
  SITE (30728): n equals a,t,g, or c
  SITE (30729): n equals a,t,g, or c
  SITE (30730): n equals a,t,g, or c
  SITE (30731): n equals a,t,g, or c
  SITE (30732): n equals a,t,g, or c
  SITE (30733): n equals a,t,g, or c
  SITE (30734): n equals a,t,g, or c
  SITE (30735): n equals a,t,g, or c
  SITE (30736): n equals a,t,g, or c
  SITE (30737): n equals a,t,g, or c
  SITE (30738): n equals a,t,g, or c
  SITE (30739): n equals a,t,g, or c
  SITE (30740): n equals a,t,g, or c
  SITE (30741): n equals a,t,g, or c
  SITE (30742): n equals a,t,g, or c
  SITE (30743): n equals a,t,g, or c
  SITE (30744): n equals a,t,g, or c
  SITE (30745): n equals a,t,g, or c
  SITE (30746): n equals a,t,g, or c
  SITE (30747): n equals a,t,g, or c
  SITE (30748): n equals a,t,g, or c
  SITE (30749): n equals a,t,g, or c
  SITE (30750): n equals a,t,g, or c
  SITE (30751): n equals a,t,g, or c
  SITE (30752): n equals a,t,g, or c
  SITE (30753): n equals a,t,g, or c
  SITE (30754): n equals a,t,g, or c
  SITE (30755): n equals a,t,g, or c
  SITE (30756): n equals a,t,g, or c
  SITE (30757): n equals a,t,g, or c
  SITE (30758): n equals a,t,g, or c
  SITE (30759): n equals a,t,g, or c
  SITE (30760): n equals a,t,g, or c
  SITE (30761): n equals a,t,g, or c
  SITE (30762): n equals a,t,g, or c
  SITE (30763): n equals a,t,g, or c
  SITE (30764): n equals a,t,g, or c
  SITE (30765): n equals a,t,g, or c
  SITE (30766): n equals a,t,g, or c
  SITE (30767): n equals a,t,g, or c
  SITE (30768): n equals a,t,g, or c
  SITE (30769): n equals a,t,g, or c
  SITE (30770): n equals a,t,g, or c
  SITE (30771): n equals a,t,g, or c
  SITE (30772): n equals a,t,g, or c
  SITE (30773): n equals a,t,g, or c
  SITE (30774): n equals a,t,g, or c
  SITE (30775): n equals a,t,g, or c
  SITE (30776): n equals a,t,g, or c
  SITE (30777): n equals a,t,g, or c
  SITE (30778): n equals a,t,g, or c
  SITE (30779): n equals a,t,g, or c
  SITE (30780): n equals a,t,g, or c
  SITE (30781): n equals a,t,g, or c
  SITE (30782): n equals a,t,g, or c
  SITE (30783): n equals a,t,g, or c
  SITE (30784): n equals a,t,g, or c
  SITE (30785): n equals a,t,g, or c
  SITE (30786): n equals a,t,g, or c
  SITE (30787): n equals a,t,g, or c
  SITE (30788): n equals a,t,g, or c
  SITE (30789): n equals a,t,g, or c
  SITE (30790): n equals a,t,g, or c
  SITE (30791): n equals a,t,g, or c
  SITE (30792): n equals a,t,g, or c
  SITE (30793): n equals a,t,g, or c
  SITE (30794): n equals a,t,g, or c
  SITE (30795): n equals a,t,g, or c
  SITE (30796): n equals a,t,g, or c
  SITE (30797): n equals a,t,g, or c
  SITE (30798): n equals a,t,g, or c
  SITE (30799): n equals a,t,g, or c
  SITE (30800): n equals a,t,g, or c
  SITE (30801): n equals a,t,g, or c
  SITE (30802): n equals a,t,g, or c
  SITE (30803): n equals a,t,g, or c
  SITE (30804): n equals a,t,g, or c
  SITE (30805): n equals a,t,g, or c
  SITE (30806): n equals a,t,g, or c
  SITE (30807): n equals a,t,g, or c
  SITE (30808): n equals a,t,g, or c
  SITE (30809): n equals a,t,g, or c
  SITE (30810): n equals a,t,g, or c
  SITE (30811): n equals a,t,g, or c
  SITE (30812): n equals a,t,g, or c
  SITE (30813): n equals a,t,g, or c
  SITE (30814): n equals a,t,g, or c
  SITE (30815): n equals a,t,g, or c
  SITE (30816): n equals a,t,g, or c
  SITE (30817): n equals a,t,g, or c
  SITE (30818): n equals a,t,g, or c
  SITE (30819): n equals a,t,g, or c
  SITE (30820): n equals a,t,g, or c
  SITE (30821): n equals a,t,g, or c
  SITE (30822): n equals a,t,g, or c
  SITE (30823): n equals a,t,g, or c
  SITE (30824): n equals a,t,g, or c
  SITE (30825): n equals a,t,g, or c
  SITE (30826): n equals a,t,g, or c
  SITE (30827): n equals a,t,g, or c
  SITE (30828): n equals a,t,g, or c
  SITE (30829): n equals a,t,g, or c
  SITE (30830): n equals a,t,g, or c
  SITE (30831): n equals a,t,g, or c
  SITE (30832): n equals a,t,g, or c
  SITE (30833): n equals a,t,g, or c
  SITE (30834): n equals a,t,g, or c
  SITE (30835): n equals a,t,g, or c
  SITE (30836): n equals a,t,g, or c
  SITE (30837): n equals a,t,g, or c
  SITE (30838): n equals a,t,g, or c
  SITE (30839): n equals a,t,g, or c
  SITE (30840): n equals a,t,g, or c
  SITE (30841): n equals a,t,g, or c
  SITE (30842): n equals a,t,g, or c
  SITE (30843): n equals a,t,g, or c
  SITE (30844): n equals a,t,g, or c
  SITE (30845): n equals a,t,g, or c
  SITE (30846): n equals a,t,g, or c
  SITE (30847): n equals a,t,g, or c
  SITE (30848): n equals a,t,g, or c
  SITE (30849): n equals a,t,g, or c
  SITE (30850): n equals a,t,g, or c
  SITE (30851): n equals a,t,g, or c
  SITE (30852): n equals a,t,g, or c
  SITE (30853): n equals a,t,g, or c
  SITE (30854): n equals a,t,g, or c
  SITE (30855): n equals a,t,g, or c
  SITE (30856): n equals a,t,g, or c
  SITE (30857): n equals a,t,g, or c
  SITE (30858): n equals a,t,g, or c
  SITE (30859): n equals a,t,g, or c
  SITE (30860): n equals a,t,g, or c
  SITE (30861): n equals a,t,g, or c
  SITE (30862): n equals a,t,g, or c
  SITE (30863): n equals a,t,g, or c
  SITE (30864): n equals a,t,g, or c
  SITE (30865): n equals a,t,g, or c
  SITE (30866): n equals a,t,g, or c
  SITE (30867): n equals a,t,g, or c
  SITE (30868): n equals a,t,g, or c
  SITE (30869): n equals a,t,g, or c
  SITE (30870): n equals a,t,g, or c
  SITE (30871): n equals a,t,g, or c
  SITE (30872): n equals a,t,g, or c
  SITE (30873): n equals a,t,g, or c
  SITE (30874): n equals a,t,g, or c
  SITE (30875): n equals a,t,g, or c
  SITE (30876): n equals a,t,g, or c
  SITE (30877): n equals a,t,g, or c
  SITE (30878): n equals a,t,g, or c
  SITE (30879): n equals a,t,g, or c
  SITE (30880): n equals a,t,g, or c

SEQ ID NO: 10056 - DNA, 316 bp, Homo sapiens; identical to SEQ ID NO: 5637

SEQ ID NO: 10057 - DNA, 286 bp, Homo sapiens
tctttttttttttttttcttttcttttttttttttttttgagacggagtctcgctctgtcgcccaggctggagtgcagtggcgcgatctcggctcactgcaagctccgcctcccgggttcacgccattctcctgcctcagcctcccgagtagctgggactacaggcgcccgctaccacgccgggctaatttttggtatttttagtagagacggggtttcaccgtgttagccaggatggtctggatctcctgacctcgggatccgcccgcctgggcctcccaaagtg

SEQ ID NO: 10058 - DNA, 305 bp, Homo sapiens
tttcttttttttttttttttttttttttgagacggagtctcgctctgtcgcccaggctggagtgcagtggcgggatctcggctcactgcaagctccgcctcccgggttcacgccattctcctgcctcagcctcccaagtagctgggactacaggtgcccgccactacgcccggctaattttttgtatttttagtagagacggggtttcaccgttttagctgggatggtctcgatctcctgacctcgtgatccgcccgcctcggcctcccaaagtgctgggattacaggcgtgagccaccgcgccc

SEQ ID NO: 10059 - DNA, 316 bp, Homo sapiens; identical to SEQ ID NO: 5638

SEQ ID NO: 10060 - DNA, 186 bp, Homo sapiens
tcagcctcccgagtagctgggactacaggtgcccaccaccacacctggctaatttttttgtatttttagtagagacggggtttcaccatgttagccaggatggtctcgatctcctgacctcatgatctgcctgcctcagcctcccaaagtgctaggattacaggcgtgagccaccgcgcccagcaa

SEQ ID NO: 10061 - DNA, 303 bp, Homo sapiens
ggtttttttttttttttttttttgagatggagtctcgctctgtcgcccaggctggagtgcagtggtgcaatctcagctcactgcaagctccacctcctgggttcacaccgttctcctgcctcagcctcccaagcagctgggactacaggtacccgccaccacgcctggctaattttttgtaatttttagtagagacggggtttcaccatgttagccaggatggtctcaatctcctgacctcgtgatccacctgcctcggcctcccaaagtgctgggattataggcgtgagccaccgcgcctgg

SEQ ID NO: 10062 - DNA, 283 bp, Homo sapiens
tttttttttttttttttttttgagatggagtctggctctgtcgcccaggctggagtgcagtggcgcgatctcggctcactgcaggctccacctcccgggttcacgccattctcctgcctcagtctcccgagtagctgggactacaggcccccgccaccacgcctggctaattttttgtatttttagtagagacggggtttcaccgtgttagccaggatggtcttgatctcctgacctcgtgatccggccgcctcggccttccaaagtgctgggattacaggcg

SEQ ID NO: 10063 - DNA, 203 bp, Homo sapiens; identical to SEQ ID NO: 5639

SEQ ID NO: 10064 - DNA, 3571 bp, Homo sapiens
aggatacaggatgccgtgccctcagggctgtccagaatccctccatgaattgatgaatctgtgttggaagaaggaccctgatgaaagaccaacatttgaatatattcagtccttcttggaagactacttcactgctacagagccacagtaccagccaggagaaaatttataattcaagtagcctattttatatgcacaaatctgccaaaatataaagaacttgtgtagattttctacaggaatcaaaagaagaaaatcttctttactctgcatgtttttaatggtaaactggaatcccagatatggttgcacaaaaccacttttttttccccaagtattaaactctaatgtaccaatgatgaatttatcagcgtatttcagggtccaaacaaaatagagctaagatactgatgacagtgtgggtgacagcatggtaatgaaggacagtgaggctcctgcttatttataaatcatttcctttctttttttccccaaagtcagaattgctcaaagaaaattatttattgttacagataaaacttgagagataaaaagctataccataataaaatctaaaattaaggaatatcatgggaccaaataattccattccagttttttaaagtttcttgcatttattattctcaaaagttttttctaagttaaacagtcagtatgcaatcttaatatatgctttcttttgcatggacatgggccaggtttttcaaaaggaatataaacaggatctcaaacttgattaaatgttagaccacagaagtggaatttgaaagtataatgcagtacattaatattcatgttcatggaactgaaagaataagaactttttcacttcagtccttttctgaagagtttgacttagaataatgaaggtaactagaaagtgagttaatcttgtatgaggttgcattgattttttaaggcaatatataattgaaactactgtccaatcaaaggggaaatgttttgatctttagatagcatgcaaagtaagacccagcattttaaaagccctttttaaaaactagacttcgtactgtgagtattgcttatatgtccttatggggatgggtgccacaaatagaaaatatgaccagatcagggacttgaatgcacttttgctcatggtgaatatagatgaacagagaggaaaatgtatttaagagaaatacgagaaaagaaagtgaaagttttacaagttagagggatggaaggtaatgtttaatgttgatgtcatggagtgacagaatggctttgctggcactcagagctcctcacttagctatattctgagactttgaagagttataaagtataactataaaactaatttttcttacacactaaatgggtatttgttcaaaataatgaagttatggcttcacattcattgcagtgggatatggtttttatgtaaacatttttagaactccagttttcaaatcatgtttgaatctacattcacttttttttgttttcttttttgagacggagtctcgctctgtcgcccaggctggagtgcagtggcgcgatctcggctcactgcaagctctgcctcccaggttcacaccattctcctgcctcagcctcccgagtagctgggactacaggtgcccaccaccacgcctggctagttttttgtatttttagtagagacgcagtttcaccgtgttagccaggatggtctcgatctcctgaccttgtgatccgcccgcctcggcctcccaaagtgctgggattacaggcgtgagccaccgcgcccagcctacattcacttctaaagtctatgtaatggtggtcattttttcccttttagaatacattaaatggttgatttggggaggaaaacttattctgaatattaacggtggtgaaaaggggacagtttttaccctaaagtgcaaaagtgaaacatacaaaataagactaatttttaagagtaactcagtaatttcaaaatacagatttgaatagcagcattagtggtttgagtgtctagcaaaggaaaaattgatgaataaaatgaaggtctggtgtatatgttttaaaatactctcatatagtcacactttaaattaagccttatattaggcccctctattttcaggatataattcttaactatcattatttacctgattttaatcatcagattcgaaattctgtgccatggcatatatgttcaaattcaaaccatttttaaaatgtgaagatggacttcatgcaagttggcagtggttctggtactaaaaattgtggttgttttttctgtttacgtaacctgcttagtattgacactctctaccaagagggtcttcctaagaagagtgctgtcattatttcctcttatcaacaacttgtgacatgagattttttaagggctttatgtgaactatgatattgtaatttttctaagcatattcaaaagggtgacaaaattacgtttatgtactaaatctaatcaggaaagtaaggcaggaaaagttgatggtattcattaggttttaactgaatggagcagttccttatataataacaattgtatagtagggataaaacactaacttaatgtgtattcattttaaattgttctgtatttttaaattgccaagaaaaacaactttgtaaatttggagatattttccaacagcttttcgtcttcagtgtcttaatgtggaagttaacccttaccaaaaaaggaagttggcaaaaacagccttctagcacacttttttaaatgaataatggtagcctaaacttaatatttttataaagtattgtaatattgttttgtggataattgaaataaaaagttctcattgaatgcacctattaatcgttttagttgctattcatattctcattcgttttttaaaaactgatatattctgaatttattcttccattgagaaaaaaatgttcagttacttgtaactactgagcagaatttaatcaatcctttattaaattcagaacattattgaactcattctttgtggtcaattttctttttttttgttttgttttgttttttttttgagacggagtctcgctctgtcgcccaggctggagtgcagtggcgcgatcttggctcactgcaagctccgcctcccggggtcacgccattctcctgcctcggccacccgagtagctgggactacaggcgcctgctaccacgcccggctaattttttgtattttttagtagagacggggtttcaccatgttagccaggatggtctcgatctcctgacctcgtgatccgtccgcttcggcctcccaaagtgctgggattacaggcgtgagccaccgcgcccggcctgtggtcaattttctatgtcaagtgagtgacattatttttacaagtattttcttcttcttaaaattataccagcaaatacagttaatgcagaaacctaagtaatttgagtgtagctattcacaatctatgtgaagaatataaaatagaatgaccagttttattataaattaaggggcttaattttctaaaaaagaaaaaaaatgagccttatctctgtgttttataattatta

SEQ ID NO: 10065 - DNA, 306 bp, Homo sapiens
attattattattttttttttttgagacggagtctcgctctgccgcccaggctggagtgcagtggcgggatctccgctcactgcaagctccgcctcccgggttcacgccattctcctgcctcagcctcccaagtagctgggactacaggcgcccgccactacgcccggctaattttttgtatttttagtagagacgggtttcaccgttttagccgggatggtctcgatctcctgacctcgtgatccgcccgcctcggcctcccaaagtgctgggattacaggcgtgagcccccgcgcccggcctaaa

SEQ ID NO: 10066 - DNA, 294 bp, Homo sapiens; identical to SEQ ID NO: 5640

SEQ ID NO: 10067 - DNA, 5794 bp, Homo sapiens
  SITE (34): n equals a,t,g, or c
tttttttttttttttttttttttttttttttttntgagacaagagtcttgctttgtcacccaggctggagtgcagtggtgcaatctctgctcactgcaacctccgcctcccaggttcaagtgattctcctgcctcagcctcccgagtagctgggattacaggtgtgtgcccaccatgcccagttagtttttatatttttagtagagagggggtttcgccatgttggccaggctggtctcaaactcctgacctcaggtgatccgcccactcagcctcccaaagtgctgggattacagatgtgaaccaccatgcccagctggcatcaaataatttaatagttctaattatcagaaaattctgaagagtgaagttgtttttgtttttgtgtttttgagatggagtcccactctgtcacccaggctggagtgcagtggtgcgatctcagctcactgcaacctccacctcccaggttcaagcgattctcctgcctcagcctcccaagtagctgggactacagatgcccaccaccacgcccagctaattttttgtatttttagtagagacggggcttcaccatgttggccaggatggtctcaatctcttgacctcgtgatctgcctgcctcggcctcccaaagtgctgggattacaggcatgagccaccgcacccggcctttgagtgaagttttgaatgaaagcttattggtaattagaagttattttcataggttccggcttatttggattgcttaatcctaacagtcaattaaaataataagcataaaataaaagaacacagaatggaaaagaagttcaattatagtaagccctcactgaatattaattcccttactccttttctccttcacccaacaacttctagttgtatttccactgttagtaaaatgtactggatttcacttccccaccccgcgagatggagtctcgctctgtcacccaggctggagtgctatggcgcaatctcggctcactgcaacctccgcctcccgttcaagtgattctcccacctcagcttcccaagtagctgggattacaggcacctgccatcatgcctggctcatttttgtagtttgtagagtcgtggtttcaccatgttggcaaggctggtcttgaactcctgacctcagatgatcacccgccttggcctcccaaagcgccaggattacagacgagagccactgtgcccggccagatttcacttatgaagatgacagtacctagttagatgaaaagctcagaaaacttccttttaagtattgagtttcaaagtaatgtcatgtagagttttttttaatagtttaaaaaatgtattttgagaaatcacttattcctcaaaaaaataactaaaaatctaaatagtaatgatttaaccccattacattttctttagagaatcatagactattttaaatatcattcctgattggttgataaagtttccaagagatacaagggatggcctgacttgcaggcagggaaggaaggtgatgcgggagataggacgtgaggtgaggttgctggcttagtgagacactatcaggaagaatttggaaaaggaggcattttgctgtcctgtgataagatggggtgaactgctgatcagggggttgaggaaggggggattacaaaggaatacaagaaaggaactatgtgtaatatcttgaagaaagtcaaacaggtaatattagataaggaaactttcacagaagtaattcaatataaagttatgtagttggtatatttggcaaaaccaagactagaactttcttctgaattcctgttttaaagttctttcagacaggatcttgccaccattcctcagtaacccaagtttggtcattgttaaatgttaatattagaaagtaccagtacctcatagtagcaccctaaattcttattaatcaaatggggttggcttttgaagacattagtattaaaaataagatataagatggaatgaaaaattagacatgttaaaacatagattagcattttctaagctcttcttgatattctcatgtttaaaatttattttgttgctttgttaaaagaattgtttcactaaataatatactttgaatgagttagtggctagggggtttgttatgttttcctagtggtagttaggaccattgttctttaatgttttaatcttgtgtattaggtatggtgaaccgtgaagtactagaacaagtggagcgaggatacaggatgccgtgccctcagggctgtccagaatccctccatgaattgatgaatctgtgttggaagaaggaccctgatgaaagaccaacatttgaatatattcagtccttcttggaagactacttcactgctacagagccacagtaccagccaggagaaaatttataattcaagtagcctattttatatgcacaaatctgccaaaatataaagaacttgtgtagattttctacaggaatcaaaagaagaaaatcttctttactctgcatgtttttaatggtaaactggaatcccagatatggttgcacaaaaccacttttttttccccaagtattaaactctaatgtaccaatgatgaatttatcagcgtatttcagggtccaaacaaaatagagctaagatactgatgacagtgtgggtgacagcatggtaatgaaggacagtgaggctcctgcttatttataaatcatttcctttctttttttccccaaagtcagaattgctcaaagaaaattatttattgttacagataaaacttgagagataaaaagctataccataataaaatctaaaattaaggaatatcatgggaccaaataattccattccagttttttaaagtttcttgcatttattattctcaaaagttttttctaagttaaacagtcagtatgcaatcttaatatatgctttcttttgcatggacatgggccaggtttttcaaaaggaatataaacaggatctcaaacttgattaaatgttagaccacagaagtggaatttgaaagtataatgcagtacattaatattcatgttcatggaactgaaagaataagaactttttcacttcagtccttttctgaagagtttgacttagaataatgaaggtaactagaaagtgagttaatcttgtatgaggttgcattgattttttaaggcaatatataattgaaactactgtccaatcaaaggggaaatgttttgatctttagatagcatgcaaagtaagacccagcattttaaaagccctttttaaaaactagacttcgtactgtgagtattgcttatatgtccttatggggatgggtgccacaaatagaaaatatgaccagatcagggacttgaatgcacttttgctcatggtgaatatagatgaacagagaggaaaatgtatttaaaagaaatacgagaaaagaaagtgaaagttttacaagttagagggatggaaggtaatgtttaatgttgatgtcatggagtgacagaatggctttgctggcactcagagctcctcacttagctatattctgagactttgaagagttataaagtataactataaaactaatttttcttacacactaaatgggtatttgttcaaaataatgaagttatggcttcacattcattgcagtgggatatggtttttatgtaaaacatttttagaactccagttttcaaatcatgtttgaatctacattcacttttttttgttttcttttttgagacggagtctcgctctgtcgcccaggctggagtgcagtggcgcgatctcggctcactgcaagctctgcctcccaggttcacaccattctcctgcctcagcctcccgagtagctgggactacaggtgcccaccaccacgcctggctagttttttgtatttttagtagagacgcagtttcaccgtgttagccaggatggtctcgatctcctgaccttgtgatccgcccgcctcggcctcccaaagtgctgggattacaggcgtgagccaccgcgcccagcctacattcacttctaaagtctatgtaatggtggtcattttttcccttttagaatacattaaatggttgatttggggaggaaaacttattctgaatattaacggtggtgaaaaggggacagtttttaccctaaagtgcaaaagtgaaacatacaaaataagactaatttttaagagtaactcagtaatttcaaaatacagatttgaatagcagcattagtggtttgagtgtctagcaaaggaaaaattgatgaataaaatgaaggtctggtgtatatgttttaaaatactctcatatagtcacactttaaattaagccttatattaggcccctctattttcaggatataattcttaactatcattatttacctgattttaatcatcagattcgaaattctgtgccatggcatatatgttcaaattcaaaccatttttaaaatgtgaagatggacttcatgcaagttggcagtggttctggtactaaaaattgtggttgttttttctgtttacgtaacctgcttagtattgacactctctaccaagagggtcttcctaagaagagtgctgtcattatttcctcttatcaacaacttgtgacatgagattttttaagggctttatgtgaactatgatattgtaatttttctaagcatattcaaaagggtgacaaaattacgtttatgtactaaatctaatcaggaaagtaaggcaggaaaagttgatggtattcattaggttttaactgaatggagcagttccttatataataacaattgtatagtagggataaaacactaacttaatgtgtattcattttaaattgttctgtatttttaaattgccaagaaaaacaactttgtaaatttggagatattttccaacagcttttcgtcttcagtgtcttaatgtggaagttaacccttaccaaaaaaggaagttggcaaaaacagccttctagcacacttttttaaatgaataatggtagcctaaacttaatatttttataaagtattgtaatattgttttgtggataattgaaataaaaagttctcattgaatgcacctattaatcgttttagttgctattcatattctcattcgttttttaaaaactgatatattctgaatttattcttccattgagaaaaaaatgttcagttacttgtaactactgagcagaatttaatcaatcctttattaaattcagaacattattgaactcattctttgtggtcaattttcttttttttttgttttgttttgttttttttttgagacggagtctcgctctgtcgcccaggctggagtgcagtggcgcgatcttggctcactgcaagctccgcctcccggggtcacgccattctcctgcctcggccacccgagtagctgggactacaggcgcctgctaccacgcccggctaattttttgtattttttagtagagacggggtttcaccatgttagccaggatggtctcgatctcctgacctcgtgatccgtccgcttcggcctcccaaagtgctgggattacaggcgtgagccaccgcgcccggcctgtggtcaattttctatgtcaagtgagtgacattatttttacaagtattttcttcttcttaaaattataccagcaaatacagttaatgcagaaacctaagtaatttgagtgtagctattcacaatctatgtgaagaatataaaatagaatgaccagttttattataaattaaggggcttaattttctaaaaaagaaaaaaaatgagccttatctctgtgttttataattatta

SEQ ID NO: 10068 - DNA, 316 bp, Homo sapiens
tattctttttttttattttattttatttttttttgagacggagtctcgctctgtcgcccaggctggagtgcagtggcgggatctcggctcactgcaagctccgcctcccgggttcacgccattctcctgcctcagcctcccaagtagctgggaccacaggcgcccgccactacgcccggctaattttttgtatttttagtagagacggggtttcaccgttttagccgggatggtctcgatctcctgacctcgtgatccgcccgcctcggcctcccaaagtgctgggattacaggcgtgagccaccgcgccggctga

SEQ ID NO: 10069 - DNA, 257 bp, Homo sapiens
tctcgctctgtcgcccaggctggaatgcagtggcgcgatcttggctcactgcaagctctgcctcccgggttcacaccattctcctgcctcagcctcccgaagtagctgggaccacaggtgcccgccaccacgcccggctaattttttgtatttttagtagagacgggctttcaccgtattagccaggatggtctcgatctcctgacctcgtgatccacccgcctcggcctcccaaagtgctgggattacaggtgtga

SEQ ID NO: 10070 - DNA, 318 bp, Homo sapiens
tttttttttttttttttttttttgagacggagtctcgctctgtcacccaggccggactgtggactgcagtggcgcaatctcggctcactgcaagctccgcttcccgggttcacgccattctcctgcctcagcctcccgagtagctgggactacaggcgcccgccaccgcgcctggctaattttttgtatttttagtagagacggggtttcaccttgttagccaggatggtctcgatctcctgacctcatgatccacccgcctcggcctcccaaagtgctgggattacaggcgtgagccaccgcgcccgcccgtgagtc

SEQ ID NO: 10071 - DNA, 3471 bp, Homo sapiens; identical to SEQ ID NO: 5642

SEQ ID NO: 10072 - DNA, 259 bp, Homo sapiens
gtctcattctgtcgcccaggctggagtgcagtggcacgatctccgctcactgcaagctctgcctcccaggtttacgccattctcctgcctcagcctcccgagtagctgggactacaggcacccgccaccacgcctggctaattttttgtatttttagcagagacggggtttcaccgtgttagccaggatggtctctatctcgtgatcttgtgatccgcccgccttggcctcccaaagtgctgggattataggcgtgaaa

SEQ ID NO: 10073 - DNA, 230 bp, Homo sapiens
tggtgcgatctcggctcactgcaagctccgcctcccgggttcacgccattctcctgcctcagccttcggagtagctgggactacaggtgctcgccaccacacctggctaattttttgtatttttagtaaagacggagtttcaccgtgttagccaggatggtcttgatctcctgacctcgtgatccgcccgcctcggcctcccaaaatgctggattacaggcgtgagccac

SEQ ID NO: 10074 - DNA, 277 bp, Homo sapiens
tcttttttttttttttttttttgacggtgtctcgctctgtcgcccagactggagtgcagtggtgcgatctcggctcactgcaagctccgcctcccgggttcacgccattctcctgcctcacctccccagtagctgggactacaggtgcccaccaccacgccaggctaattatttgtatttttagtagagacggggtttcaccatgttagccaggctggtctggatctcctgacctcgtgatccgcccgcctcggcctcccaaagtgctgggattaca

SEQ ID NO: 10075 - DNA, 296 bp, Homo sapiens; identical to SEQ ID NO: 7655

SEQ ID NO: 10076 - DNA, 301 bp, Homo sapiens
attctcttttttttttttttttgagacggagtttcactctgtcacccaggctggagtgcagtggcgcgatctcgactcactgcaagctccgcctcccgggttcacgccattctcctgcctcagcctcccgtgtagctgggactacaggcgcgcgccaccatgcccggctaatttttgtatttttagtagagacggggtttcaccgtgttagccaggatggtctcgatctcctgacctcgtgatccgcccgtctcggcctcccaaagtgctgggattacaggcttgagccaccgcgcccggc

SEQ ID NO: 10077 - DNA, 6141 bp, Homo sapiens
ctcccgagtagctgggactacaggcacccgccaccatgcccggctaattttttgtatttttagtggagacggggtttcaccatgttagccaggatggtctcgatctcctgacctcgtgatctgcccgcctcggcctcctaaagtgctgggattacaggcgtgagccaccgtgcctggcccagtgttgagcttttcttaaaggctgtactcagtgatacagtgataacgtgttagagtcagttagccttatgttcaaatcctatttctctgatattgggaaagtcatttctagaaggtcagctttccttgtctgtaaaatgaggctgacagtgtgcaagattgaggatgcaatgagatactgatcataataaagggtttaatacagaatgcaatttcttaaataatagcttcattgtatgctcggtcacagggagaagttgaccctgtggggaaaatgtttaaaatttgaaaattctttttttttcaaccttttgagtcagggtctctctctgttgcccaggctggagctggaatgcagtggcgggatcacatctcaatgcagccttgacttcccaggctcaagtgatcctcccacttgaggatcctcccacttggccctacaggcgtgtgccaccaggcccagctaattttttttttttttttttttttttttttgtagagacgggggctcaccttgttgcctaggctggtcccgaattcctaagctcaagcaatccacctaccttggcctcccaaagtgctgggattacaggcatgagccaccatgcccggctgtgaaaattatatacattattatattaattatatagtacaaattattatatccctgagcactggcctaactgttctggattaacatctttgtacttttttttgttttagatctttcaagacatttttcccgctccttggcaacttctctcaaccagaggttcagctctgggcactatgggctatgtatcatgtctgcagtaaaaatcgtatgtattcaacatatattcaaaacataatagttttccagctatttttctgtgtaatgattaagttcaagatggatgtgcaaaaattgtctacctctgtcctctgaatttaggtgtgtttaaaaagaaactgaaaaaagatattactagcttaaagcaatgcttcagaattagtaatctatttgggggtagatagcaagcaaaataaaaagtaaaagtttgctcctacttgtattccccacagacaagcaccgttaataatttgatacctaatctcccagatacttttctatatccatgctatatttagtatgtgctgtatatatgaaatatattttttaacaaagtgggctcattctgtgcatgctgtcctatagcttggtcttttcactcaacagtttattgctgacactcttcctttagtaaaacatggacctgcttctgtgtaatggtctctgggagactgggaggccaggagtcaggggttatttcccagacagattaaatatttctgcatgttttgcaatttaaaatcccttttgaggccaggtgaggtgtctcccaaagtgctgggattacagcactttgggaggccgaggcaggagatcgcttgaggccaggagtttgagaccagccagggcaacatagcaagaccccacccatgttttttacattaaaaaaaaaattagccaggtatgtgtggcatccatctagtgaagccaaagtggaagtatcccttaagctcagatttcgagtctgcagtgatctatgttagtgccactgcactctgtcttaaaaaaataaatccccttgagattttccgttgatatcccttgttgagactgttatacaatttttcattgtatataggagatatagctatttattttacacaagaaaacccaagagacactttttagaattaaaagtttagcttgttgactagctgtaaagcaagtgtataaaacccaatagttttataatgccagcaaaaatcagaaaatgtaataagggaaaatataccaccactcactttattaacaaaaacataaagtattttaaaatgcctttaacaggtaatgagacatgcagtaaactatgagataatttaaaagcctgaaataattatgagaccattccattttctaagatggaatgacctattagatatatagatgtcatttcttttcagtttattaatgtaatataattcaactgaataggtaagagatggaggatctgaaaattattctaaagtttatctgacagaatcaacaggaaagaactaacaaaaatgtttgtttgtttttttctgagacggagtttcactcttgttgcccaggcgggagtgcaatggtgctatcttggctcactgcaacctctgcctcctgggttcaagcaattctcctgcctcagcctcccgagtagctgggattacaggtgcccaccaccacacctggctaatttttgtatttttgttagagacagagtttcaccatgttggccaggctggtctcgaacttgtgacctcaggtgatctgcccgcctcagcctcccaaagtgttggaattacaagcatgagacactgcatctggccagaaaaatgttttttatgggctcagcctggtggctcagacttgtattcccagcactttgggaggccaagataggaggatcacttgtgcaggaattcaaggccacagtgagccatgatcaggcaactgcctacttccagcctggggaacagagcaagactcctgtctctaagataagaaagaaggaaagaaatgtggtttttaggagcttgcacatagacttctcttaacattgtaaaatggtgccatgagtggttctgacgtatgaatagatagatagcagatgattggatcagaatagccctgaaacagactcatacagttataacaggagaaactaaccgaaactagaattcagttgagtacttattatgtgccaggcaatgttgtaagcactttatgaataactcatttaatcttcacaacaactagaagggtaagcatcttattttattttatttttaaaatttatttaattttaatttagtttaatttattttatttttgagacagggtctcacttcattgccaaggctgaagtgcagcggcttgatcacagctcactgcagtctcagctcaggtgatgctgtcacctcagcctcccaaatagctgggactatgggtatacaccaccatgcctggggttctccccaaaaagagcaacccttacagtatttttatcagcatcatgttagatttataagtcaacctaaagataattcccatccctatgacaaatgagtatttctttaaaaaaagtatttaattttttttcttttaaattaaaaaaaaaaacacctcaaaacaaaaagcaacagggtcttgctatgttgcccaggctggttgtgaactcctgggcttgagtgatcctcttgcatcagcctcccaaagtgctaggattacaggcatgagccaccatgttcagccacaaatgagtatttctatccaagaacatgactaataaatatattttagttctaccttgttttcatatccttaaagatagtttaggtgttactattttacagtcaaggcttatttcaatttgctaaataccattttttttttttttttgagatggagtctcgctctgtcacccaggctggagtgcagtggtgcactcttggctcgctgcaagctctgcctcccgggttcacgccattctcctgcctcagcctcccaagtagctgggactacaggcgcccgccaccatgcccggctaaatttttttgtatttttagtagagacggggtttcactgtgttagccaggatggtctcgatctccggacctcatgatccacccgccttggcctcccaaagtgctgggattacaggcgtgagccacggcgcctggcctcaatttgctgaataccattttctttgctcatcactgcttgttttttttttttttttcttttttttaacccccaccactccttttctggattcaggttttgatagtgcattactgacaaaatctctttgtcaccccacccctattcttactcttaaataataatatagctggatgtagaattccagatagttacttactttattttagcatttgggagaaaaatattttcttttagttttttttttttttttttttttttggagacagtctctgtcgcccagactggagtgcagtggcgtgatctctgcctcataggttcaaggggttcccctgcctcagcctcctgggtagctgggactataggcatgcaccaccatacctggctaattttttgtgtatttttagtagaaaccgggtttcatcatgttggccattctgggtctcaaagtcctgaccttagatgttcgcctcagcctcccagagtgctgggattacaggcatgagccacgacacctggccattttcattattttctattgttgctgttggggtctactgtcagcctaattatcatttcttgataggtaatttttcttttacttttttttttgaaacagggtctcactctgtcgcccaggctggagtgcagtggcacagtcacagctcactgctgcttcaacctgggctcaggtgactctcccacttcagcctcctgaatagctgggactatgtagcatcacacccagctaatttttttattttttgtagacacatggtctcactacattgccttgatcctcctgcccaggcatcctaaagtgcttagattacaggaatgaaccactatgtctggcctatttctctttaactgggtctaaatctttttcttttcttttcttttttgagacagtttcgctcttgttgcctaggctggagtgcagtggcatgatctcagctcactgcaacctctgcctcctgggttcaagtgactctcctgcctcagcctcctgagtagctgggattacagaggcccaccactatgcccgtctaagtttttgtatttttagtagagaagggatttcaccatgttggacaggctggtctcaaactcctgacctcaggtgatccacccacctcagccttccaaagtgctgggattataggtgtgagccaccgtacccagccaactgggtctaaatctgctcttggactgtctttaatttcagtgatacatttttaaatgtctgaactttttatttgcttcttttccagatattcctattttttttcttctttaaaagtaattattttgtggtctttatctgatcttattatgtgtgttatgttgagtgggggcagttttggattgtgaagtcaactttagcagggcttatttttctgagaattcattttagaatggattggcgtgtccctgaggcggttttgtattcgcttctgtgaagtgctccagaggtttccataggcttgtgctcgtttttttatattaatttctcagcaatattcaggtagtgtaaactcaaaccttattacccacttgggattgtggtcatgagaagatttctcctctcctactcccgtatacccctacagccccatccatgacagagatgcttcagtatcttatcccttttcttatctagccctttgtgggtctacttttatgtaggaatattgcctccaactctgcaagctgaaattgaaatgcctcaattactaagaccgccagtttctttctgccgcaggctaagctgcaggttagcttacactagctgaagtgctctttgtttccagctcctggaaaattcctttagtttgtacattcatctatgcattaaaaaatttgtgaattatattttatttaacatctggtgttttttattttgagacagagtctcgctctgtcgcccaggctggagtgcagtggcgtgatctcggctcactgcaagctcacctcccaggttcacgccattctcctgcctcagcctcccgagtagctgggactacaggtgcccacgaccacgcccagctaatttttttgtatttttagtagagacggggtttcaccgtgttagccaggatggtctcgatctcctgacctcatgatccgcccgcctcggcctcccaaagtgctgggattacaggcgtgagccactgcgcccagccact

SEQ ID NO: 10078 - DNA, 299 bp, Homo sapiens
ttttttttttttttttttttttttagatgtaatctcactctgtcgcccaggctggagtgcagtggcgagatctcggctcactgcaagctctgccccctgggttcacgccattctcttgcctcagcctccccagtagctgggactacaggtgcccaccaccatgcctggctaattttttgtatttttagtagagacggagtttcaccgtgttagccaggatggtcttgatctcctgacctcgtgatccgccggcctcggcctcccaaagtgctgggattacaggcgtgagccaatgcacc

SEQ ID NO: 10079 - DNA, 288 bp, Homo sapiens
ttttttttttttttttttttttttgagacggagtctctgtcatcacccaggctggcgtgcagtggcgcgatctcggctcactgcaagctccacctcctgggttcacgccattctcctgcctcagcctccggagtagctgggactacaggcgcccgccaccacgcccggctaattttttgtatttttggtagagacggggtttcaccgtgttagccaggatggtctctatctcctaaccttgtgatccacctgcctcggcctcccaaagtgctgggattacaggcgtga

SEQ ID NO: 10080 - DNA, 275 bp, Homo sapiens
tttttttttttttttttttttttttttgagacggagtctcactctgtcgcccaggctggagtgcagtggtgcgaggtcggctcacagcaagctccgccttcctggttcacgccattctcctgcctcagcctcccaagtagctgggactacaggcgcccaccaccacacctggcatttttttttgtatttttagtagagacggggtttcaccgtgttagccaggatggtctcgatctcctgacctcatgatccgcctgcctcggcctcccaaaggg

SEQ ID NO: 10081 - DNA, 254 bp, Homo sapiens; identical to SEQ ID NO: 7657

SEQ ID NO: 10082 - DNA, 311 bp, Homo sapiens
ttttttttttttttttttttgagatggaatcttgctctgtcgcccaggttggagtgcaatgtggcacgatctcagctcactgcaagctctgcctcctgggttcacaccattctcctgcctcagcctcctgagtagctgggactacaggtgcccgccaccacgcccggctaattttttgtatttttagtaaagatggggtttcaccgtgttagccaggatggtctcgatctcctgacctcatgatccgcctgcctcggcctcccaaagtgctgggattacaggcgtgagccaccgcgcccgtcaatggaata

SEQ ID NO: 10083 - DNA, 181 bp, Homo sapiens
tcagcctcccgagtagctgggattacaggtgcccaccaccatgcctagctaattttttgtatttttagtagagacggggtttcactgtgttagccaggatggtctcaatctcctgacctcgtgatctgcctgcctcggcctcccaaagtgttgggattacagtcatgagccaccatgccca

SEQ ID NO: 10084 - DNA, 183 bp, Homo sapiens
tcagcctcccgagtagctgggactacaggtgcccaccaccacacctggctaatttttttgtatttttagtagagacggggtttcaccatgttagccaggatggtctcgatctcctgacctcatgatctgcctgcctcagcctcccaaagtgctaggattacaggcgtgagccaccgcgcccag

SEQ ID NO: 10085 - DNA, 301 bp, Homo sapiens
  SITE (204): n equals a,t,g, or c
cgaagaataacttttttttttttttttttgagacggagtctcactctgtcgcccaggctggagtgcagtggcacgatctcggctcactgcaagctccgcctcccgggttcacgccattctcctgcctcagcctcctgagtagctgggactacaggcgcccaccaccacgcctggctaattttttatatttttagtagagacggngtttcaccgtgttagccaggatggtctcgatctcctgacctcgtgatccgcccgcctcggcctccccaagtgctgggattacaggcgtgagccaccg

SEQ ID NO: 10086 - DNA, 182 bp, Homo sapiens
tcagcctactgagtagctgggactacaggtgcccgccaccgcgcctggctaattttttgaatttttagtagagacggggtttcaccatgttagccaggatggtctcgatctcctgacctcgtgatccgcccgccttggcctcccaaagtgctgggattacaggcgtgagccaccatgcccag

SEQ ID NO: 10087 - DNA, 192 bp, Homo sapiens
ttctgcctcaccctcccgagtagctgggactacaggcacccgccaccacgcctggctaattttttgtatttttagtagagatggggtttcaccttgttagccaggatggtctcaatctcctgacctcgtgatccgcccacctcagcctcccaaagtgctgggattacaggcgtgagtcaccgcgccagcccc

SEQ ID NO: 10088 - DNA, 292 bp, Homo sapiens
agagtttgttttgttttgttttgtttgagatggagtctggctctgccacccaggctggagtgcagtggcgcgatctccgctcactgtaagctccgcctcccgggttcacgccattctcctgcctcagcctcccgagtagctgggactacaggcgcccgccaccacgcccagctaattttttgtatttttagtagagacgaggtttcaccgtgttaggcaggatggtctcgatcttctgacctcgtgatccgcccacctcggcctcccaaagtgctgggattacaggcgtcag

SEQ ID NO: 10089 - DNA, 263 bp, Homo sapiens
ttttttttttttttgagatggagtctggctctgtcgcccaggctggagtgcagtggtgcagtctcggctcactgcaagctccgcctcctgggttcacggcattctcctgcctcagcttcccgagtagctgggactacaggcacccgccaccacgcctggctaattttttgtatttttagtagagacggggtttcaccgtgttagccaggatggtctcgatctcctcatctcgtgatctgcctgcctcggcctcccaaagtgct

SEQ ID NO: 10090 - DNA, 3905 bp, Homo sapiens; identical to SEQ ID NO: 7660

SEQ ID NO: 10091 - DNA, 153 bp, Homo sapiens
tcagcctccccagtagctgggactacaggtgcccaccaccacgcccggctaattttttttgtattttttagtagagacgaggtttcaccgtgttagccaggatggtctcgatctcctgacctcatgatccacccacctcggcctcccaaagtg

SEQ ID NO: 10092 - DNA, 275 bp, Homo sapiens; identical to SEQ ID NO: 7661

SEQ ID NO: 10093 - DNA, 248 bp, Homo sapiens
gctgatctatttttttttttttttttgagacggagtctcgctctgtcgcccaggccggactgcggactgcagtggcgcaatctcggctcactgcaagctccgcttcccgggttcacgccattctcctgcctcagcctcccgagtagctgggactacaggcgcccgccaccgcgcccggctaattttttgtatttttagtagagacggggtttcaccttgttagccaggatggtctcgatctcctgacc

SEQ ID NO: 10094 - DNA, 264 bp, Homo sapiens; identical to SEQ ID NO: 7662

SEQ ID NO: 10095 - DNA, 237 bp, Homo sapiens
gagatggagtctcgctgttgcgcaggctggagtgcagtggggcgatctcggctcactgcaggctctggcccgcggggttcacgcctttctcctgcctcagcctcccgagtagctgggactacaggcgcccgccacatcgcccggctaattttttgtatttttagtagagacggggtttcaccgtgttagccatgatggtctcgatctcctgacctcgtgatccgcccgcctcggtct

SEQ ID NO: 10096 - DNA, 310 bp, Homo sapiens
ttttcttttcttttttttttctgagacagagtctcactctgttgcccaggctggagtgcagtggcgtgatctcagcttactgcaagctccacctcccgggttcatgccattctcctgcctcagcctcccgagtagctgggactacaggtgcccaccaccatgcccggctaatttttttgtatttctagtagagacggggtttcaccgtgttagccaggatggtctcgatctcctgacctcgtgatctgcccgcctcggcctcccaaagtgctgggattacaggcgtgagccaccacgcccggccctcagt

SEQ ID NO: 10097 - DNA, 188 bp, Homo sapiens
cttccgggttcacgccattctcctgcctcagcctcccgagtagctgggactacaggtgcccgccaccgcgcccggctaattttttggtatttttagtagagacggggtttcaccgtgttagccaggatggtttccatctcctgacctcgtgatccacccgcctgggccttccaaagtgctgggattac

SEQ ID NO: 10098 - DNA, 280 bp, Homo sapiens
tttttcttttcttttttttttttttttttttttttttatttatttttttttttttgagacggagtctcgctctgtcgcccaagctggagtgcagtggcgggatctcggctcactgcaagctccgcctcccgggttcacgccattctcctgcctcagcctcccaagtagctgggactacaggcgcccgccactacgcccggctaattttttgtatttttagtagagacggggtttcaccgttttagccaggatggtctcgatctcctgacctcgtgatccg

SEQ ID NO: 10099 - DNA, 278 bp, Homo sapiens
attcttttttttttttttttttttgaaacggagtctcggtctgtcacccaagctggagtgcagtggcgcaatcttggctcactgcaagctccgcctcctgggttcacgccattctcctgcctcaacctcccgagtagctgggactacaggcgcccaccaccacgccgggctaatttttgtatttttagtagagatggggtttcaccttgttagccaggatggtctcgatctcctgacctgttgatccgcccgcctcggcctcccaaagtgctgggatt

SEQ ID NO: 10100 - DNA, 176 bp, Homo sapiens
tcagcctcccgagtagctggaactacaggcgcccgccaccacgcctggctagttttttgtatttttagtagagatggggtttcaccatgttagccaggatggtctcgatctcctgacctcatgatctgcccaccttggcctcccaaagtgctgggattacaggcgtgagccactgc

SEQ ID NO: 10101 - DNA, 237 bp, Homo sapiens
tcttttttttttttttttttttttgagatggagtctcactctgtcacccaggctggagtgcagtggcgcgatctcagctcactgcaagctccacctggattcacgccattctcctgcctcagcctcccgagtagctgggactacaggcgcctgccaccacgcccggctaattttttgtatttttagtagagacggggtttcaccatgttagccaggatggtctccatctcctgacct

SEQ ID NO: 10102 - DNA, 238 bp, Homo sapiens
gtttgtttttgtttttgttttttgagacagagtctccctctatcacccaggctggagggcagtggcactatctcagctcactgcaagctccacctcccaggttcacgcctttctcctgcctcagcctcccgagtagctgggactacaggcgcccgccaccacgcctggctaattttttgtatttttagtagagacagggtttcaccgtgttagccaggatgatctcgatctcctgacc

SEQ ID NO: 10103 - DNA, 300 bp, Homo sapiens
ttttttttttgagacagagtcttgctctgttgcccaggaggctagagtgcagtggcgcgatcttggctcactgcaagctccacctcccaggttcacgccattctcctgcctcagcctcccgagtagctgggactacaggtgcccgccaccacgcccggctaattttttgtatttttagtagagacggggtttcaccgtgctagccaggatggtctcgatctcctgaccttgtgatccgtccgcctcggcctcccaaagtgctgggattacaggcgtgacccaccgcgcccagccaaaaat

SEQ ID NO: 10104 - DNA, 294 bp, Homo sapiens
agcttttttttttttttttttgagacagagtctcgctctgttgcccgggctggagtgcagtggcgcgatctcggctcactgcaagtccgctcccgggttcacgccattctcctgcctcagcctcccgagtagctgggactacaggcgcccgccaccacgcctggctaattttttgtatttttagtagagacagggtctcaccgtgttagccaggatggtctcgatctcctgaccttgtgatccgcccgcctcggcctcccaaagtgctgggattacaggcatgagcctccaagc

SEQ ID NO: 10105 - DNA, 281 bp, Homo sapiens
tgttgtcctttttctttttcttttttttttttttgagacggagtctcgctctgtcgcccaggctggagtgcggtggcgcgatctcggctcactgcaagctccgcctcccgggttcgcgccattctcctgccccagcctcccgagtagctgggaccacaggcgcccgccaccgcgcccggctcattttttgtatttttagtagagacggggtttccccgtgttagccaggatggtctcgatctcctgacctcgtgatccgcccgcctcggcctcccaaagtg

SEQ ID NO: 10106 - DNA, 277 bp, Homo sapiens; identical to SEQ ID NO: 7667

SEQ ID NO: 10107 - DNA, 221 bp, Homo sapiens
tttttttgagacagagtctcactctgtcgcccaggctggagtgcagtggcacgatctccgctcactgcaagctctgcctcccaggtttacgccattctcctgcctcagcctcccgagtagctgggactacaggcacccgccaccacgcctggctaattttttgtatttttagcagagacggggtttcaccgtgttagccaggatggtctcgatctcgtgac

SEQ ID NO: 10108 - DNA, 309 bp, Homo sapiens
ttttattttttatttttattattattttttatttttatttttattttttgagacggagtctcgctctgtcgcccaggctggagtgcagtggcgggatctcggctcactgcaagctcagcctcccgggttcacgccattctcctgcctcagcctcccaagtagctgggactacaggcgcccgccactacgcccggctaattttttgtatttttagtagagacggggtttcaccgttttagccgggatggtctcgatctcctgaccttgtgatccgcccgcctcggcctcccaaagtgctgggattacagg

SEQ ID NO: 10109 - DNA, 310 bp, Homo sapiens
attttttttttttttttttttttttttttgagacggagtctcgctctgtcgcccaggctggagtgcagtggcgggatctcggctcactgcaacctccgcctcccgggttcacgccattctcctgcctcagcctcccaagtagctgggactacaggcgcccgccactacgcccggctaattttttgtatttttagtagagacggggtttcaccgttttagccgggatggtctcgatctcctgacctcgtgatccgcccgcctcggcctcccaaagtgctgggattacaggcgtgagccaccgcgcccgtcc

SEQ ID NO: 10110 - DNA, 277 bp, Homo sapiens
  SITE (50): n equals a,t,g, or c
  SITE (51): n equals a,t,g, or c
  SITE (58): n equals a,t,g, or c
gagacagagtctcactctgtcgcccaggctggagtgcagtggcgcgattnnggctcantgcaagctccgcctcccgggttcacgccattctcctgcctcagcttcccgagtagctgggactacaggtgcccgccaccacgcccggctaattttttgtatttttagtagagacggggtttcactgtgttggccaggatggtctcgatctcctgacctcgtgattcgcccaccttggccccccaaagtgctgggataacaggcatgagccaccgcgccc

SEQ ID NO: 10111 - DNA, 273 bp, Homo sapiens; identical to SEQ ID NO: 7668
  SITE (256): n equals a,t,g, or c

SEQ ID NO: 10112 - DNA, 279 bp, Homo sapiens; identical to SEQ ID NO: 7669

SEQ ID NO: 10113 - DNA, 225 bp, Homo sapiens
ctccgcctcccgggttcacgccattctcctgcctcagcctctcgagtagctgggactacaggcgcccgccaccaagcccggctaattttttgtatttttagtagagacggggtttcaccgtgttagccaggatggtctcgatctcctgacctcgtgatccgcccgcctcggcctcccaaagtgctgggattacaggcgtgagccaccgcacccagcctacaatga

SEQ ID NO: 10114 - DNA, 295 bp, Homo sapiens
ttttttttttgagacagagtctcgctctgtcacccaggctggagtgcagtggtgtgatctcggctcactgcaagctctgcctcccgggttcatgccattctcctgcctcagcctcctgagtagctgggactacaggtgcccaccaccacgcctggctaattttttgtatttttagtagagatggagtttcaccgtgttagccaggatggtctctatctcctgacctcgtgatccgcctgcctcggccttccaaggtgctgggattataggcgtgagccaccgcgcccggccggca

SEQ ID NO: 10115 - DNA, 243 bp, Homo sapiens
aattttttttttttttttttttgagacggagtctcgctctgtcgcccaggctggagtgcagtggcgtgatctcggctcactgcaagctccgcctcccaggttcctgccattcttctgccttagcctcccgagtagctgggactacaggcgcccaccaccacgcccggctaattttttggatttttagtagagacggggtttcaccgtgttagccaggatggtctcgatctcctgacctcgtga

SEQ ID NO: 10116 - DNA, 320 bp, Homo sapiens; identical to SEQ ID NO: 7671

SEQ ID NO: 10117 - DNA, 311 bp, Homo sapiens
  SITE (11): n equals a,t,g, or c
ttttttttttnttttttgagacggagtctcgctctgttgcccaggctggagtgcagtggcgccatctcagctcactgcaagctccgcctcccgggttcacgccattctcctgcctcagcctcccaagtagctgggaccacaggtgcccaccaccatgcctggctaatttttttgtatttttagtagagacggggtttcaccgtgttagccaggatggtctcgatctcctgacctcgtgatccacccgcctcggcctcccaaagtgctgggattacaggcgtgagccaccgcacccagcctcttcctcttct

SEQ ID NO: 10118 - DNA, 274 bp, Homo sapiens; identical to SEQ ID NO: 7672

SEQ ID NO: 10119 - DNA, 308 bp, Homo sapiens; identical to SEQ ID NO: 5643

SEQ ID NO: 10120 - DNA, 300 bp, Homo sapiens; identical to SEQ ID NO: 7673

SEQ ID NO: 10121 - DNA, 279 bp, Homo sapiens
tttgttttgttttgttttttatttgagacggagtcttgctctgttgcccaggctggactgcagtggcccgatctccgctcactgcaagctctgcctcctgggttcacaccattctcctgcctcagcctcccaagtagctgggactacaggcgcccgccaccacgcccggctaattttttgtatttttcatagagacagggtttcaccgtgttagccaggatggtctcgatctcctgacctcgtgatctgcccgcctcggcctcccaaagtgctgggatt

SEQ ID NO: 10122 - DNA, 266 bp, Homo sapiens
tttcttatttctttttttttgagatggagtctcgctctgtcgcccaggctggagtgcagtggtgcgatctcggctcactgcaagctccgcctcccgggttcacaccattctcctgcctcagcctcccgagtagctgggaccacaggcgcccaccaccacgcccgggtaatttttttgtatttttagtagagacggggtttcaccgtgttagccaggatggtctcgatctcctgaccttgtgatccgcccgcctcggcctcccaaat

SEQ ID NO: 10123 - DNA, 322 bp, Homo sapiens; identical to SEQ ID NO: 5644

SEQ ID NO: 10124 - DNA, 5125 bp, Homo sapiens
accccaccgtgaaggacctcatcagctttggcctgcaggtagcccgcggcatggagtacctggcagagcagaagtttgtgcacagggacctggctgcgcggaactgcatgtgagagtccagagtagctggggtgaagcaaaaggacagggcatgagggtgtgcggtgctcaaggccgcctcagggaagggcccactccagccttgtcctcccctctctgcaccttactttttttgtctgcccagtgcagacttggactggacactgtggctttgaaatttggccaggcgcggtggctcacgtctgtaatcccagcactttgggaggctgaggaaggcggatcatgaggtcaggagatcgagaccatcctggctaacacggtgaaaccccgtctctactaaaaatacaaaaagattagccaggcgtggtggcgggcccctgtagtcccagctactcaggaggctgaggcgggagaatggcgtgaccccaggaggcagagcttgcagtgagcggagatcgcgccactgcactccagcctgggtgacagagcgagactccgtctcaaaaaaaaaaaaaattctgtaagggcctagaacaggtgggttcagggcctggtaagggccagtcctaagtgtgatcctctccctacccctaaggctggacgagtcattcacagtcaaggtggctgactttggtttggcccgcgacatcctggacagggagtactatagtgttcaacagcatcgccacgctcgcctacctgtgaagtggatggcgctggagagcctgcagacctatagatttaccaccaagtctgatgtggtgaggccccacctgccctacagtccacatggctttggcacccaagaacactgggcctcacccattcagctctgaatgatctgagcccagggagtccccagggtagatgacccccacagcccatctgctcacctcttgggcagatgtaagatggaatctgacacctgccagggctagaggaggctgggaactcactggctcctcacagataatccagggcctgcccagccccaactctgggtaggatgaggtagtgggaggagacagaggaaagacacaggtgatgtattgaggaatgagctctcagtggagggtagggtcttccatttccagctgaaggactctgggaggtagaagcccctgggggacccacctgcccccaaatttggggtgagttgagtcccctcacctccccctttccacagtggtcatttggtgtgctgctgtgggaactgctgacacggggtgccccaccataccgccacattgacccttttgaccttacccacttcctggcccagggtcggcgcctgccccagcctgagtattgccctgattctctgtgagtatgtggaggtggtagtggggagggaactgggccccagagacatggaagagacaggagacagagctcctgcctggcttcctgactgaacttctggttgactaggaaagggactctcgctgggcctcaatttcctcatctgtgaactggtcccaccctcatgcagagtaggaccctgggaggacctcacagttgccatggtaacagcattctgagctcagagttggggttgaggcccgtggtttgattttcccagtgctcctcctacccgactcccactaacggggtctgctttccaccttttcctctcatttaatctcgaggaaagattccataacccccacagcaaccccctctggatctccaggtcaggttttttcactgtatgtggtttcagattccccattcctggagggatggcggcagctgcattgtcctcagtgcctacggggtgggttcggtgctgaggttcagcttcatacgtagcaggtgtgcctgagctgtggctaggtctgctgggttagaacagagagaaccaggacataggtaaaagtagttaacgcctcctgtctcaggctgtgctccaagaaggatgcgagtagcccttcctcacagtcctacctgccttgggtttgctcttactattcacttctttaattcactgcctacccatatccagattgggctcctggaaacagactcagctggagatttatgtacggggatttactgagaggttgggggcaagggaagaaggactgggcaggagaaatgtcacagaaactgcagcccatcccacagggactgcttgaactgggatgacccaccacagttttctgaaattgagaccaacaggccaggtctttgtaccaggcattaatcagttactagtcacaggctgtccctggtgaggggatgtgagcttggcagaggcagttctcttctgcctagggcaattcctagagagagcctcagtcaagaaccatcagcaggcaacactcctagccactgggaaagtaaaggggtatctgggtggcacaccatagggtccacttcagcagtccagcccttctcctctctgggcctcaatttcctcatctgtaaagtggagacaacagtaccaccttccgagagtctgagaattatatgagatattgtgtgtagggtagagtattatttcaggcaggaatgacatccccaagataatggggcaggcactaggacccagcaggtaaacctggggaacctctgcttcaggaccagggtgccactggtgctgccccaaatgctcttgcttcagaatttttttttttttttttgagacagagtctcactctgatgcccaggctggagtgcggtggcgcaatgttggctcactgcaacctctgcctcccaggttcaagtgattctcctacctcagcctcctgagtaactgggactacaggcgtgtgccaccacgcccagtaattttttttttttttttttgagatggagtctcgctctgttgcccaggctggagtgcagtggtgcaatctcggctcactgcaagctccgcctcccgggttcacgccattctcctgcctcagcctcccgagtagctgggactacaggcgcctgccacgacgcccggctaatattttgtgtttttagtagagacggggtttcactgtgttagccaggatggtctcgatctcctgacctcgtgatccacccaccttggcctcccaaagtgctgggattacaggcgtgagccaccacgcccagctttgcccagttaatttttgtatttttagtagagatggggtttcactatgttggccaggctggtctcgaactcctgacctcgtgacctgcccacctcagcctcccaaagtgctgggattacaggcatgagccactgcccccggccacttcaggatttttaattcctgctttgctggacccaggcttccttcctggaagaactgtgatgatgaccattgtacctcgtgagctgggccttgtgcctagcacttcacaggcatcagcctatatgcctacttctctgtgatcagaggaggacccagaggcacagagaagttaaggaacttatccaagatcacatagcccaggccacagggcacaggagcccaagctcttaacacctgaggtagttcgacctctgccagggtgggaaggcaggactggaacagtaatcatagggatgagaagagctgcccctgattgggtagtgctaggtactaggtcctgtcatctatcctcatccctgtgtggcctgccagaggtttaacagcaagtgggtggcccagaatccttgggtggaaattgccttaacctgacatccctttcccccaacaggtaccaagtgatgcagcaatgctgggaggcagacccagcagtgcgacccaccttcggagtactagtgggggaggtggagcagatagtgtctgcactgcttggggaccattatgtgcagctgccagcaacctacatgaacttgggccccagcacctcgcatgagatgaatgtgcgtccagaacagccgcagttctcacccatgccagggaatgtacgccggccccggccactctcagagcctcctcggcccacttgacttagttcttgggctggacctgcttagctgccttgagctaaccccaagctgcctctgggccatgccaggccagagggcagtggccctccaccttgttcctgccctttaactttcagaggcaataggtaaatggggcccattaggtccctcactccacagagtgagccagtgagggcagtcctgcaacatgtatttatggagtgcctgctgtggaccctgtcttctgggcacagtggactcagcagtgaccacaccaacactgacccttgaaccaataaaggaacaaatgactattaaagcacaaattgtagcaaacagtgtgaaagaatgacaggaggctgctataaatagctgaatagagaggcaagggaagcctcccaggaggtgacattttgctgaggccttatcaaccggggaaaaaccaccagaaacagtgttgaggaaagagggtttttggcagagagtcacacatgcaaagaccctgaggctggaaaggagttggatcagcaagaaggattttgagaacagggagggtgagcaaggcccagatccaggtcctagggctctggggactgttagatggaaccaaggaagtaggctgagtacccaagcatgcagtgaccaggatggtttcttccatggctcaggctgcctcctcccctttccccagccctagcacttctccagggctccctgctcgatctgcagtgcccaccgtcacaccatccaggatggaatggggcctgccatctggggcatagaggcttgggtcccagcaacactgccagcattgattgcgcttgtagccttaagagagataagccagcagcaaggcctcaactccacactttctttttttttttttgagacggagtctcgctctgtcgcccaggccggactgcggactgcagtggcgcaatctcggctcactgcaagctccgcttcccgggttcacgccattctcctgcctcagcctcccgagtagctgggactacaggcgtccgccaccgcgcccggctaattttttgtatttttagtagagacggggtttcaccttgttagccaggatggtctcgatctcctgacctcatgatccacccgcctcggcctcccaaagtgctggga

SEQ ID NO: 10125 - DNA, 41 bp, Homo sapiens
tcctgcctcagcctcccgagtagctgggactacaggcacct

SEQ ID NO: 10126 - DNA, 4727 bp, Homo sapiens; identical to SEQ ID NO: 7677

SEQ ID NO: 10127 - DNA, 270 bp, Homo sapiens; identical to SEQ ID NO: 7678

SEQ ID NO: 10128 - DNA, 296 bp, Homo sapiens
tttttttttttttttttgagacggagtctcgctctgtcgcccaggccggactgcggactgcagtggcgcaatctcggcttactgcaagctccgcttcccgggttcacgccattctcctgcctcagcctcccgagtagctgggactacaggcgcccgccaccgcgcccggctaattttttgtatttttagtagagacggggtttcaccttgttagccaggatggtctcgatctcctgacctcatgatccacccgcctcggcctcccaaagtgctgggattacaggcgtgagccaccg

SEQ ID NO: 10129 - DNA, 160 bp, Homo sapiens
ctgcctcagcctcctgagtagctgggactacaggcgcccaccaccacgcctggttaattttttgtatttttagtagagacggggtttcaccatgttagccaggatggtctcgatctcctgacctcgtgatccaaccgccttggcctcccaaagttctggg

SEQ ID NO: 10130 - DNA, 237 bp, Homo sapiens
tttctttctttctttttttcttttcttttttttttttttgagacggagtcctgctcagtcgcccaggctggagtgcagtggcgcgatctccgctcactgcaagctccgcctcccgggtccacgccattctcctgcctcagcctcccgagtggctgggactacaggcgcccgccaccacgcccggctaattttttgtatttttagtggagacggggtttcaccgtgttagccaggatg

SEQ ID NO: 10131 - DNA, 186 bp, Homo sapiens
tcagcctcccgagtagctgggactacaggtgcccaccaccatgcccagctaattttttgtatttttagtagagacttggtttcaccgtgttagccaggatggtctcaatctcctgacctcatgatccacccgcctcagcctcctaaagtgctgggattacaggcatgagccaccgtgcccagccaa

SEQ ID NO: 10132 - DNA, 307 bp, Homo sapiens; identical to SEQ ID NO: 5645

SEQ ID NO: 10133 - DNA, 306 bp, Homo sapiens
agtctttttttttttttttttgagacggattctcactctgtcgcccaggctggagtgcggtggcgcgatctcggctcactgcaagctccgcctcccgggttcacgccattctcctgcctcagcctctctgagtagctgggactacaggtgcccaccaccacacccggctaattttttgtatttttagtagagacagggtttcaccgtgttagccaggacggtctcgatctcctgacctcgtgatccgcccgcctcggcctcccaaagtgctgggattacaggcgtgagccactgcgcccggcccca

SEQ ID NO: 10134 - DNA, 5775 bp, Homo sapiens; identical to SEQ ID NO: 7683

SEQ ID NO: 10135 - DNA, 738 bp, Homo sapiens; identical to SEQ ID NO: 7684

SEQ ID NO: 10136 - DNA, 214 bp, Homo sapiens; identical to SEQ ID NO: 5646

SEQ ID NO: 10137 - DNA, 129 bp, Homo sapiens
ccgggcacggtggctcatgcctgtaatcccagcactttgggaggccgaggcgggtggatcacgaggtcaggagatcaagaccatcctggttaacatggtgaaaccccatctctactaaaaatacaaaaa

SEQ ID NO: 10138 - DNA, 126 bp, Homo sapiens
gatcctacgacaggacccagatgccagtgaaagtgaccacagccctgctctagtcaccccggaagctgaccagtctacgcacggccgaagcttcgtcaaggaagtaaatgtagttagaaatcttaa

SEQ ID NO: 10139 - DNA, 1669 bp, Homo sapiens
  SITE (7): n equals a,t,g, or c
gtgtganagactgggtcttgctctgttgcccaggccggaatgcggtggcaggatcagtgctcactgcagccttgacctcctgggcctacatatcctccagcctcagcctcccaggtagttgggaccacagtcatgagccaccatgcctggcaaattttttacaattttttttttttttggtagagataggatctcccatttccctatgttgtccaggctggtctcaaactcctgggctcaagtggtcctcctgctttgtttggccttctaaagtgctaaaatttacaggcgcggccactgtgcctggctttttctacacttgtttctttccttagctagagctattagaaatgaagagctgcttgctggtgggagcacagtaaatgtgagctgccatctacttactactggatccaagatgcttgaaagcaaaactcttctgttcagggatgacctgaggatgtaagaataattaagagtgatggaactttttcttttttgaagagttggagtctcactctgtcatgcaagctaaagtgacacacgatcatggctcactgcagccttgaactcctgagctcaagcagtccttctgtctcagtctctctagtagctaggactgcagatgtgaatcaccacacctagctaactaaaagaaaatctttttttaagagacagggtctcactatgttgcccaggctgaaagaactttaatatttatgtgtacttgtttatgtagtgtagaaccttccctcccatgttgatattattaatttgggaaagaaagggggtcgatgaccacttgtaaagaattgtgcccttggaattttgtgtggttcttttttgtttttgacttgttagggagaatgtcaaacatatataaaagtagactaaacagtgagatgaacatccaaatatccattattcaaagattgcttctgtaataaactcacagccaatgcggtttcatctgtacccacacccctttcttcttttcatatattttttttcattttaagcatttgcaataacttatttacctaaccacctattggtagatatttgagtattaaaccattaaaaaatttttgtaattaataccctttcttgctttgtggtcttgtgtgagttttttaaagataaattccctagaaggggtgttgggtcaaaggacatgcattaggcatgttttagtttttgtaattttcttccaattttgagatgtcatcacattgctttccaacaaacctgtactaatttacgtttttgctgagttctcactttgtctttcacctagaatcactgtttgctttctctctttgtcttttatatatgtgtatatatgtaatatatgtatatataggcatatatatgtatttatatagtcccctgtgaaacatttgaggctctattgcagacattataactcagtactcttaatactttaatgtacatctctaagaataagacattttcctaatgtaattgtgtgatcacaatacagtgaccacacttttaaaacttaaaaaaattccaaatatcagtttgttttattggtaaatattttagtgtgccagacattaagtcctctttgttgttgttgaaacataaacaaaatactgtttttttaatgctttcaaagaggaaggcattgcaaaaaaaaaaaaaa

SEQ ID NO: 10140 - DNA, 315 bp, Homo sapiens
ctgggctgggtgatttctttttttttttttttttttattgagacggagtctcgctctgtcacccaggctggagtgcagtggtgcgatcttggctcactgcaagcttcgcctcccgggttcacgccattctcctgcctcagcctcccaagtagctgggactacaggtgcccgccaccacgcccggctaattttttgtatttttagtagagacaggtttcgccgtgttagccaggatggtctcgatctcctaaccccgtgatccacctgcctcggcctcccaaagtgctgggattacaggcgtgagccactgcggcc

SEQ ID NO: 10141 - DNA, 122 bp, Homo sapiens
cacgcctgtaatcccagcactttgggaggccggggtgggcggatcacgaggtcaggaaatcaagaccatcctggctaacacggtgaaaccctgtctctactaaaaatacaaaaaattagccg

SEQ ID NO: 10142 - DNA, 1238 bp, Homo sapiens
ttaagtggtctgcccttccactgaaagtgtagctttttgacagtctcagccatataaacaggatctcagtttcatccttccatccatccattagaggcacaaggtctcatctcttttccttttgggcattaaaaccaaagttcatacattattgagacaggccgactctgctaaggcagcctgtttggcctttaagttttattgcttattttttgagtatgtatttatttttttgattattattattttttttttgagctttaagccttcaagtttcctttttattcttgacccctagacatttcctttgcttgtggactcgggtatttgtttttaggtaatattttttttccctatgacacagccctcaggagatcctgagaacatgtgccctcatttttaggtaattttaattaggaagggttttaggttgtctgatctgccttgttgctagaaacagaaattctcctattgattgatttttcaaaccacttcttagtggcctctacaactactccagtcaggtcaagaatggctctcacattgccaagtcagtgggtatttttagtcttcatcttagatgacctttatgcacatttgtctttgtctaggaacttctgttggaaacatcttctattttaatgttattttaaatttttttgcttttgtaacattatgcttagcatgtgtgtccaactctttgacaatttctttttagttttctggtggcttccctttatccaaatttagtattgaaattcctcgagccgctgcttttctcactccataattctggccagaatttggtacttaaaatattttgtctaaaatattacaatagctacttaagtcatctccctgactccactctgttgtctttcagggcgtcgtccacactgtagccaaagtgatcttataaaaacataattctaatcatggcactcttctgcttaaaaatgttttaatggctttccgttaggttaaaatttaaaagtcctttgtagcctgtgagactctacatgagttgactccctagcttcatctttgagcatcttatttctttacttattataccatcagttagagttgattgttatataatccacagaagtgaattctgtctgatttaagcaaaaaaaaaaaaaaaaaaaaaaagagggagaatttattaggtgtgtatagttacagttaatttagggaattaaaagacagaaataggccgggcatggtggctcatg

SEQ ID NO: 10143 - DNA, 1112 bp, Homo sapiens
ttaagtggtctgcccttccactgaaagtgtagctttttgacagtctcagccatataaacaggatctcagtttcatccttccatccatccattagaggcacaaggtctcatctcttttccttttgggcattaaaaccaaagttcatacattattgagacaggccgactctgctaaggcagcctgtttggcctttaagttttattgcttattttttgagtatgtatttatttttttgattattattattttttttttgagctttaagccttcaagtttcctttttattcttgacccctagacatttcctttgcttgtggactcgggtatttgtttttaggtaatattttttttccctatgacacagccctcaggagatcctgagaacatgtgccctcatttttaggtaattttaattaggaagggttttaggttgtctgatctgccttgttgctagaaacagaaattctcctattgattgatttttcaaaccacttcttagtggcctctacaactactccagtcaggtcaagaatggctctcacattgccaagtcagtgggtatttttagtcttcatcttagatgacctttatgcacatttgtctttgtctaggaacttctgttggaaacatcttctattttaatgttattttaaatttttttgcttttgtaacattatgcttagcatgtgtgtccaactctttgacaatttctttttagttttctggtggcttccctttatccaaatttagtattgaaattcctcgagccgctgcttttctcactccataattctggccagaatttggtacttaaaatattttgtctaaaatattacaatagctacttaagtcatctccctgactccactctgttgtctttcagggcgtcgtccacactgtagccaaagtgatcttataaaaacataattctaatcatggcactcttctgcttaaaaatgttttaatggctttccgttaggttaaaatttaaaagtcctttgtagcctgtgagactctacatgagttgactccctagcttcatctttgagcatcttatttctttacttattataccatcagttagagttgattgttatataatccacagaagt

SEQ ID NO: 10144 - DNA, 294 bp, Homo sapiens
atcagcactgaatacttatgtatttcttacaaacaaggacattctcctacaatatcacagtatagctattaagaacagaaaattaacactgctatattactaccatctagttttcaaatgccattcaagttttggcagttgtcaatgtttttggagatcacagcgtagttgttttggattttatttttcattactaaattcagattatgttttggggggcaggaattttatagaaattatctttgcagtgcatattatcaataacacataatcaggctttcccaatgtaaaggt

SEQ ID NO: 10145 - DNA, 140 bp, Homo sapiens
gtctctactaaaaatacaaaaattagccaggcatggtggaaggcgcctgtaatcccaactactcaggaggccgaggcaggagaatcgcttgaacctgggaggtggtggttgcagtgagctgagattgtgccattgcactc

SEQ ID NO: 10146 - DNA, 294 bp, Homo sapiens; identical to SEQ ID NO: 10144

SEQ ID NO: 10147 - DNA, 299 bp, Homo sapiens
gggaaaataggcagcatgctaggtgtctttcagtgtctgggggctcgtgaggaccacctgttgttggacagtgagaaaggctaatgtttcttgttcttggttgaatcttgtatttaaaaaagtcattcaaaaacaatgtatttttatagttttgatgtaagtctaagaaaagtggaaaaatatgatatggaataggagtcttcttttggccatttactttctgtgtggccttagacaagttacctatttttctgaatctcctttcttgaacctttttgtaaattaaaaaaaaaaaaaaa

SEQ ID NO: 10148 - DNA, 277 bp, Homo sapiens
ccagcactttgggaggctgaggtgagtggatcacttgaggtcaggggttcgagaccagcctggccaacatggtgaaaccctgtctctactaaaaatacaaaaattagcccggtgtggtggcaggggcctgtaatcccagctactcagggggctgaggcaggagaatcacttgaacccgggaggtggaggttgcagtgaacggaggttgcgctactgcattccagtctgggtgagaaagtgagactctgtctcaaaaatttaaaaaaaaaaaaaaaaa

SEQ ID NO: 10149 - DNA, 2297 bp, Homo sapiens
tataatctgtgttataataggttctttcactttattgcttattgtaaacactttggccatagcaaatgttagtttttaaataaccgtaattcaaaactttcacatcctatactatttttccccaagaagcatcatctatgaaaacaatcagtgaactccaacagtctatactggtaatgtgcacattgatgctattatgacacttaatacaaatagtaaaaatactcatctattgtaggcttatgggtttgtaaaatgccttaagggaggccataaacaactcaaagaagagatggtgtggactgaactggcttctatttggggaaaatttgcagaatataggaggtacgcaataaatgtttattgatggtgaagatgagaaaaccctatttctgctgatctttcctttccgttttccttaaagaatataaggtatatttgtattcagcattctcagaatcatcacagaaaccctggcactttgagagtcttagccacagtgtaattgggtctgaccacacgcagaagaaaaataaattaaagcatatgtactattaaaattgcactgaaaactttatgtaagtcagggagcccctcaccagaacaggctgaaactcttgaatgctttgcatcctcatatataagaaaatcatcagtgcttaaagatcaaggaactcattcaaaacaaattcagcctttggaccttactggcaggtaggttatatttcagtcagatcaatatctttctaatataggtatttgaaagtaatatatgctacttataataatgatatagtaagcttcttatctgcaagtacaggtactataacttacaccttaaaatgctttgtttgattgtttcattcagcaaaattcttggcactgttttgggatttcactgaattttgatgatgatattggattaagcattttagatttaattgtaaaatgacacaaaaatctaatcatctatttccaatgttcaatatacaatttttataaatacatgaaacaattcatataaaaatataaatgttaaggtcactcacagcaaaatatggcacattagaattatttattaaatgctttatacatataaaggtaggcacttcataaaatttgcattttggtaaaaggcaacaatttgatgtcagtatcttaattgtgtcattaacttttttaagagaacagattatcaaaattttacgaagaagaaaaaaataatagttttaaggaaatctacagaagggaatctgaacttcatttcccactttatttttgcgagtctgttgtgtatcttcatggtcaagttctgagatttttgctccctgacctaaaatcctgtgggaataattgatttctcatcttttacttggaagtgaagtgtctgctacctgtggaacttgatacaattttttttttctccccacagttagaataacctttattctgatccactataaagccagatgatttttaggtggcagtagctggcattgaagagttcttggcttcaagcggctgttgagtctttttggtcttgttttaactccctaattaaataaataagatccaactctttctgttgtattcactcctggacatatagaaattcacttcacacccacctaaaatacgagcagaacttctgaggcccaatgaacccatctactatttgattttgttatcccttctggagcgtgtctctaccaagagcttcacaaagcaatctagtcattgctctttcttgtactaaaaccagagtacccgtcctgtaacttccatcaggacctcaaacagtgctaggcacatagtaaactcttaggcactcaaaatacatttattgatgaatgaaagaatgaacaattctagttctgacttttaaagctatatagaataaagttgcttccttgtgtgggccaaatcattctcccatcctacttagatcttctttttttccaggatcaatactgaaactttcttcacctagcccttaaacaacatgattatcagatattttgtcaattacattactcttccctgaatgtgcttaggtggatcagcagatctcttaaaatgtggttccatagaaccaaacattaatactccagatggggtcagctttgagcagagtagaaatcctatatctcctagcagggatattccacctgacacattatctgaccccaaaaagtattccttggagcaattctttcctgcctgtttctgagtagaggcattttattccaggcaagatcgcccattggcacatgttctgttctgggagatagattatt

SEQ ID NO: 10150 - DNA, 2293 bp, Homo sapiens
tataatctgtgttataataggttctttcactttattgcttattgtaaacactttggccatagcaaatgttagtttttaaataaccgtaattcaaaactttcacatcctatactatttttccccaagaagcatcatctatgaaaacaatcagtgaactccaacagtctatactggtaatgtgcacattgatgctattatgacacttaatacaaatagtaaaaatactcatctattgtaggcttatgggtttgtaaaatgccttaagggaggccataaacaactcaaagaagagatggtgtggactgaactggcttctatttggggaaaatttgcagaatataggaggtacgcaataaatgtttattgatggtgaagatgagaaaaccctatttctgctgatctttcctttccgttttccttaaagaatataaggtatatttgtattcagcattctcagaatcatcacagaaaccctggcactttgagagtcttagccacagtgtaattgggtctgaccacacgcagaagaaaaataaattaaagcatatgtactattaaaattgcactgaaaactttatgtaagtcagggagcccctcaccagaacaggctgaaactcttgaatgctttgcatcctcatatataagaaaatcatcagtgcttaaaaatcaaggaagtcattcaaaacaaattcagcctttggaccttactggcaggtaggttatatttcagtcagatcaatatctttctaatataggtatttgaaagtaatatatgctacttataataatgatatagtaagcttcttatctgcaagtacaggtactataacttacaccttaaaatgctttgtttgattgtttcattcagcaaaattcttggcactgttttgggatttcactgaattttgatgatgatattggattaagcattttagatttaattgtaaaatgacacaaaaatctaatcatctatttccaatgttcaatatacaatttttataaatacatgaaacaattcatataaaaatataaatgttaaggtcactcacagcaaaatatggcacattagaattatttattaaatgctttatacatataaaggtaggcacttcataaaatttgcattttggtaaaaggcaacaatttgatgtcagtatcttaattgtgtcattaacttaagagaacagattatcaaaattttacgaagaagaaaaaaataatagttttaaggaattctacagaagggaatccgaacttcatttcccactttatttttgcgagtctgttgtgtatcttcatggtcaagttctgagatttttgctccctgacctaaaatcctgtgggaataattgatttctcatcttttacttggaagtgaagtgtctgctacctgtggaacttgatacaattttttttttctccccacagttagaataacctttattctgatccactataaagccagatgatttttaggtggcagtagctggcattgaagagttcttggcttcaagcggctgttgagtctttttggtcttgttttaactccctaattaaataaataagatccaactctttctgttgtattcactcctggacatatagaaattcacttcacacccacctaaaatacgagcagaacttctgaggcccaatgaacccatctactatttgattttgttatccctgctggagcgtgtctctaccaagagcttcacaaagcaatctagtcattgctctttcttgtactaaaaccagagtacccgtcctgtaacttccatcaggacctcaaacagtgctaggcacatagtaaactcttaggcactcaaaatacatttattgatgaatgaaagaatgaacaattctagttctgacttttaaagctatatagaataaagttgcttccttgtgtgggccaaatcattctcccatcctacttagatcttctttttttccaggatcaatactgaaactttcttcacctagcccttaaacaacatgattatcagatattttgtcaattacattactcttctctgaatgtgcttaggtggatcagcagatctcttaaaatgtggttccatagaaccaaacattaatactccagatggggtcagctttgagcagagtagaaatcctatatctcctagcagggatattccacctgacacattatctgaccccaaaaagtattccttggagcaattctttcctgcctgtttctgagtagaggcattttattccaggcaagatcgcccattggcacatgttctgttctgggagatagattatt

SEQ ID NO: 10151 - DNA, 2293 bp, Homo sapiens; identical to SEQ ID NO: 10150

SEQ ID NO: 10152 - DNA, 1265 bp, Homo sapiens
ttctcgaatctgctggcagcatgtcagtattgcaatggctctagcctcattctccatttctctgcacaggatgttacttcccccatgaggtctggcttattacatgagcctgtatttataaaactgcaacttccgattccccaaccccgttgtttcttctccccagaacactaggcaccatctgatctaccatgccttttccttattgtcagatactgaactctcagatacagttccccttcctccctccaggggggcgccatggaacgcaggccctcactggccctggggactgggtgacgacagggggagcctctggtgattggctccctcaccctgcgtaagatcaaagggactaaaggacagccccgacacccggagccattgtggctcaggccggttgcgcctgccctcgggccctcacggaggcgggggttccagggcacgagttcgaggccagcctggtccacatgggtcggaaaaaaggattttttttatcgttcccaatataacgacaaaacataaagggaggacgccttgataggaagaaatgacatcttcctaagtgtttttaaattacttccatgtgtcttttttttttttttttttgggagaccgagccttgctctgttgcccaggctggagtgcagtggtgtgatcttcgctcactgcaacctccgcctcgtcggttcaagggagtctcctatctcagcctcctgagtagctgggattacagtcgcctgccaagagatggggtttcgccatgttgaccaggctggtcttgaacacctggcctcaaatgatccactcgccttggtctcccaaagtggtaggatgacaggcgtgagccaccgcggccagcctcttctattcttttagagacagggtctcactccgttgcccaggctggagtgcattgatgtgatgtgtgatcatagctcattgcagccctgaccatccgagctcaagcaatccttctgcctcagcctcctgagtagctggggccgcagatgtgcaccactgcacctggctaatttttaacctttttgtggagccagagtctgtataaaataaagtgtaaatagtaccatcaataaagaatacatagtaccattttatagtagtataaaacggacattagaaactctggacttaaaggttaaaaaaatacacaaaagtagttctcaagttctagagacttggagaatccaggaatcaacaatgtcgtggaactcctacagcctttcataaagaatggccctcga

SEQ ID NO: 10153 - DNA, 1892 bp, Homo sapiens
ggggctcctcactgttcccgtagcagcaggcatgtgcccccactgggcctctgtactggctgttcccactgcccgaacaccctcatgcaccatctgcactgtccaatacggccgcctctggccacacatggctactgagcagttgaacatggctggtccaaaccaacatttcccagacgtcgtatggtaaaaaataacataaaatcttgcaaaaatgtttctattgattatgttaaaattatgatgttttaggtatattaggttaaatcagctattttatccaaatgaatctcgcctgtttgtttttgctttttttttttttttttttttttttgagatggaggctcgctctgtcgcccaggctagagtacaatggcgtggtctcggctcactgcatcactgcaacctctacctcccaggttcaagcgattctcctacctcaccctcccaagtggctgggattacaggcgtgtgccaccacacccagctaatttttgtatttttagtagagacagggtttcaccatgttggccaggctggtctcgaactgctgacctcgtgatctacctgcctcggcctcccaaagtcctgggattacaggtgtgggccactgcgccggccatgtttctcgacttctgctggcaagcatgttccagtatttgcatggctcctagccctcatctccatttctctgcacagatgttaccttccccatgaggtctgccttatacatgaggcctgtattataaactgcaactccgcattccccaaccccgttgtttcttctctccagaacactaggcaccatctgatctcctatgccttttccttattgtcagatactgaactctcagatacagttccccttcctccctccagggggcgccatggaacgcagggccctcactggccctggggactggttgacgacaggggggagcctctggtgattggctccctcaccctgcgtaagatcaaagggactaaaggacagccccgacacccggagccattgtggctcaggccggttgcgcctgccctcgggccctcacggaggcggggttccagggcacgagttcgaggccagcctggtccacatgggtcggaaaaaaggattttttttatcgttcccaatataacgacaaaacgtaaagggaggacgccttgataggaagaaatgacatcttcctaagtgtttttaaattacttccatgtgtcttttttttttttttttttgggagaccgagccttgctctgttgcccaggctggagtgcagtggtgtgatcttcgctcactgcaacctccgcctcgtcggttcaagggagtctcctatctaagcctcctgagtagctgggattacagtcgcctgccaagagatggggtttcgccatgttgaccaggctggtcttgaacacctggcctcaaatgatccactcgccttggtctcccaaagtggtaggatgacaggcgtgagccaccgcgcccagcctcttctattcttttagagacagggtctcactgtgttgcccaggctggagtgcattgatgtgatgtgtgatcatagctcattgcagccctgaccatccgagctcaagcaatccttctgcctcagcctcctgagtagctggggccgcagatgtgcaccactgcacctggctaatttttaacatttttgtggagccagagtctgtataaaataaagtgtaaatagtaccataaataaagaatacatagtaccattttatagtagtataaaacggacattagaaactctgaacttaaaggttaaaaaaatacacaaaagtagttctcaagttctagagacttggagaatccaggaatcaacaatgtcgtggaactcctacagcctttcataaagaatggccctcga

SEQ ID NO: 10154 - DNA, 1594 bp, Homo sapiens
tttttgcttttttttttttttttttttttttttgagatggaggctcgctctgtcgcccaggctagagtacaatggcgtggtctcggctcactgcatcactgcaacctctacctcccaggttcaagcgattctcctacctcaccctcccaagtggctgggattacaggcgtgtgccaccacacccagctaatttttgtatttttagtagagacagggtttcaccatgttggccaggctggtctcgaactgctgacctcgtgatctacctgcctcggcctcccaaagtcctgggattacaggtgtgggccactgcgccggccatgtttctcgacttctgctggcaagcatgttccagtatttgcatggctcctagccctcatctccatttctctgcacagatgttaccttccccatgaggtctgccttatacatgaggcctgtattataaactgcaactccgcattccccaaccccgttgtttcttctctccagaacactaggcaccatctgatctcctatgccttttccttattgtcagatactgaactctcagatacagttccccttcctccctccagggggcgccatggaacgcagggccctcactggccctggggactgggtgacgacaggggggagcctctggtgattggctccctcaccctgcgtaagatcaaagggactaaaggacagccccgacacccggagccattgtggctcaggccggttgcgcctgccctcgggccctcacggaggcgggggttccagggcacgagttcgaggccagcctggtccacatgggtcggaaaaaaggacttttttttatcgttcccaatataacgacaaaacgtaaagggaggacgccttgataggaagaaatgacatcttcctaagtgtttttaaattacttccatgtgtctttttttttttttttttttgggagaccgagccttgctctgttgcccaggctggagtgcagtggtgtgatcttcgctcactgcaacctccgcctcgtcggttcaagggagtctcctatctaagcctcctgagtagctgggattacagtcgcctgccaagagatggggtttcgccatgttgaccaggctggtcttgaacacctggcctcaaatgatccactcgccttggtctcccaaagtggtaggatgacaggcgtgagccaccgcgcccagcctcttctattcttttagagacagggtctcactgtgttgcccaggctggagtgcattgatgtgatgtgtgatcatagctcattgcagccctgaccatccgagctcaagcaatccttctgcctcagcctcctgagtagctggggccgcagatgtgcaccactgcacctggctaatttttaacatttttgtggagccagagtctgtataaaataaagtgtaaatagtaccataaataaagaatacatagaaccattttatagtagtataaaacggacattagaaactctgaacttaaaggttaaaaaaatacacaaaagtagttctcaagttctagagacttggagaatccaggaatcaacaatgtcgtggaactcctacagcctttcataaagaatggccctcga

SEQ ID NO: 10155 - DNA, 1346 bp, Homo sapiens
tgctgacctcgtgatctacctgcctcggcctcccaaagtcctgggattacaggtgtgggccactgcgccggccatgtttctcgacttctgctgggaagcatgttccagtatttgcatggctcctagccctcatctccatttctctgcacagatgttatcttccccatgaggtctgccttatacatgaggcctgtattataaagtgcaactgccaattcgccaaccccgttgtttcttctctccagaacactaggcaccatctgatctcctatgccttttccttattgtcagatactgaactctcagatacagttccccttcctccctccagggggcgccatggaacgcagggccctcactggccctggggactgggtgacgtcaggggtgagcctctggtgattggctccctcaccctgcgtaagatcaaagggcctaaaggtcagccccgacacccggagctattgtggctccggccggttgcgcgggccctcggaccctcagagaggcgagggttcgagggcacgagttcgaggccaacctggtccacatgggttgaaaaaaaaatttttttatcgttcccaatataacaacaaaacataaagggaggacgccttgataggaagaaatgacatcttcctaagtgtttttaaattacttcaatgtatctttcttttttttttttttttgggagaccgaggcttgctctgttgcccaggctggagtgcagtggtgtgatcttggctcactgcaacctctgcctcgtcagttcaagggagtctcctatctcagcctcctgagtagctgggattacagtcgcctgccaagagatggggtttcgccatgttgaccaggctggtcttgaacacctggcctcaaatgatccactcgccttggtctcccaaagtggtaggatgacaggcgtgagccaccgcgcccagcctcttctattcttttagagacagcgtctcactctgttgcccaggctggagtgcattgatgtgatgtgtgatcatagctcattgcagccctgaccatccgagctcaagcaatccttctgcctcagcctcctgagtagctggggccgcagatgtgcaccactgcacctggctaatttttaacattttttgtggagccagagtctgtataaaataaagtgtaaatagtaccataaataaagaatacatagtaccattttatagtagtataaaacggacattagaaactctggacttaaagtttaaaaaaatacacaaaagtagttctcaagttctagagacttggagaatccaggaatcaacaatgtcgtggaactcctacagcctttcataaagaatggccctcga

SEQ ID NO: 10156 - DNA, 5985 bp, Homo sapiens
gcactgttcaattagtcaagcaattgtaaaattctcccagtcttagaaaagatacaggtgtgtgtccctctgctgtggctgtgcactgacgcttcagtaaaagttgccgtctaaaaccaccggcctgcccttgaattgttttgttttgttttgttttgttttgttttgtttttttgattcgcagcctcactctatcacccaggctggagtgcagtgacacgatctctgttcactgcaacctccgcctcccgggttcaagcgattcccctgcctcagcctcctgaacagctgggattacaggcacccgtccccatgcccgggtaatttttgtatatttagtagagatggggtttcaccatgttggccaggctggtctcgaactccttacctcaagtgatccatccgcctcagcctcccaaagtgctgggattacaggcgtgagccactgcgcccggcttcttgaattagtttctaggagaagccaagaacccccccgggctaagcctcaattttggggctcgcctgtgctgcatcagcttcacacctagagaagagagtgaaagagaagggagagccgtccttttgggctgccttgaaataaaggttgacccatgggttcatgtattgtcattcattctcattttctcttcctctctttctctctctcccctgccccttaagttagcttttctacaccctacctggataaggataagaaatagaaggaggggacactttaggatgctacaaaataaaatacaacaacaacaacaataacagcagcagcaacaacaacaacagcaacaaaaggggaagaaacaaatctggccactgcacattcctccttggcaacaaaaagccgcggatgcaaaaagctgcccttcactgcatagacagaagagggcgcgctcgagctatgaatctcggaaattactcaaaccatcagcctctgcaagaagcaaagtggacggccgggcgcggtggctcactcctggaatcccagcacttgggagcccgaggtgggcggatcacgaggtcaggagatcgagactgttctggctaaaccagtgaaaccccctctctactaaaaaaataacaaaagcgaagtgcatctcccataaacgaggtactgcaggaagaaagcagaaaatgagacccgagtacacacatgcacgcgggcgtgcgcacacacacaccagaagaaatgaaccaagaggaaaggaaatattttcaagtaagcatttggagatgggaaaaacaccttgaaacagaaattcataaagtacacacatgttttttttttaagttaaaagaggaacaataataaacaggcagaaaatgaataaaaaataaaatgtcatatcagaagtgaagataaattaaaagtggtcaaaggagaagagatctaaatgcaaacttaagaaggggcaatttttttttttttttttttgagacgcagcctcactctgtcgcccgggctggagtgcagtggcgtgatcttggctcactgaaacctctgcctcctggattcaagcgattctcctgcctcagcctcccaagtggctgggattacaggcatgagccaccatgcccggcctagagtcatcatggaaattaaacaacctgcttccaaatgacttttgggtaaagactgaaattaaggcagaaataaaaaaattatttgaaactaatgaaaacaaacatacaacatcccagaatctctgggacacagctagaacagtgctcagaggaagtttctagtgctatatggctacattaagaagctagaaagatctcaaatgaaccgcctaacatcacacctagaggaattagaaaaacaagagcaaatcaaccccaaagctagcagaagaaaaaaaaaaaaacaaaatcagagctgagctgaatgaaattgagatgtaaaataccatacaaaagatcaatgaaacccaaagttgatttttaaaaaaaattatttatttattatttattccataaattattggggtacaggtggtatgtggttacataagctctttagtggtgatttgtgattttggtgcacccatcacctgagcagtatacactaccccctatttgttgtcttttatccctcgccctcgccaactcgtccccctaagtccccaaagtccattgtatcattcttatgcctttgtgtcctcatagcttaggtcccacatatcagtgagaacatacgatgtttggttttccattcctgagttacttcacttagaataatactctccggtctcatccaggtcactgcaaatgctgttaattcatacaaagttgatatttttggaagcataaataacatggaaagaccactagctagattaataaagaaaaaaagacaagatccaaataaacacaatcagaaatgacagaggtgacattaccactgacccacagacatacaagaaaccctgagactattccacatgcctctatgcacaaaaactagaaaactagaagaaatagagaaattcctggaaacataaaacctctcaagattgaaccaggaagaaatggaaaccctgaacaaaccaacgatgagttccaaaattgagttagtcatacaagacctaccaaccagcgcaaaaaaccttagactagacggattcacagtcgaattctaccagatgtgtaaagaaaagccggcaccaatcctactgaaattattccacacaattgaggaggagcaactgctctctaactcattctatgaggtcagagtcattctgataccgaaacctggcagagacacaacgaaaaaaggaaaataggtaaagtaatacatatgttaatgatcttgatttagccattctacggtatatacatatttcaaaacaatatgtacatgataaatatgtacaatttgtcaattaaaaatatataaaaggaagaggaaaaaattcaaatggcgtagaatttgaaaggagaagatacagaacaaactccagtgtcttctttattcaactatatatacacacgttcaatggaccgggagcagtggctcaagcctgtaatcacagcactttgggaggtcaaggcgggcagatcacctgaggtcgggagttcgagaccagcctgaccaacagagagaaaccccagctctactaaaaatacaaaattagccgggcatggtgacgcatgcctgtaatcccagctactcgggagggtgaggcaggagaatcgcttgaactcaagaggtggaggttgtggtgagccgagatggcaccattgcactccagcctgggcaacaagagcgaaactcagtctcaaaaaaaaaaaaaaaaaaaaaaaaaaaggatttaatgaatgaatgatgagaccgttggtgacatctcccaccttctccctctcactccactgcagccacacggggctcctcactgttcccgtagcagcaggcatgtgcccccacagggcctctgtactggctgttcccactgcccgaacaccctcatgcaccatctgcactgtccaatacggccgcctctggccacacatggctactgagcagttgaacatggctggtccaaaccaagatttccaagacgtcgtgtggtaaaaaaaacaacataaaattttgcaaaaatgtttctattgattatgttaaaattatgatgttttaggtatattaggttaaatcagctattttatcaaaatgaatctcgcctgtttgtttttgcttttttttttttttttttttttttttgagatggagtctcgctctgtcgcccaggctagagtacaatggcgtggtctcagctcactgcatcactgcaacctctacctcccaggttcaagcgattctcctacctcaccctcccaagtggctgggattacaggcgtgtgccaccacacccagctaatttttgtatttttgtagagacagggtttcaccatgttggccaggctggtctcgaactgctgacctcgtgatctacctgcctcggcctcccaaagtcctgggattacaggtgtgggccactgcgccggccatgtttctcgacttctgctggcaagcatgttccagtatttgcatggctcctagccctcatctccatttctctgcacagatgttatcttccccatgaggtctgccttatacatgaggcgtgtattataaagtgcaactgccaattcgccaaccccgttgtttcttctctccagaacactaggcaccatctgatctcctatgccttttccttattgtcagatactgaactctcagatacagttccccttcctccctccagggggcgccatggaacgcagggccctcactggccctggggactgggtgacgtcaggggtgagcctctggtgattggctccctcaccctgcgtaagatcaaagggcctaaaggtcagccccgacacccggagccattgtggctccggccggttgcgcgggccctcggaccctcagagaggcgagggttcgagggcacgagttcgaggccaacctggtccacatgggttgaaaaaaaaatttttttatcgttcccaatataacaacaaaacataaagggaggacgccttgataggaagaaatgacatcttcctaagtgtttttaaattacttcaatgtatctttcttttttttttttttttgggagaccgaggcttgctctgttgcccaggctggagtgcagtggtgtgatcttggctcactgcaacctctgcctcgtcggttcaagggagtctcctatctcagcctcctgagtagctgggattacagtcgcctgccaagagatggggtttcgccatgttgaccaggctggtcttgaacacctggcctcaaatgatccactcgccttggtctcccaaagtggtaggatgacaggcgtgagccaccgcgcccagcctcttctattcttttagagacagcgtctcactctgttgcccaggctggagtgcattgatgtgatgtgtgatcatagctcattgcagccctgaccatccgagctcaagcaatccttctgcctcagcctcctgagtagctggggccgcagatgtgcaccactgcacctggctaatttttaacattttttgtggagccagagtctgtataaaataaagtgtaaatagtaccataaataaagaatacatagtaccattttatagtagtataaaacggacattagaaactctggacttaaagtttaaaaaaatacacaaaagtagttctcaagttctagagacttggagaatccaggaatcaacaatgtcgtggaactcctacagcctttcataaagaatggccctcgaggaaagtggaattgtcagtgggcattgtgttcgtgcctcagctaaacacggcaggaatttatttataacctagtgtaacatcctcgaggcactgttcaattagtcaagcaattgtaaaattctcccagtcttagaaaagatacaggtgtgtgtccctctgctgtggctgtgcactgacgcttcagtaaaagttgccgtctaaaaccaccggcctgcccttgaattgttttgttttgttttgttttgtgtttttgattcgcagcctcactctatcacccaggctggagtgcagtgacacgatctctgttcactgcaacctccgcctcccgggttcaagcgattcccctgcctcagcctcctgaacagctgggattacaggcacccgtccccatgcccgggtaatttttgtatatttagtagagatggggtttcaccatgttggccaggctggtctcgaactccttacctcaagtgatccatccgcctcagcctcccaaagtgctgggattacaggcgtgagccactgcgcccggcttcttgaattagtttctaggagaagccaagaacccccccgggctaagcctcaattttggggctcgcctgtgctgcatcagcttcacacctagagaagagagtgaaagagaagggagagccgtccttttgggctgccttgaaataaaggttgac

SEQ ID NO: 10157 - DNA, 747 bp, Homo sapiens
gcactgttcaattattcaagcaattgtaaaattctcccagtcttagaaaagatacaggtgtgtgtccctctgctgtggctgtgcactgaggcttcggtaaaggttgccgtctaaaaccaccggccggcccttgaattcttttttttttttttcagacggagtcgcactctatcacccaggctggagtgcagtgacacgatctctgttcactgcaacctccgcctcccgggttcaagcgattcccctgcctcagcctcctgaacagctgggattacaggcacccgtccccatgcccgggtaatttttgtatatttagtagagatggggttttcagcatgttggccaggctggtctcgaactccttacctcaagtgatccatccgcctcagcctcccaaagtgctgggattacaggcgtgagccactgcgcccggcttcttgaattagtttctaggagaagccaagaacccccccgggctaagcctcaattttggggctcgcctgtgctgcatcagcttcacacctagagaagagagtgaaagaagaagggagagccgtcctttgggctgcttgaaataaaggttgacccatgggttcatgtattgtcattcattctcattttctcttcctctctttctctctctcccctgcccctgaagttagcttttctaaaccctacctggataggataagaaatagaaggaggggacactttaggatgctacaaaataaaatacaacaacaacaa

SEQ ID NO: 10158 - DNA, 553 bp, Homo sapiens
ctatgaatctcggaaattactcaagccatcagcctctgcaagaagcaaagtggacggccgggcgcggcggctcactcctggaatcccagcactttgggagcccgaggtgggcggatcacgaggtcaggagatcgagactgttctggctaaaccagtgaaaccccctctctactaaaaaaataagaaaagcgaagtgcatctcccataaacgaggtactgcaggaagaaagcagaaaatgagacccgagtacacacatgcacgcgggcgcgcgcacacacacaccagaagaaatgaaccaagaggaaaggaaacattttcaaataagcatttggagatgggaaaaacaccttgaaacagaaattcataaagcacagaatttttttttaagttaaaaaaggaacaataatagacagaaaatgaatgaaaaattaaatgtcatatcagaagtgaagataaattaaaagtggtcaaaggagaagagatctaaatgcaaacttaagaaggggcaattttttttttttttttttttgagacgcagcctcactctgtcgc

SEQ ID NO: 10159 - DNA, 363 bp, Homo sapiens
gcactgttcaattagtcaagcaattgtaaaattctcccagtcttagaaaagatacaggtgtgtgtccctctgctgtggctgtgcactgaggcttcggtaaaggttgccgtctaaaaccaccggcgtgcccttgaattcttttttttttttttttctttttcagacggagtcgcactctatcacccaggctggagtgcagtgacacgatctctgttcactgcaacctccgcctcccgggttcaagcgattcccctgcctcagcctcctgaacagctgggattacaggcacccgtccccatgcccgggtaatttttgtatatttagtagagatggggtttcaccatgttggccaggctggtctcg

SEQ ID NO: 10160 - DNA, 756 bp, Homo sapiens
aagcaattgtaaaattctcccagtcttagaaaagatacaggtgtgtgtccctctgctgtggctgtgcactgaggcttcggtaaaggttgccgtctaaaaccaccggcgtgcccttgaattcttttgttttgttttgttttctttttttcagacggagtcgcactctatcaccgaggctggagtgcagtgacacgatctctgttcactgcaacctccgcctcccgggttcaagcgattcccctgcctcagcctcctgaacagctgggattacaggcacccgtccccatgcccgtgtaatttttgtatatttagtagagatggggtttcagcatgttggccaggctggtctcgaactccttacctcaagtgatccatccgcctcagcctcccaaagtgctgggattacaggcgtgagccactgcgcccggcttcttgaattagtttctaggagaagccaagaacccccccgggctaagcctcaattttggggctcgcctgtgctgcatcagcttcacacctagagaagagagtgaaagagaagggagagccgtccttttgggctgccttgaaataaaggttgacccatgggttcatgtattgtcattcattctcattttctcttcctctctttctctctctcccctgccccttaagttagcttttctaaaccctacctggataaggataagaaatagaaggaggggacactttaggatgctacaaaataaaatacaacaacaacaacaataacagcag

SEQ ID NO: 10161 - DNA, 680 bp, Homo sapiens
aagcaattgtaaaattctcccagtcttagaaaagatacaggtgtgtgtccctctgctgtggctgtgcactgacgcttcagtaaaagttgccgtctaaaaccaccggcctgcccttgaattgttttgttttgttttgttttgtttttttgattcgcaggctcactctatcacccaggctggagtgcagtgacacgatctctgttcactgcaacctccgcctcccgggttcaagcgattcccctgcctcagcctcctgaacagctgggattacaggcacccgtccccatgcccgggtaatttttgtatatttagtagagatggggtttcagcatgttggccaggctggtctcgaactccttacctcaagtgatccatccgcctcagcctcccaaagtgctgggattacaggcgtgagccactgcgcccggcttcttgaattagtttctaggagaagccaagaacccccccgggctaagcctcaattttggggctcgcctgtgctgcatcagcttcacacctagagaagagagtgaaagagaagggagagccgtccttttgggctgccttgaaataaaggttgacccatgggttcatgtattgtcattcattctcattttctcttcctctctttctctctctcccctgccccttaagttagcttttctacaccctacctggat

SEQ ID NO: 10162 - DNA, 105 bp, Homo sapiens
aggctgaggcaggagaatcgcttgaactcaagaggtggaggttgtggtgagccgagatggcaccattgcactccagcctgggcaacaagagcgaaactcagtctc

SEQ ID NO: 10163 - DNA, 727 bp, Homo sapiens
tgctgacctcgtgatctacctgcctcggcctcccaaagtcctgggattacaggtgtgggccactgcgccggccatgtttctcgacttctgctggcaagcatgttccagtatttgcatggctcctagccctcatgctccatttctctgcacagatgttatcttccccatgaggtctgccttatacatgaggcgtgtattataaagtgcaactccgcattccccaaccccgttgtttcttctctccagaacactaggcaccatctgatctcctatgccttttccttattgtcagatactgaactctcagatacagttccccttcctccctccagggggcgccatggaacgcagggccctcactggccctggggactgggtgacgaccaggggggagcctctggtgattggctccctcaccctgcgtaagatcaaagggactaaaggacagccccgacacccggagccattgtggctcaggccggttgcgcctgccctcgggccctcacggaggcgggggttccagggcacgagttcgaggccagcctggtccacatgggtcggaaaaaaggacttttttttatcgttcccaatataacgacaaaacgtaaagggaggacgccttgataggaagaaatgacatcttcctaagtgtttttaaattacttccatgtgtcttttttttttttttttttgggagaccgagccttgctctgttgcccaggctgga

SEQ ID NO: 10164 - DNA, 298 bp, Homo sapiens
aaaccatcagcctctgcaagaagcaaagtggacggccgggcgcggtggctcactcctggaatcccagcactttgggagcccgaggtgggcggatcacgaggtcaggagatcgagactgttctggctaaaccagtgaaaccccctctctactaaaaaaataacaaaagcgaagtgcatctcccataaacgaggtactgcaggaagaaagcagaaaatgagacccgagtacacacatgcacgcgggcgtgcgcacacacacaccagaagaaatgaaccaagaggaaaggaaatattttca

SEQ ID NO: 10165 - DNA, 23934 bp, Homo sapiens
ctccgctttcgcgggggctgctggggcgtaggtgtcggggacgcgcgcacgggcgcgcgcagctgttgacgcgcttcttagctggtgcgcgccggagcccaaattccaagtggaaactgcaggcgcacgagggaggaacgcgtggagcatgaaaaggcagggggcctcctctgagcgaaaacgagcgcggataccgtccgggaaggccggtgcggaaggtggcgggggaggggacggtcggccgaaggctccccggggcgggccggcgggagtcgtagtcagtggtgatttcttctggagtcgtttcctcagctccttccagccccttgggcggcaccttctatctttgaggcgttaaaggtgtggaaacggagggcgtgacgaggggcaggtagcgagaatggctcagctgtggagccaaggttcgagtcccggggtcccctcataacggccctgcgaccttgtgcaagttggttaacttcagcttcacgttttttccgtcgccacacgaggatgccagtaccgcccgcaccagcagccagtactccgctgggatagttaattgtcgagcgcggagcccagttcctaacctgcagttacctgtagctgccacggcggggacggggcttggtccccaaagtcacgcagctaccaagtggccgagcttgtggctgctccaagacccgagttcttcctgagtgccagggtagcatggcatggcaggtgccagagaatttggcaagtccctcttcctccgtgaagaggaaccttcctaaaagttatcaagaatcctcaaagattttttctttatgtggattacatctatctattttgactgtattagaaattaaaacaaatttttttttgggaggccgagggggacagatcatctgagctcaggagttcgagaccagcctggccagcatggtgaaaccccgtctctactaaaaatacaaaaattagctgggcatggtggcaggcgcctgtaataccagttactcgggaggctgaggcaggagaatcacttgaacccgggaggcggaggttgcagtaagccgagatcgcgccactgcactccaccctgggcgacagagcgagactccgtctcaaaaaaataaaaataaaattaaaacaaaattttaaaatattgattagaaaataaccatagtaaacccattacatattgacataatatttttttgaaaaagaaatattcctaaacaacaacaacaaaaaaagcaaaagagtggaaatatatttttgcaagtttcttcagtatatcttaatggaagacagctggattctcatgcccgctgcttcattcagtctaacatgtcaagtagcctcttgaaaacgcctcttcacggaggttgcagtaagccgagatcgcgccaatgcactccatcttgggtgacagagtgagactctgcctcaaaaaagaaaacgcctctcacttgtgagagaattaaagtgaaaaagtcaaataaagtgttagaattattaagaaaacggttgtagccctgcagactctgaaaagtctcagaggctcccaaagctctctggactactacactttgagaactgctgctgcttctcctttgatcctataactttgttgcttgggacaactgccttgctctgccttctgtcatagccttttttatacatctctccatcttctcctgcctagggtcctttcttgtgtgaggcaaatagtcccccggcagcatcagcatcggccagtgccactgatctgacagctggtctggtagctaccaggaaactcatggagttaataatgcagagctgttggttaagagcatagattgacacttaaccctttcacagtttgggactgatagtattttttttttttttttttttttgagacggagtctggctcttgtcgcccaggctggagtgcagtggcctgatctcagctcactgcaacctccacctcccaggttcaagcaattctcctgcctcagcctcctgaatagctgggattacaggcgcccgccaccacgcccggctaatttatatacttttagtagagatggggtttcgccatgttggccaggctggtctcaaaatcctgacctcagatccgcccaccttggcctcccaaagtactgggattacaggcgtgagccaccgcgccggacagggactgatagtcttaaataagtaaggcaattgcagtttgatgttagcagatgataggtttttgttttatttgtttttcaaagtaaaaattgcttttttaaattataaaagcaatattgggtagaaaaaataaagcaataaagaaaagtaaaaagaagaaaataaaaataatttcaaatcacaccccaccagaagtgaccattaccagtatgtgaggaacattctagtaagtgtcattacatgaagtgtgcattgtttcgttcatttttttaaattatgtgctcccggaaaaaaactcaaaactctgtttacatcacactttgtaatataaatacattaattttgttgtaattattcagcttttagtaaatatttgattattgtgtaccatggtagatactgtgcttggtgtgggtgatgataaagatttctcacataaagaccttacttaggaggccagacgtggtggctcatgcctataatcccagcactttgggaggccgaggctggcagatcgcttgagtgcaggagtttgagaccagcatgggcaacatggcgaaaccccatctctacaaaaaatacaaaattaaccaggtgttgtggcacatacctgtagtcccagctactgaggaggctgaggcacaagaattgcttgagcctgggaggcggaggttgcagtgagccgagatcatgccactgcactctagcctgggcgacagagcaagactctgtatcaaaaaaaaaaaaaaaaaaaaaaaaacaaacttaggaactctaagtcaagtagaagtgatcagatatttatctgcataaataataaaaggtagaaagtaattcatattttaagaaggaacaattggggtttcataactcatgaagagttaaatgagttcaaaagagggacataaaattttctactttgggagacagaaaaaatcatggaaatgttccttgaaaaattttattcagagatgaagccagaaggaactctgggttgaggagaaggcattggggagccagcggtagggactggagagatctggaagcataagaaggaatgagacagagtatcactctgtcacccaggctggagtgcagtagcacaatcttggctcactgcaacctccacctcctgggttcaagcgattctcatgcctcagcctcccaagtagctgggattacaggcgcatgccacgatgcctggctaatttttgtatttttagtagagacagggttttaccatgttggccaggctgatctccaattcctgacctcatgtgatccacccacctcggcctcccaaagtgctgggattacaggcatgagccatcacacccggccagataactaatactttttgattcttgagactatatactttacatgaattatctaatttaatcctcactactctgaggtacatactaaaatctaccttgttttatagaaaacttaagtaactaatctaggatctcacactaaatagttggtgggacatggatttgaagtctgtcctgcttttaaacctatattccttataaagaagtttaaatatattctgcaggcattgagaagcattgtaagaatctcagctggaatgtgatgatgaggtctatgttttaggaagattaatttggcattcgatagacattttcctcagtataattttttatacatctgtctgtgtacctatttcagtctataggcatcaattcaataattaatgtgatattttattgcattcatgggccctagtgtacttatctattacctgttattggacatttgcattttggcagcagaatgtaaaccctttgtggtaaattggtctggatggatagaacctttatgaactcttaccattctccatgtattttaggagcagcaaatggatttctcatggaagtttgtgttgattcagtggaatcagctgtgaatgcagaaagaggaggtaagagaaatcagatagtgaatgaccgttggctacccttttaagagtctgaaaattaatcctgtgtgcttatctcagaagcccttgtgatctctaagcatccctcataatgctttcagaaacaaccaattagaaaccctactggaaaattatgatctagtctctccctctccccaagtgggtcacattttaagtcaagtgtcgacaatagtacttactcaatgacttgattttttattgaacttagcaaaattttaatttttttaaaccattaacttaaagatgacttcagagacttcatcatgaggaattttatcttttttacttttgaacattatctatttttccctcaaagtttctgttgtactctgaacctgttttaatgggaagcacagacatttccatcatctcaggttcagaaaaattaaaaaaaaattttattatggaaaaataaacatatacaaaagtagagcaaataggataatgaagccccatgtatgcatcactcatcttcacccattttcaacacatggccagtttttcatttatttcaggggtcaataaactttttctgtgaagagctgcatagtatatatattttcagccttgctggacacatttgatctttatcacttattttatttttaaatcttttgaaaatgtaaacatcagccgggtgcagtggcttacacctgtaatcccagtaattggagaggctgaggctgccagatcacttgagctcatgagttcgacaccagcccaggcaacatggcaaaaccctgtctcaacaaaaaatagaaaaattagccaagcgtggtggtgagcacctgtagtcccagctacttgggaggctaaggtgggaggatcacttgagtccaggaggcagaggctgaagtgagccagtcacaccactgcactctagcctgggtgacacagccagatcttgtctaaaaaaaaaaaaaaagttaaaaaaatccttcttactttggcaatagaaaagaatgaagtactgatacatgctataatatagatgaatcttgaaatattattctaagtgaaagaaaccagtggaagaaaatacaacatatgattccatttatatatatccaaaataggtaagtttatgtagacagaaagtagattaatagttgcttagggctgagaggcatgagaagggtaggtgactgctaaagggtgtagggttgttttggggatgatgaaaatgttctaaaattacttgtggagatggttgcaaaactctgtgtatatactaaagagtactgaattgtacacttttaaatgggtgaattgtattagtgaattatatgtccataaagctgttgtttttcaaaaagaatacaaaaacattcttagtttgcaggccatagccaaaacaagctatgtgcccatagcccacatgccatggtttgctgacccctgatttatagtcctaccttcctctcccaacctcagattactttgaagcaaatcccagacatcatgttaattttaaatatttcagtgtgtgtctctaaaaaataaagactcttgccgggcgcggtggctcacacctgtaatcccagcactttgggaggccgaggcgggcggatcacctgaggtcgggagttcgagaccagcctcaacatggagaaaccccgtctctactaaaaaatacaaaattagctgggcgtggtagtgcatgcctgtaatcccagctactcgggaagctgaggcaggagaattgcttgaacctgggaggcggaggttgcgtgagccgagatcacgccattgcactccagcctgggcaataagagcaaaactccgtctcaaaaaaaaaaaaaataaggactctttttttgttgtttaagttctttattgttttcaaaggcctagtatgcatacatatataagaaatccataaataatgtggaattattaatgtatattgtttaagataaggtcccttttaaagaacaaaacaccacaatgtcactaacacacctttaaaaaaatcatttcttaatatcgtcaaataacccagttttcagatttctccagttgactcatacagggtgtgtgtgtgtgtgtgtgtgtgtgtgtgtgtgtgtgtacagttctttgaatcaagagccaaacatttcatttgttttatatgcctcttaagtctctttaaatctgtaagtttctcctgcttttttctttaattctttgtttactttcttaagatttatttgttaagcaactgtgatattcatcttttagagtatcccatactctcaattttgctaattatatgtgtgatatcgtttaacatagtcctctgaccactgtatttcctataaaggtagttagcccagaggcctaatcagattcagatttcagttttgacaaaatttatttatagataacattatatacttcctgttgcatcacatcaggaggacataacatgttggtttttttctgtttttgtgatattaagattgaacagggagttcaggtattgccagcctaatctatccttaaggttttctgtcagcttttcacctaataaatttagcaacccatattttagtaggggttgcaaaatggtgacatttatttttcacttatgaactagaatagttctgtaaagaactttccctcatcctctgtttggttatgctgaagtatggtttgtataagaaaggcagaataaatgcttgcttattttcccttatttattataatactttttagaataatgaatttgttctctgtcttcccttgaattgttttgtcattatgaatgtagatttagatatattttgtgtgttttaatccattgtagttattctgcttattgatgaacaaaatgttctatctttggctagtgagagcttcttcaaactggttcctgagatcttttgatgtgaccttggtagcctaataattcttttggtttcagcattttcttattcttgaaattatcttggtttagctactcaaaagtagctttgtgttttttaaagcttagaataataaagacccttttgggaaatattatgttattttcttatcaacaaagactcagtattccactatagtcagttttaagaaacatctttattctatgttactttcctgtacatagagaggcaaccctataatacaaaaatttaagagaactagcttaactttaattaatttttaaatttgagtatgagtaacacaatgtgggctgcagagtatagctgagttaaaaacagagttttactctagctttataatttgatttctctgagatgatttctaagactgttctatatttggaaaaaatatatataaacaggttgctgtttaataacagcttattttttaaaaatgtgttgagcaatgcttttatattacaggtgctgatcggattgaattatgttctggtttatcagaggggggaactacacccagcatgggtaagtgtccatttttcccaggttttctgattggagttcatagagcctggaagcaactgataatcagtttcgttggggtcctttactaatgtcatgttaactatgttatggatgttgtatcagaaatgtttatgattgtaaaaaaatcaaagatttgatcaaacatatttctttctcacatcaaaaagttgaaaggtaggtaggtaattgttaataccggttcagctgctctgtagtaacatcaaggattaggcttttataaaatctttccatgctggcatccttagtatattgaaatcccctcctggtctttgtgctattgttgtcatatattttactcatacatatatcaaaaactccatgctgtattgttagttttgtttgaagagtcaattatcttttgttaaataagagatttaaataataagaaaaaaatcatatatttacccacatgcaactaccatttctggtgttctttattcctttgtgtagatcccgtatttctgtctggtttcattttcattctgcctgaagtactttctttaactttttttgttaaaaagtatgctagtgattcattccttcagcttttatatgtctaaaatagctttttccttcatttttgaaaggtatttttgctgggtatagaattctaggttgacaggttttttttttctttgaagatgtttttccattgtcgtcttgcttgtattgtttctgacaaaaagctatcatccatatctttgtttttctctatgtaatatgtctcttttttctacctacttttaagatttttttattattggttttgaacaattttcttatggtgtacctgagtatagttttttcatgtttcttggacctgtgcatttatacttctcatcacatttggaaaattttcagcttgcagcttgttctccactccctcctttagagacttaagctattcttacattagactacttgaaattgtcccaaaagtcactgatgaacttctctatttaaaagaaaatctcctttctgtgttttcattttgcatagttgctattgttttgtccttgagcttactgaccttttcttctgcactatctaatctgctattagtctctcctggtatgttttcatctcatacattgtagtcttcatctgtagaaatttgagtctttttatgtctctgatgtctcttaacttttttgaacatgtggaataaagttatgatagctgttataatgaccttgtctgcgaattctaacatctatatcagttctgggtttgtttcatttgatttatcatctaataatatatcttattttcctgccttgtaattttttattggatgcaagacattgtgaattttactttattggttactagacatttttgaattcctacaaatgttccaaaacagtttggtccttttgggtcttgcttttaagatttgctgggcaagtctggagcagtggttaatacagagctaattattccttactactgagtcaggattcttctgtgaactctaccctgtgaccatgaattttgaaattttcctgtctggctggtggaataggcattattcacagcttggtatgaatgacaggcacattatttctaatcctttttattggttctgtcccaggccttgcgtagtttctttgcatgcatgcaccggtcagtactcagctgaatattaaaggaggttctctgcagacctccagagttatctgtcttcctttcttctttcattccttcctttcctttcttttctttccttctccttttctctctctttgctttccttccttcctttttttcttttgacagggtctcacctgttgtccaggcttgactgaagtggtgtgaccatagctccctacagcctcaaactcctgggctcaagcaattgtcctgcctcagcctctcaagtagctaggattacaggcatatgccaccatgtccagctacatttgtttgtttgtttgtttggtagagatggagtctcaccattttacccagactggtcttgaactccttgcctcaggcaatccacccatctcagcctcccaaagcactgggattacaggcatgagccaccgtaccaagcctatcttttttaaaaaaaatcctttttttaaaccattgagatagtctttgctactccagtgttatctttctgtcctccctgtactgtctcctataaactctagctacttcagtcttcctgaactctaagctttgtctccttaactcagggaattgttttggctccatgtgggtcccccatccctgtgctttggcctagaaactctcaaggcagtaaattgggtcaatcagaattgacttactaacttcattgtttaccattttcaaggatcattgcccttcactgcttaatgtccagtgtcttgcaaaccactgtttcatatattttgtctgtttttttattattattattattataggtgggagggtaaatccagtcactgttaccctgtcttggccaaaagcagaagtctgtgtatgaattgtggtctcctaagttatgctactctgaggttgataatagcattatttaatgtaaaaagtttgtatacacaacagccctttggaatcttcacatgaaaagagggcattcctggccattctaaaatccctagagcatgtctgtaaatttgagtacagtctgtttttgtaacaccaattatgattcattgcttagtattggacaactgctatcctatgcaaaattggagttcttttagcaagaaaaaagaaagaaattcatactgggtaaacaactgatggggcctgtcacagccttatactattgatggtttatgagctagccacttattatggcatatttaggtacttttatgcatagatctctgcataaaatcacaaataagtagaactttgctccctttcacgtatcttgtttaaaaaaaaaaaaaaaaggttttgctaaatgtctttgcccattaaaggaatatgaactttgaagctatttaaccatctctccagtaggttttaaatagagctgtaatgaattagaaagaagaaattggatcttggggaataatgtactggcagaacatcgagcctggtagttattgcactttcaaatgtcacctaccaataaaagggttctgagtcataaggatttttgttgagtcaactgacaagtgcttttaaattgtagcatcttctgttttctaaatcgttctatttaaccctttgctattacttaccttctaccatatatacatttttcttctcagtgtctgtcctaccttttagagccatctttgtctggtaaatgaccaataatatatcattggcttttagctcacatttgaattttaatctgctttcttttcttgtaggtgtccttcaagtagtgaagcagagtgttcagatcccagtttttgtgatgattcggccacggggaggtgattttttgtattcagatcgtgaaattgaggtgatgaaggctgacattcgtcttgccaagctttatggtgctgatggtttggtttttggggcattgactgaagatggacacattgacaaagagctgtgtatgtcccttatgggtaagaatttgtatctaagacgtaaaagcctctaatgataattgtatttatgctcacaatatagaaaaacaacatcacaaaactgactttgcggtcatagctacagacacttatactaacctaagtatttcaaatagtagttatttagatgtttggggtggggtgtatgtgtggcaaagccttcttaactctcctcaattgctatagattaggctccgctactgttcccatagaatagaaatttaagggaaatttaccatggttcctttaaccactgcaccaagaacttcaaaagtattatagttggtgaggatggaccaccaagttggaagatgcaaagaggacagaagcaaactacctatgttactaaaccaaagtacttattgaatgacctcagagggacaagtattagatgtaatgctgcccttatagttgtcagattaaatggttttcatttggtgataagccacgaccatttttttgtataaaaatcagagatttgtggaaagataagacttttgaatttgtaaggctgccattttattattatgtcagtttactgtcttgttaggcgaagaaagtattaaaaagtttcagctaacatggagaattctatatatagtaatcagtgatgacatcttcattcatgttgttatatgactttctttttatagctatttgccgccctctgccagtcactttccaccgaggtgagtcattttcattttaaaagttctattgaacagtgttagttttctaatttcaacaactgccaccacctttttatggaacacaattctgtagtgttccaaggttaccaattggttttttagatcctaggactaaaagttataaaagtagagatgtgcaatttctagaaaatttgaagccttagttatgaaaagttgttaaaagtgggtgtaggtggtggtgggatataagagagcgagggagagagcaagtattgccttcaagtgtgtgtacctatcatagcattccaagcaagaatcctgagactcattttaactgagactgtattaggtcatgtgcaaccccaaaagaataaattgttgtggctggtgaaatgaaaggtactgtctatcttaagccaggcaaaaccatccctggggctagcagtgaggtggggtttcacagatagagacttcttaaggggagagaaagttgggtatctggagaagaattgggtcttattaggaagggagaaaggagaaacagatgcaatctagtgttgactatctagtcaatgaacagatgtccacaatagtatacaaaattatttttcattatagcttgtctgcaccacagtgattttttaatgtgatactttcttgtaaagaaatatttcctgtaaaaaatcaggtagatataattttttttgtttgtttgtttgagacggagtctcgctctgtcgcctaggctggagtgcagtcgcacgatccggctcactacaacctctgcctcccgggttcaagcagttctctgcctcagcctcccgagtagctgggattacaggcgcctgccaccatgcccagctaatttttggatttttagtagaaacagggtttcaccatcttggccaggctggtctttaactcctgacctcgtgatccacccgccttggtctcccaaagtgctgggattacaggcgtgagccaccacccctggccaaaaaatcaggtagttataatttctatactcttaggctacaccttggtaaaatggaagaacaagtatctattttgccttcagagagcactgccattgcacatgaaaagaagtctacagtcaaaaaaaatttttttacttcaaatttctgttctgttctttattccaataggtttaacaaaaatattttcatattttcaaaatttgtagaatttttgggttccacatttttctcactaatgtatttaatgagatatcataatatagttttagtggtgagaaggtgctgccaccaaaatagggaaatcctctgtggtagatttagttgcctacatacactaaagggtgaaatgaaggggcctgtcccagaggaccactaccacctaatccactgcaggctagagcttcaatgtcatgtagcagtatgagaaccaaagcagaagtagattttctgttttcagtttcctgataccactttactctttgagggctctgaggaggggagaaatctcttagaaagtaggatggggctgggcacagtggcttacccctataatcctaccactttgggagaccgaggtgggtggatcacaaggttaggagattgagaccatcctggccaacatggtgaaaccccgtctgtactaaaaatacaaaaattagctgggcgtggtggcgcatgcctgtaatcccagctactcgggaggctgaggcaggagaatcacttgaatcagggagtcagaggttgcagtgagccgagaccgtgccactgcactccagcctgggcgacagagcaagactgcatctcacaaacaaaaaaaagtaggttggaagtgaaacttcatatagtctgttgaaaacaactacccttatgctatgaaccttgagtatgtggggttaatagattaatccaaaatattagtcagtaatgagaatgtgagccaaggctttttctagaactggtgagtacagtgtttcattctacctagtccaatatttctgaagccttagaacagtttcccaaatttgactcacctgcctatcacatttaaaattttaccatatatgagtgctacctgtgcacatttttatttaatcattttctttaaataaaatcttaagtatgcacccataaaaaagaacaagatcatgtcctttgcagaggcatggatggagctggagaccattatccttagcaaactaacataagaacagaaaaccaaataccacatgttctcactcataagtgggagctaaatgatgagaacacatagacacatagaggggaacaacacacactggggcctttccgagggtggagggtgggaggacagagaggatcaggaaaaataactatgagtactaggcttaataccttggtgatgaaataatctgcacaacaaactcccaagacacgggtttatctgtataacaaacctgcacttgtacccctgaacttaaaaaaaagttaaaaaaaagtaaatttattttaaatagaaacttttataattactttatattgaaaacttttcatttcttatctgcatttaagtaaatatactatttaaatgtgtaccattattaaaatgattatgcacagtggtatgtagactgtggtgtgctgatgaactggctcctagaaaaaagagccctgatttgtagcatttttaaatttctgtggtttaaatactctaccttcactgaatttttttattattattaattaaatttttatttttcttttgagacaagtcttgctctgtcgtccaggctagggcacaatggtgcaattggctcactgcagtctcgaccccttaggctcaggtgatcctcccatctcagcctctcgagtagctgggactataggtgcacaccaccatgcccagataatttttgtattgtagatatggggtcttgccacattgcccaggctggtctcaaactcctgcgctcaagtgatctccccacctcggcctcccaaaatgccaagattataggcacgagccactgcacctggccctaccttcactaatttcaggctgccagtggattaacaatctgacttgcagaattcttgagtgtttaataattggcctttgtaagccagtacaagctaggtccagcatgccactgcatgtatactacattttgggaaactctgcgttagagatacctgttcaaaattcacatcagttttatttatttcagcctttgacatggttcatgatccaatggcagctctggagaccctcttaaccttgggatttgaacgcgtgttgaccagtggatgtgacagttcagcattagaagggctacccctaataaagcgactcattgagcaggtacgtggactttatctttttttcccctaagactctgttgtggttactcctgacattctgctgtttagccagtttgtgagactatatattactgactttgtggttactctgtaggaaaagcaagcaggcaataatgtatataattcttatttctttcacacaagcctttttaataaccaaggctttcaagatcaaattacatatagatagtgcctaaagatctgatctaacttggataagcacagcaaattttaccttttctctgccatgggcattgcagttttttttactttttatttttattttttagtttagatataaggtcttgctgtgttgcccaggctggtctcgaactcttgggctcaagccatctgccttccttgccctcccagagtgctgggattacaggcatgaggcactgcgcccagccagcattgcagttttaagccacatcttttcattgtcagcccatgtatattcaggggatcccatataaaattatcatctggaggtaaattccaaaactaaaattataatcttatttcttctcatctgtcaatataagaggaaatatatttttctattttatgagttttcctggtgagctagcatcatttgtagagcactcagaaggtgactttgtaattaatagtatgtgtatttttctgatgtcagtccagaggcattataagttagtgagtacagactttgagatgagagagttgagcgtttgagactcgggtttgatacttgctatgtgatgttgagcaggttaatagtctttaagcctctctttccccctgtgtgaaactgagatgagtttaatacttattttagagtttctcagaagattgctaaagatgggatgtgttagaggcttagcacagtggttggcatatactaggtcttaataatgttaggttctgttattactgctattattaataatactaatgttcctgtgtagacatctgcttattttcacttttctatagccatgaaaataattttcagaaatttctcctaaagatctgatgtgactttgctattctgggatgtaatggtttcacagacatttattaaatatatattagatgcaggacatttgtactgtgggggtaaccaagggctaagtgtctgtgtgtagtcactatccttacaatttagtgcagaacaggcacttctaatagagcaggcaattttaatagagctctatttttaaaaggtactataggagtacattggagaggaattaaccccaaatttggggaaatgaaggttggcaataattagaggaagcttcccagaagaaaagacatccagactgcagtgttttactcatttgaaggatgtttgggagttatctgtgtaaaagttgggggcagtgggagtgagggtgaaggggatgttggtggaattgttccatacaaaacaaatagtataagcaagggctataaacaaaagcaagcataacttaaaacactgaggaatggccagaatattgaatgtggacagaatgatatccagagccttgaaaaccttattaaagtatttattttcatggtgcagcggggaggcctaaagtgttttaaaatagaagagttgatgagtcaggtttccagttttaaaaggttactcagtaaggagtagcaaataagatataaccgccatagtaatgtattgcatttcaaaatgtgtatgtgtgtgtgtatgtctgttatttgtatgttaatctattggttagtaggaagagctactcaaatattctcatacattaacttcactgaagtaactacctagtagtgtaacatactagttaaagcataggctttgtgattggacaggtctgtgtttaaaccctggctttgacccttactaatagtgaccatggatacattacctagccatcctaaacctcagctttgctcttctgcaaagttaggataataatagcacctacctcctagaatagttgtgagggatttcttcaggttatagcacttagtaattgttctatattattaaatctgacatttagtgactgctctatattattaaatcactttgatagccttagataagcatatacttctaaataatcttgtatggaaggcgaaaagaaatggtagaattcatttctttaaaaatattatttctctatgttttggaaagccttgatttggaagaaacaggcaaatatgacttttttccattctgaagtgatttcagctttttagatagtcaatgttttgttttatggatgctttgttcaggccatttgagaatatgaagcatccttgttccatttatttccctaacaatttttaaattatttgaaatagccactcccctctttcactctcttgttaactttattttttgctttatttattcacttgctttattttttctttgttatacttattgctacctggaattttattgtataaatatccctgtgcattgtctcgtctttcttgaatgtgtaagctccatgagagcaggaactttctcttactcaccatgtcagggaggaaaaacttttcttctatcctcagggtttgttattgggggcctgcaaattaaactgactaaagacagattagcaggagtaaaaagagattttatcacataagtacatatatatgtaagtacatacagaagttcacaaagaaatatgacttagaattgggggcttatataccatcttaataggtgaaggggaaggagaaaatggcacttattgggggggaaaatgactttttggaaagataattttctagagacaaatttactatgctggacatcttacttgtccaagatcccaaagaaatagagaagatctagtaaaaattaaacattaatagtaatttttaaaatttaatatattctgacttatgtttctattctcactgccttattatcccattcaagagaaagatattaaaattcacttgtttttttttttcttttttcaggcaaaaggcaggattgtggtaatgccaggtatttatttatctatcaattcactagcataacactgaactatagtggaggaagagcaaaggaggcaggaaaatgtgagagagagtattagtacattacatattagtacatgatctttaaagagaagaatatatagtttgattaaaatgtttaaaactgggagatctgtgctagaatttaaaagtttagataagaaggaaaatattgtaataggcattagctcaaagaggagcaaataaggaagcagatagagattgaggtttctccatatttgctctcccattatatagaactttatgaattcagatgttcatctctggtgaggcacatcaaatttgatgctaatcatattttgtttaggacaaatgtcctaataaacagggtttaagcaaaggtttaggcaacatccttgggtaaaatataatactgtctcagttcctgaaaatctctgattgccaaattatttcttgtaaccagaatttaatcatatgatcctgatgataaccataagatcagttaagttcataatggctaactagaaatgaacagttggagcagtttttaaagaattagataatacaacatagaagagtgagacaaatgtaaagacaatcttaatttttttaattaagtttctcaaacatataaaaaagtagaaaatagcataatgaatactcatatgctcattccctagatttaacattttgccaaatttgtctcatcttttttctatcctgaggtattttattaaagttaaattgaaagcatcatggcattttatctttatttatctctaaaaagggtgggatgttaccataatgacaattccattatcacatctatcacaataaacatttaatactcaactttctccaattgtccccacaatggtttttatagctgatatgttcaaactaggatccagtcaaggaacaagcattacatttttggttatcttttgtttgtttgtttgtttttagagatgaggtcttgctatattggccaggctggacttgaactcttagcctcaagcgatcctcctgcctcagccacccaagtagctgggactacagttgcacgctgccatgcccagttctattatcttttaaaatatctttaatatagatgtttttccttttatttttcttgctttaaaaaaaagttacattattaagtttgggctgggcccagtggctcacgcctgtaatcccagcactttgggagtctgaggcagccagatcacctgaggtcaagagttcgagaccagcctggccaacatggtgaaatcctgtctctactaaaaatacaaaaattagccggccatggtggcatgtgcctgtaatcccagctacttgggaggctgaggcatgagcatcacttgaaccaaggaggcggaggttgcagtgtgctgagattgcaccactgcactccagcctgggtgacacagcaagactccgtctcaaaataaaataaaagtttggatcacttaccctgtaaaatgtcctactttctggatttatcagattatttcctcatgatattgtttagcttgttcctcgtgcctctgtatatcctataaactaatagttaaatcatgaggtttgaatagactctgcttaaatatttttggtcagaatacttcatgggtgattctgcatacttacatcatatgacatcacatcagaaggtattcagtctctggtcatctcactactagtgatgtcaagactgaccagcgttcaaaatagtgacacctagataaagagtaacttttaaaaagaggccgtgaacctgggcaatatagtaagacaccatctttaccaaaacgtaaaaaaattagttgggcatggtggcgtgctcctgacgtcccagctactctagaggctgaggtgggaggatttcttgagcccgaggtcaaggctgcagtgagctatgatcgcaccactgcactgcagcctgggcaacagagtgagaccctgtgtcaaaagaaaaaaaaaaaaaggccatataaggggtattgtcagatatttaggaaggctttgacctataacaagcccttgaaacataagcagagagaaagtatatattatctgtcaaattgtggtcctttttggttaatcaaggaatgttaaagagactctgagtgtgatgcttttccatttagcactaaatatatatagttttgacaagtaatacttagacaattgttgacattaagagtacctttgtttaatatgcaattgttatcagctgtgtgcaaggcattacttgggatgcaaagctacacaagaaactacgttctcaagaagctgactcaggtcaaaagatgttacatacaaaaatatttgtgattaatttctttaacaaaccttatcaggtaaatgttaattgtgtgacaattatgtatattttatgctaattgtgtgatagatatgaaaacagaaataaagtaatcctacttgaggagctcacagaatagacttataaacacaaatgtattacaatttcatatgaataagtaccagcaagtaaaaactcctaggtaagtcattctgaatgcctaataagtattcatcattgagaaatataaagaggtagttgccctctaggaactttcataatgaaacctacaacatatttaggctctggtttcttcatctataaagagaagaatattaaactagttctgtgggatcctttttaaccatagagctgtgttagtctgagtctggaaagatgtattacctatgtacttaagttgctgataacttagcaacatgtgtttcagtggccagatgttttgttatttgttagaaggaatagaaggaaataatatatttgtctcttaatccttacaataagcttgtgaggtagccagtattatccctcttttattggcaaaaaagttgaggtcagtggatttaaataatttatctaagatcacatagctgtgaagagctacagtgataaagccaggatttcagtctaaatctactcagcctgtattttttctatttctttctttttttctgagacagggtctcactgtgtcgcccaggctatggtgcagtggtgcagtctcagcttactgcagcctctgcctcctaggctcaagtgatcctcttacctcagcctcttgaataggtgggtctacaggcacccaccaccacatccagctaatttttgtatgtttttgtagagacggggtttcaccatgttgcccaggctggtctcaaactcttgagctcaagtgatactcctgccttggcctcccaaagtgttggaattacaggtgggagccaccacactcagccttttttctatttcttaaggctcagtgatattactgtactactaaggaaaaaaagacaagttaatgagtctgaaagagtgtgtaaaaataggttatttcagcatctttaatggcttgagatacaaagtacatagttttaaaatattgagtacatcctatagggagataaggatataaagatgaataaactaatttcatatttatgatacactagtatcagttcagaatatgattctttatatataaatatttaaaagattgttcatcaaaacaaatgtcataaaatatttggtggtacagttttaataaagtagaatcagattcttctgtgaaatgaagtataaagctgatatcgtaactaataacctgtataataccttgcattattcctgtttccaatgaagtcagtgtagtctttacatctggggctagagacagaacagaggttctctttcagacacatctctgaggttgtgcttttgtagatttttttcctcaaacctatccttacctttctttttaatttgattttgctttaattgagggacaagcagggatagcattgttatattagccaatggacagataagattctatcatacatgttctataaacttaatggtacttccccagagtctgtagcctatatatcttttatcacttctctaatctcattctagctgggtagggagagactaatttttgaatcaatgagaaattcagtttggggattccaagtaaagtaagcagtcgttactattccttaaattttatgcaaaattctattttacttaatgtgttacttattctttgcaacaggaggtggtataacagacagaaatctacaaaggatccttgagggttcaggtgctacagaattccactgttctgctcggtctactagagactcgggaatgaagtttcggtaaaaatgtattcttcgattcaaataagaaggatgagattaatttttactttctcccaaatagaaaaactttggatgggggcatgattaatcaatggaatattgtgactactacataagtattgtagttgtttttgtagttgaaaaacatttctaaaatggttcttgtcctgtcttaaataaacaggctctttgaacataggtgaaccttgccttgtaaaggcattgctgaacttagaccagttaatagtaaacaaattctgcagttgagcttcaaatgagtcagatatgcacatgtgcccattcgcctatgatttcctgtagcaaagttaataactatggtgtaaggatggaagagtcagtcatttttctccctcctacctttagtacttagtcttccctcacatttgttctctgttttcagttattttgaaattatattaccattaagaaattgtgagtattatatggggttttttaaatacttaagaagactcttacaatttaatagtagttgaatatttctgtttataaattgggaaaaacacaatgtaaaagaagcaagatggctggctgggtgaggtggctcacacctgtaatcccagcgctttgggaggccaaggcaggtggatcacttgaggtcaggagttcgagaccagtctggccaacatggtgacaccccatctctactaaaagtacaaaaaaattagctgggcgtggtgatacatgcctgtaatttaaaaaggaaaaaaaaaaaaaaaaggaagcaagagccttagaacttacaattccagatataaaatcaagtatactgtccagtggattcagctgctggatgtttcaagtaattaattgatgaaaattatggaatatactagtccagcatacttgacctacccttgtatcatgaaatagtctataaaatgaagcggcagtaggagggcccatttaataacataattatctgttcctttattatttctgttacagaaattcatctgttgccatgggagcctcactttcttgctcagaatattccctaaaggtaacagatgtgaccaaagtaaggactttgaatgctatcgcaaagaacatcctggtgtagccagacctctctgagagacatggatatcacaggatgaaggtagaactataatctgcaattctctatgacacagctttaaccttcttctctggccaggacagtcgcaatctttgttttaagtttcacatggccatggagaatgtgcccaagaagaaaaagaatttgaaacagagatacagtcacttcctttgcttagtcttaccagtgattgtcatcatggttaaagctggtctgtgcttcttccatagacagaagcttagtctgttttcagtggaattaattgatgaactgggaaaattttaactgcatggtatgaattcagagtgtgacttaagggtcaattcaaagcagtattttgacttttcatttgtaaaataaaaatttccactattaca

SEQ ID NO: 10166 - DNA, 52845 bp, Homo sapiens
gctcgagtaggggagcttgaagctactgacactgaagacccaaatctgaattatggacttgttgttgactgtggcagcagtggttcccggatttttgtttatttctggccaagacataatgggaacccccatgacttgctggacatcaaacagatgagagaccgcaacagccaaccagtggttaaaaaaatcaagccaggtactaatcagaatatattttgttgtcagtctcttttaaggcatgaaagaggagacaaaagaagcagaaagcaagctacccctttcttcttgagagtctgggtaatgggagggatatctctttcattgtcaccccctacctctcaaataaataaatgtttaggaccttgaggagaactttatagggtatcagtttcctgagtcttatgtgagccgctttttaaagaaagttttgtctgtttgtttgttttaacttaaggaatctctgcaatggcagacactccagaacatgccagtgattaccttcgtcctctgctgagctttgctgctgctcatgtgcctgtgaagaagcacaaggagacccctctttacatcctctgcacagcaggcatgaggcttctccctgagaggtgagatgcagggtacaggaaacacaggaaaacggtggcacaagagatgaaaggccagtttcatgcactgtcctctgtggttccctggtctatacccctaaacccaattatgacacaatcattcattcccaacttcttgtcatttgctgctttgggatcagtatctatctgggatgactatagtgattcttagtttggattgagggttgggagtagtggtgatggtaatagatttggatcatcgggcacatagagaacataattacagaataaattaggaagagggtcacctgatgacctggatacttagggactagtcagagagctctggtaggaacactaccttttctgtaactctgcctagaaccctggcaataactgggggagtccctcttcttgctgctactgcaaagctcagtctccattgccttaggcctgttttctcagccccagccagtcacatcatttccacttgacctttgcaattcagcctgacaccttgccacctgatccctcttcctgcattagaggaagaggaagagaaggctgtatttaggccagactccttgtttgtgatttctctcctttggtaccaccttgatccgtccatacttacgtaggccgggggaagaatgagctccctgactttttttttaatgatttttattttattgtggtaagcatacaacatgagagctaccctctaaccagatttttttctttttttttagagacagggtctgctctgttgcccaggctggagggcagtggtgtgatcacagctcacttcaacctctgccccccaggcccaagtgatcctcccacctcagcctcctaagtagctgggactacaggtgggcaccatcacacccagctaatttttgtggagccaggtttcaccatgttgcccaggctggtttagaactcctgggctcaagtgatccgcttgcctcagcctcccagagcgctgggatttcaagcgtcagctaccatgtctggcccaacaaatttttaagtatacaatacgttattgttgactgtgtgtacagtgttgtacagtggatcttcagtgcttattcatcttgcttaactgaaattttgtgcctatttatttcccttagcatattgtcgttagtgttcatccaccttgtcacatattgcagaatgcccttttttatttaaaaaagtctaaatagtattccactgtgtgtatgtaccatgttttctttacatattcatctgtcagtgaacatttaggttgtttccacatcttggttattgtaaataatgcttcagtgaacatgggagggctcatatctctttgagatcctgattttaaatctttggaataattagccagaagtaggattgctggatcatatgacagtttgattatttatttatttatttatttatttactgagacagggtctcgctctgttgcccaagctggagtgcaatggcatgatctcggctcactgcaacttccacctcacaggctcaggtgattctcccacctcagcctcccaagtatctgggaccacaggcatgtgccaccatgcctggctaattttttgtatttttttttgtagagatggggtcttgccatgttgctcaggctgttcttgaagtcctgggctcaagcagtctgcacgtcttggcctcccaaagtgctgaattacaggcgtgagccaccgtacccggcctatatttttaattttttgaggaacctccatactgttttgcagagctgctgcaccattttatattcccaccagcagtatgcagagtttccaatttctccacagccctgccaacacttgttgtcttttgttttttggataacagccatcctgacaagtgtgaggtgatatgtcatcggggttttgatttgcatttccctgatgactagggatgttgagcaacttttcatatgcctgttggccatttctgtgaatggagaaatgtctattcaagtctttagcccatttttacattgggttaataggatttttgctgttgagttgtaggagtttctaaaatattttaaagataaaccccttaccaaggtatagttcgcaaatattttttcccattctgtagcttgcctttttactctgttaattttttcctttactgtacagaaatttttagtttgatatagtcttacttgtttatttttggttgcctgtgccttttggtgtcatatcaatgagaccattgccaaccttaactttagaattcatcctcctggaatgttcatggtctcataggcatcaggtatttccttattagcttaaatattttcctttggtcaacagcagtttttttttttttttacaacgtttaaattttatagttggctttctttccttaaatcaacagcaaacaacaaaaacctcagccatacatgtagggctccaaggcttatgtcagacatgtagacaacataacatatagcagcaatgcttctttcagtggactttttttcacagttactggtttactgactggtttactgttgagaagcagattatttatatagccatttgtcaacatgagaggttttttagttccttattgccccatacatttcagtctttaaaaaattttttgttttgtttttacttatctttaaaaccaaactttaaatattgtaactgcagccttaactccttaagggaaatcttaaaaatgaacaaaacaatacaatacaacttacaaccctgctaccctatcaaaactgtttcgttttgttgtattccctcctttctgttcacatatatgtaatttccacaaagttgcaatcatactgtgcatgcaattaagaatttttatttgacataggtgatattcatattgttcaaaaattttagaaaccctgggaagaatatagatgacacaagagcaggtgccacatcacaaagtctataaaaggccaaggaaaggggagggaggccagagaaaaagctgacctggaggttaaaaaggcagaattgaccagctgagctgggcagaggaacccacttggtagtttggctacctttagtgtgtttggaggaaaggagattgttgcctcacctcctggcactgttcggtattacctctgtcaaagaagtttccatccaaacaaaacccactgtgtagctccaccctttttgtctaagatgttagttgtcaatgtggaaactctgaatattaatatttattgtatctaaagaatttttaaagaaatttgccttttttttttctctttcaacttgttttctggtcacctctctaaataatgcatacatctgttctaggcttataaaatcattgctgcctctaagtccaagcgagttgttggcataaatgtgactatcagtataagaacctgttttgtatgattaaaggtttgctaatttattagcatttgtaagcagattcaaaatagggttgaaccatttagactatattttgaatttattagcatttggttttatttctttgccaaaggcctggactaacagaattttttctacctcccttttattttgcagttaaaaaaaatcccttaaaaattacaccataatacaaggtggtgtttaataaaataataatttttattttaggaaatttcacttgtgtataaaagtaaagagaacagtgcagtaaatccccatttacccactacccagctttaacaattatcaacatttcgccattttaaaagcattttaaataaataaacaatattgaattttagaagatgaaagctttatcctgtcactatgtatacatgaagaatgatttgggtttttgtttttttagcataaatggaatcacattatacatactgttttgtaaaatgtattggacatctcttatcttttcatgtctatacatgtagatataagtagacttcatttcttttaacatctgtatagtattacattgcatggctgtgccataagttatttaaccaatccctatggtatggtatttccagtttttcattgttataaataattttcattgttataaataatgctgcagtatttctcttctttattttattgtttgatgatttccttggaattaatttctaaaagtataacagctggatcaaaggttaaacacattgaaacattttgaagcatggtcctggattgccctttagaaaggttgtactagtaatttatttatttatttattggagatggagtctccctctatcgcccaggctggagtgcagtggcatgatctcggctcactgcaacctccacctcccgggttcaagcgattctcctgcctcagcctcccgagtgggattacaggtgtctgtcaccatgcctggctaatttttgtatttttggtagagatggggtttcaccatattggccagactggtctcaaactcctgacctcaggttatccatgtgcctcaccctcccaaagtgctgggattataggcatgagccactgcacccagcctgtactagtaatttgcataactaacagcaacatatgttgttgcccattcttccatatcattgccaaaaccaacgaaccctctctttgaggagtttagaagcatatccaatagggacagaagaataccccttcttggtccccatttgaaattcttattgcaagaatttaatatgtataacaatgaactttttttaagaaactatacttgacattatactggaagattattacttcaaatatagatcttcactttgaagtgctaacaacattcttcatcaagtagtactgacaactgtctgagccagcagaatatttttgtattgaatattttttaatccaagataacttgtcttattttaactaacattttctctagatgcatattattacttctagctttgtttctttgctttcctttgcttgataatattgattacatgcttaaaatgttagaggaaagacaaccctatagatacaaagtttcaagtgttttccccaaattggaaatgttgttatgtcctctggattttgatcctgatctagggttttcaaatggtaagattttcacaatgaaaaaaaaatcaacccttgaaatatggaaaaggagattaaaaagttaattgtggctgggcaaggtgactcacacctgtaatcccagcactttgggaggccgaggcaggtgaatcacctgaggtcaggagttcgagaccagcctgactaacatggtgcaaccccgtctctactaaaaatacaaaattagccgggtgtggtgatccatgcctgtaatcccagctacttgggaggctgaggcaggagaatcacttgaacctgggaggcagaggttgcagtgagccgagatcatgccattgcactccagcctgggcaacaagagtgaaactccgtctcaaaaaaaagttaattgttagcttatgtaaaggattacattaaaacttgtggaaccaacagtacatcttgtgtggtaatgtgaagcattgtttctatgttgtgtaagatttgaggatgagattgtgttccttaatttaacatctttgttttacagtagtgaggaataatgtaattacatcaattttatagtttatgcaacttggctgcagtttcctgtggcttgtttgtactcagcctgtgagagtcatagaaccgtagtctcatagcctcatcttttaacactctttgaataataacatcatataaggggaaagtattactattaccatgttgccttttaggtaggaggctatacctggaggcagtttaaacttttaaaatcaaaggcggtaccaaaaagaagcagggctggacaagtagatgaggtaggtgaacagtgaggtcatgacaaggctaagtagaaggacaagttgaggcagtttatgagaagagagtttagtgactaactttgggattttttgttctttcttgcaggaagcagttggctatcttggctgacctagtgaaagatttaccactggagtttgacttcctcttttcacagtctcaagcagaagtgatctctgggaagcaggaaggtactgggccttaaggggtgcagctggttaacctctaagccaaccatggcacagcctctctaacgggtgtttagaattattctatatatcggattttaatttttctgccaataattttcttgattctgctacatagttgatttgattatttgcatattttgcattggcatctgtttagaatgctggttctggaagtcaaaaatgtatatctctttttaacttagtactaagcaatatgtttataagaatgtattagtatttaatgatttcagttggatatttggttagctaactgtacttttgaaaacatatatagttctaggagttgtattgagtttgtcaaagtcaaatgtaaggtaaattattaaagtaaggagaaactttaattccaagggatgatcagaatgagttacttttgttttgttatgccttcattgcaattactatgcagtattgataattccctggaatctcacactattgggtttgtacttttagagtgaatatgtgttctcatgcagccaaattggccagtttgatgaattatatttccatttcttataaacgagaaggagatttatatgtcttctaattgcagacatatacatgggaaaagatttaccttttaaaatttcagtattgcatttttcagttgtaaaatttctattttgatcttcttaatattctatttcttttcttttctgtttctttgctgagaccttctatctttccattcattgtaggactgcccatatttcttggttatatggttgctctaatatctttgataattccaatatatgtgtcatctcagagttggcatcttttgattgtcttttctcttgtgagttgagattttcctggttctttgtatgccaagtatttttatattccatcctggacattttgaatattacattatgagactctgggtcctgtttaaatcaaagagaactttttttttttgttttaggaggcagttgatctcaagttctgagctgctttctgtaggctgtgaatctttttttttttttttttttgagacagagttgcactcttgttaccaacactgagtgcaatggtgtgatctctgcttactgcaatctccacctcctgggttcaagcgattctcctgcctcagcctcccaagtagcttggattacaggcatgcactaccatgcctggctaattttgtatttttagtagagacagggtttcaccatgttggtcaggctggtctcaaactcctgacctcgtgatccgcctgcctcagcctcccaaagtgctaggataacaggcgcaagccactgcggccggcccgtgattctattagttcatttttcttttctttctttctttctttctttttttttttttttttttttttttgagacagagtctcgctctgtcatccagactggagtgcagtgtcgtggtctcggcccactgcaacctccgctccctggttcaagcgactctcctgcctcagcctcccgagtagctgggactataggcgtgtgccaccacgcctggctaattttttgtatttttagtagagacggagtttcactgtgttaaccaggatggtcttgatctcctgacctcgtgatccacccacctcagcctcccaaagtgctggaattacaggtgtgagccaccgtgcccagcctattcattcatttttcaaagccttggccactgctatttggatttgtcctgtgtatcagccagtggctaatctggaacctgggcagtggcctagcctgtagttcagctctcagagctgtttggatattgtttagggtcagatccatgtatttgtagcttggaggtgagcccaggggttcatacacaactttgctccctactgtctgtgatccctctgccactttctggttccttggagctccctttcatgatcctcctgtcagaataccagggctttaatttgcccactctctgccatgcacttctcatgactgcatctgcatccagggccaagcggtaggaggacagagggagcctaaataaacaataggatttgtttcacagtcttgaagctacagcttctctggtcagagaaaagaattcaaagccctcagagttttaggtacctgctcaaattctacctctgttgcctaaggttagagagaacaaaataagaaagaaaaaaaaagcaggagatttcccttattttctctgaacttttggcattcctttttctgttctttggaccagaaaatgagttgaagttcctctgttcacacctggtgtttactttcatgtttcaagctgctcttaagtctagaccaggtaatatctgagggggaaaaaatgggacactcactactggcttggtggtagtttaaaccctggtctctttcccggtgtgctcattatcatttactttcagagtttccagaaagctgctccatgcattctatctagagtttatatttgtattcagtggggagacaagattgcccagaactagaactccaaaatttacattttttcttttttttcgatatcttcgtgacattcagatgatttatacttcttagacatttgttatacaattaatttctattcattgaggaaatttagaagatgcaaataattttaaaagggaaaaaaatcacaagatgaaagatttgaaattcctacattgagagtatggaataaaatactatgattactttttccaagaaaaagaggaaagagaagccctaagggagaggtgtatacatggcatagcagtagagaattaagtgagggcttttctgtttcttacttaggggtttatgcatggattggaatcaactttgttttgggaagattcgaccacgaggatggtgagtaatattgtctttttatgacagtttacctaagggctgaagatttaagttataacctatcagtagcatgtaaatgcaaattttgagttgtttttcttttttcaaacataagatgcttcattttccagtcctaatttgctttctttgatttctttttaactttttaatatggaaagtttcaaacattcacaaaagtagaataataaaatgaacctccatggacccattacccaggctcaatatttactaatgttttgccatttctcccccatatccccccatgtattaaaggtttttttttctcattgaatgttttaaaaagcaaaccccagacatgtaatttttattttcatgtatgtcagtatgtatctacaacagataaggggtttcaaaatgaacaaaaaatatatccataatgccatttttaaatttaatagaattaacaatttctaatatcatacaatacgtatctaataccctatccaggtatagattttcctgattttctcaagaatgtttattcgtagtgggcttgttcaaatcagaatctgaacaagggtcatgcattgcatttgattaatatgtctctttagtctcttttaatctataattgttaaccttaccacctcactcccctgcctttaaaagcaagaaaaaattggatcacctggtagaaagaatttgccacatgctagatttgattgactgcatctttgtggggttaacatgttttctttaacatgtttcttatcccctcatatgtcctttaaactggaggtcagatatagatgtttgattagactcagattcaattccatctgcaagactaaatcatagaaggcgctgtgtgttttccactactcacatcaggagttttgtaatgtctggttgactcactttttgtcatgctcagactgatcaggtattgagagttcaagtattatcagcctgatctaacttagtattaaaattccttatctgcctttcatggaattgtggtaatagccaattgtgatcattgcttggacatgtttttcattagagattgcaaaatggtgatatttctaattctgtcattccttctgcatttaacagctagaatttttatgtaatgaacttttcttgatcaactctttggttaccctgacatatagttcttatgggaaagacagaataaatccttgattctttttatttatcacatttctgaataatgagttggtgtctagcaacttccaaaggtaaccagtgaaaaaaaagttttaattattattatgaactcatggattttaatatattagatgcattagagcccatcacattattagtattttaaggagcatctttaggttggctgctgtatccttttaatatgaccccaatactcttttatattccccttgctatctggtacagcaatgtattccagggtcatcttgtatactttctaccctagacctggcattggcctgtttttaaaagagccctggtttcttttagtaaaagatggtatttagagattattggtccagataccacaggtggtcattactcctgggatatcattgcttctaggcctttcagtgaacacagctaggaaatatgtattttttagaaagagaaaaataaatgagttcatagtcatatttctgactcatatgtaagattatagggtgctattaatttatttgatttttatacctatatcctttttgttctgttatgctgaatctttgttcctaaagatattgacataaacatttatttgttttattccacaatatgtttcataattttttttttttttttgagacagtcttgctctgtcacccaggctggagtgcagtggtgcaatctcggctcactacaacctccgcctgtcgggttcaagcgattctcctgcctcagccccctgagtagttgggattacaggtgtgcagcaccatgcccggctaatttttgtgttttagtagagacagggtttcaccatgttggtcaggctggtctcgaactcctgaccttgtgatctgcctgcctcagtctcccttcataatttttaaataataaaaccaacaatattgttaacaagactactgcgatgtagcttaagatatttgtttcttttgtccttaggctatatcctactagggatacgtagtcaaaatgtcatgtttaagtaattcacaagaattattctttgtgtaatatatagttgattcagttagtatacttgtttgctttcttttttttattttgagacaggttctctgtcactgaggctagagtttagtggtgcgataatagctcactgcagcctcaaactcttgggcacaaatgatcctctggcctcagcctcctgagtagctgggactacaggtgtgcaccaccatgcccagctaattaaaaaaaattttttttttttatgagagtgtctcactatgttgcctaggctggtcttgaactcctcggctcacataatcctcccaccttggcctcccagtgttttgggattacaggtgtgagccatggcacctgcctgctttcaaattttcaagggattgctgttttgggggtttgacttaattttattttttaattactagggcctttttgttctcttatttatttcagaatcagatgctgaggctacccaggaattggcagcaggacggagaaggacagtagggatactggatatgggaggagcctctctccaaattgcttatgaagttcctacctcaacctctgtccttcctgcaaagcaggtactttaccttttagggaaatttagttgctaggaatgctagtatttgagaaggaaggacactgtctttggacttagaccaacctacctggctctaaatatttgttcagatacttgctagcttgcgttatcttgagtaggttacctctctgagcctcagcttcctcctgtgtgaaaaaggaataataatagtatctacctcataaagttatgaggatgaaataataccatgtttgtaaagcatttagcaaactgtccagcataagtgttcaatacattttaacaattataactatactaggtatctcctgccattgctgaggataaacatgataatgcatttacattctggagcacagtatttgatacatatctattgttcaataaatgttattccctttccccttactgatgattccattctgggccttctaataatccttaccccactagaatgtaaagaatgtattttgagggagaagtttcatcctacacagacactttttgtacagccattatgtacacctattatgtacacccattatgtgcaaggaatagacaatattatgtacaaggaatagacatgtgagttacactgtccctaaaaacttataatttatctgtcagtggagacagcttgtgatatcagggagactgtagcagtgcttaacttgatctaaaccagggcttctcatcgttggcactcttgacattttgggtcagataattctttgtcatcaggggttatcccatgcatcatatgatatctcttgcctataccagatgtcagtaacaaccctcccccttccagttgtgacaatcaaaagtgtctccagacattaccagatgtgtggggcagggtggaaattgcccatcattgagaacatctggtttaaacagagagctgtggcaatatggggactggcagccaacttagcttgcaaagttgaatgggagccattcttgcttcatggaaggtaaagtatttacctgggccttggatgagagtaggcttttttttttttgcagagtggaggctgagggaaggccacctgcatggagggaacactatatacaaaggcacagaaaaagcagcacagaggccagaatgtccagggaatgacgaatagccttttgcagtataggattttcaggtgtgctagtagttaagactgggaagataagatggagctaaatcatgagcagtattgagtgctatcataaggggactggcttttatttccatagatagtggaaaaccaccaaaagtttttgagtaaggcagtcacatgggcctcagtttcatttataaaataattaaactgtgaaggtccttctcagctctgaattttgtgatgatgtcagttgtgtgactgtgatctgatctttttgtagtgaaaaaatttttgtgtcagtaggagaaagaatataggtcacggaaccttgagtgagaagtaataaagggctgagttagacaaagtaagtggaaatgaaagggaggggacagatttcaggggatagtttggagtgaaaacccaatgtaattgagcgattgattgtggtagtgtgagtagggtgggaggatggccagcagtgctgaggatctatcctagataaccagaagactgaggaacccagtaactgagagaagagcaacaggggtaagggcaggggtgatattaagcaaacagtattgtcctgagagatctggatgagagcgtctatctggtcttctagttcagaagttgtaaaactaatgacttcaattttggatatattgagtttaagatacccaaggaacatatatgtcagaatatccacaggactgttggaaatgtgagtttagcagtcagcagagaatttcatgctggggttggaaatgtgggggactaactaggttgtgatactttttagtctatattcgttagtatgtatttaacaggtaaaacgaaggcatggatctgatactaagaaataggtgacaagcgggactggggcttcaagtcttaaagaaatgacttttgtgtgtgtgcagatttagaaaggaacatggttatggaaagcaacactggtacggaatgcatacttgcaagcaacaaattagatttacatatagcaggccgggcacggtggctgacgcctgtaatcccagcactttgggaagccaaggcgggtggatcacctgaggtcaggagtttaggaccagtctggccaacatggtgaaaccccgtctctactaaaaatacaaaaattagctgggcagggtgggcaggcacctctaaccctgctactcaggaggctgaggcaggagaatcgcttgaacctgggaggcagaagttgcagtgagccaagatcgcaccactgcattccagcctgggtgacagagtgagaccccatctcaaaaaaaaaaaaaatagtaactacacatagcaatataatggctcttcaagatgaatcttagtgcttggtaaaaatgaaagaaactgtgagacaatggcatttaaaacattttaaataatcctgaatgcctaatatatttttttgtacaactcacaaagttatgtacattcacaaagttgtgcagccaccactattgaattccagaacatttcatcgccccaaaaagaaaccccatattcactccccactcatttcccattagcagtcactcctcattctctcctctccctacccctgacaactattcatctactttctctctccagtggatttgcctattccggacattttgtataaatgaaatcatacaatatgtggtgttttatgtctggcttcttttatttagcaaaatgttttcaaggttcagccatctcgtggtatgggtatttcattcctttttaatggctaaacagcattccattgtatgaccaaccatgctgtattttgtttatccatttatcagctgatgaacatttcagtggttttccctttttggctattatgcacagtgctgctgtgaacattcatatacacatttttctatgtacataagtttttttgtttttttttttttttgagatggggtttcactcttgtcactcaggctggagtgccatggcacgatctcggctcactgcaacctctgcctcccaggttcaagcgattctcctgcctcagcctcctgagtagctgggattacaggcacccaccaccatgcctggctaatttttgtatttttagtagagacggagtttcaccatgttggccaggctggtctcgaactcctggcctcaagtgatccaccctccttggcctcccaaagtgctgggattataggcatgagccaccatgcccaccccagtttttggatctcttggtatgtaccttggagtgaaattgcagggcacaatggtatttttcacaaattaaaaagaaatacattcaaaacaagaatcctcattttataataatacatatatacaaaaattatacataacacattagaatggttgcccatggcagagaatggaatgagattaagtatgaagataaaagagaataaataaataaagcaaaagagaggctttgccatgataatgtggaatgagctgaggaatatgattaattcagcctctgcccttgaggttcaagaaaaaaatatagcaccttttcattggcggtacaataaaattgaactttcccaatccccaaacctgtcataaggaaccttagggcttcttggataatgttagaaaaggccacagaaccgggcacagtggctcacacctgtaatcccagcactttgggaggctgagaagggctgatcatgaggtcaagagatcgagaacatcctggccaacatggtgaaacccgtctccactaaaaatacaaaaattagctgggcatggtggcacgtgcctgtagtcccaactactcaggaggctgaggcagcagaattgcttgaacccgggaggcggaggttgcagtgagccgagagcatgccactgcactccagcctggtgacacagtgagactctgtctcaaaaaaaaaaagaaaagaaaaagaaaaggccacagaatagatcttatgatgatccacagagttccttaaatttatttttattaaaggatgttttcctattaaaataacacattcccattgagggaattggaaaatacagaaaaatacatgtgagaaaatgatatctgtagtaattctacctcctatataactacagatagtgttttgggtttctaatttcatatttagttcttaatttagtgtctaatttgtaccttttagtgcagtcttgtcattttgtgtctttgtttaaaataatgctatgaggatgaaagaatgcttaagatgttttaaagagtagtcatagaaatgaagcctcgtgtattagcaatgtcatagctttctagaaggcaaccaaaactaaaattccctttttctcttggtattgtattataggaagaagctgccaagatcctgctggctgagttcaacctgggctgtgatgtgcaacacactgaacacgtgtacagggtttatgtcacaacttttctgggtttcggaggcaactttgcccggcagcgctacgaagaccttgttctgaatgaaactcttaacaaaaacaggtacatttgatatgggatctgagtttctgaaatataatgtcaggctgcagatattagggagaaatactcacatcctcctaagacagataagtccctgcttcctccttctttctgactacccctgccaatggggtagcatctcttaaagacctctattagcagtcccactctgggtgagggtgcattctgatctttgttattaggactcataaagtacagtagcttattgtgatctcttgctgtttcccatattcagacctaacatcatgggaaaagggagatgaattaaattgccagtttaaaatgtacaatatatagtgtagctgctagcagttccttctgcatggaagtgttcaagacatgtttgttgaattacagtgcagttgcatcttttgtgagagttcagttctgtagtatgtctaaaagataaaaagcaagcatagttaaaattaacttttaaaatggtctctcatcaaattcataatagtcagtttttcctttagcattggacagatcacagattcttcatttgagtaccagatgaagtagttagaccttaatgtacaaacagtggtgggatttcttgtttcttttttgttttttaagtctgtaaaattatttattttatcattaagcacactgaaggaaagcataagagaaagcagagttcttttccatcattaaatttacacaaaattttggaatgaaaccagtttaagtaattgggtgattgattgtggtggcgtaggtagggcagggaggatggccagcagtgctgagggtctagcctaggtaaccagaagggtgagaaacccagtcacggagagaaggaccacagatgaaagggcagggctgatactaagcaaacaacacacttacctacgtatacttaaccatttagctacgaacactagcttgaagaagtactggtataccccgtttgtaataatttatccacagcaatcaattatcttatatttacggcatgttgaagaaaatattgtcccataagtctattttgtttttgtaagtcttagtctctaggagttcaaggtgctttgggagaatcctggtgccctggatgattgactaatgcattaaaatcaagtggtgtgtttgtattctgaaagtactcctaaatctatacaaacattgcttgggttgaggtgctcagatgtctcctgcaggcaccatgatgtttgaagatcatttgttttgaaagtttcacaccagttttggttttccttcttcattagctgctgtgcttccttttccattttcttcttttgttctactcctttcttttctgtctgctgttttctgctgcctccaaactacttcttgccagactgcatcttcttcccatgcgttggtattttcttgccaagtagctaagtcacctacatcaggtgactgatgagtaaaaggcatatcttgtgtagctgccagtctattaacctatttcctgagatggcaaaatgatcattgtctcttctcaataacaattttctgagttttccttacagttggtgtcacatccttaaaatagtcggttccagttgttgtaaagtgttctgttgtactgcctcattccattctcaccctcggtctttacacctgtgggcgcatcctcattctaagaagtccactcttcaacatctgtctgtttaggaactgatgaataattaactgcaattggcaaagttacttggaccccaacttaatttctgtccttggacagatcttcatactcatcattttgaggaatgagaatatggttgctaggcaagtataaactcaaaataactggacctgtgttacggccatggtgggaatcaaagctttccagtcttctccccactcagaggctccaggctctgcaggtggcttcctggagctggtgctgtgcctgttctgttccagcactgctcattcagaggcaggcatgggctccatcaccattgccagccattgcacatgggccactgccgtggtctgctcttcaggaatctctccccacagtccttcccacctcaccccctaccagttgtatttttaaacattagaaccacactccgcacgataaggtccttgcacttttaggaggtacgtgggaatgaagaccagatggagaacagcagattcacatctccaatttcactacagactaggaaatacacatgttgactaaaatgtcgaacagaattgatcaccatattcctctcttttttttctaaatttaacttgctgaagttaaatgtttatgtgatgaaattgcactccatcctcgtttctagagatatcatgaaaaccagtagtaagatatttctgatgcacattgtgtttcttagactaggttgaatacaggcatgacgtgtttgtttgtttgtttgtttttgtcattgtggcagattgcttggtcagaagacaggtctgagtcccgacaatccatttctggatccctgcctgccagtgggactcacagatgtggtggagaggaacagccaagtcttacatgtccgaggaagaggagactgggtgtcttgtggggcaatgctgagccccctgctggctcgctccaacaccagccaggcctcactcaatggcatatatcaatcgcctattgacttcaacaacagcgagttctacggcttctctgagtttttttattgtacagaggatgtgttgcgcattggtggccgctaccatgggccaacatttgccaaggctgctcaggtaaattattaatgataaacatggcttatgctggcagcagccatttattgaatgcctcactctgtgccaggtgctgtgcaaagggctttgcatacagaatctcacttgttctttgcaggagccctttgaacactcattttacagatgaggaagtggacagagaacttaaggatctagctatgctgtactgccttctaattaactaaatttattttccatggatgtcataccacccaaattattacccaggcataaaatttttgtgttggctaatggtttttcttccaactttccaatagtcttgtttaatgtttatgcccaagaaatgtcacctccagtatttttcctcttgctagctattttctgttgtaatgtgcttttggagatgatatcacccagaggggcaagcccatctttcttttgggttgaggtattaagaggcagagtggtatggggtccctgggaatattagatgttgtaaaaagcaatgatggtggaagtttgtttagatttaaaatagaggagtaaaaattcactctgagcatatataggacttaagcatcatataagtttaaatcattggtacctggacagatgaaagtttagccagctttctatcattttctgctttatttagggccatctctttgaattgttgcgtgtctctatctttttcatcagagaaacgaatgggagaatctgtcctcatatttctttttttcttgagatggggtctcgctctgtagcccaggctggagtgcattggcatgatctcagctcactgcaacctctgccttccgggttcaagtgattctcctgcctcagcctcccgagtagctgggattacagatgcccaccaccatgcctggctaatttttattatttttaatagagatggggttttgccatgttggccaggctggtttggaactcctggcctcaggtgatctgcccgccttggccccccaaagtgctgagattacaggcgtgagtcaccgtacccagcctctcctcatatttccctccctccctcccttccctccttcttccctgcctacctttctctttctttcttacaattctctagggttctcttagtgtaaggcttccagcaaaataatatctgcagtatctgtactgttctgttcccaaaagacagtccttaagaaatactgtgggacacctggtttgtatttgctcctttctctccagcctccaggacgaccttcacgctccctgtttttctggagcccagagctccctaactatccatggcctgactctttctcttatctcaaaacttcttcaaattctattcccttgaacaccaaaaggctcaagttattgggcttaacatattatcttttccaggtaaaagcgatttttttcccttacctttttaactttgactcaaacgttatcttcccagagccaccttctgggaccactctatccaaaatgacaacgctccccatattacctgttgccctttcctgctttatttttccctgagcatttatgttatccaacgtaccgtgtgtgtgtgtgtgtgtgtatgtgtgtgtgtgtgtgtgtgtgtgtgtgtgtttattgtctgtctcctaccactagaatgtaagcttcctgaggacaggaatttttgtctgttttatttactgcatgattccctggcatctagaacagcacctggcacatagcagacatacaaaccaaaaggaatgattattttggtgagaattacaacaccgagggaggccaatgacaggtttctaaccatcctcttccatctgctctccctgctcatgtcagtcctatgtggagtagaatgaaactatctttgtcttttgacgttgctatttgttagtcctaacctcagcccctctgaagcctaagaggctcagaagccacatcaagctggcttggtgctagacatgggatgacgggaataaacaggggtatgacgcagtgtttagtgaatgaacacaccatttctgttttcctttgtcagctggtagcccacaagtaactttagaaatggaacagctgtgactgtggggaaggtagagagtttgcctccaaattcatgttgcactatttctctgtggttgatccaggattactgtggcatggcttggtcggtactaactcagagattcaagaatggcctcttttcatcacatgcagatgagcatcgactcaagtaagttacttccctttcctccttagatgtggacttaaaatctagatggcagattataatggagagtgagcaataatgcagattagatttcatgttgagggagcatttgattattccagacttgattttctcagggataggggccaaaatagtgagcctattatagcaaagccagaagaaatcagtggttaccaaacagagttctcaacaagtgatttgacaacaaaagtgatttttttttttttttgagacagagtctcactttgttgcccaggctggagtgcagtggcatgatcttagctcactgcaacctccgcctcctgggttccagcgattctcctgcctcagccccccaagtagctgggactataggcacgtgccaccatgcctggccaatttttgtatttttttgtagagacggggtttcgcaatgttgccaggctggtcttgaactcctgagctcaagtgatccgcctgcctcgccctcccagagtgctaggattacaggtatgagccaccgggcccggccaaaagtgattttttttttaactttgtattatagataatatcaaacatatagaaaagtagagagaatagcaacataaaccctcatgtaactatcacacagcttcaacaaataacattttgccagtatggttcattggtcctttcatttttaaatgttttagttaaaaattgtttaaaattgccgggcatggtggctcacacctgtaatcctagtgctttgggaggctgaggtgggtggatcacctgagttcaggagttcaagaccagcctggctaacatggcgaaaccctgtctccactaaaaatacaaaaattagcagggtttggtggcaggtgcctgtaatcccagctactcgggaggctgaggcagggagaattgcttgaacccaggaggtggaggttgtagtgagctgagatcgcgccactgcactccagcgtgggtgacagagtgagactctgtctcaaaaaaaaacaaaaattgttttaacataaacaaaactagaatagtgtaatcaactcctgtgtacctgtcaccctgctttcctactaacatttatcagctcctggcccatcttgtttttatctgttttcccatccacaatccccctcttacttcaactgggttgttttgaagctaatcccaaacatcctataattacatttgtagatattttaatatgctctctgaagatagggactcttaaaaaaaagaaaaagaaaaacacagccacagtatcattattgcctttgtggtaaacacaagataagtaggctgacttagaaataacccacttagaggtgaggaaggtgaagcgggaggaggtaggtcttttaataacttgtgggaatacggagtggcttattgcaaaggaaagtattagaattcttttctctttttttaaaatttaattatttttgtcacacagatatcagtgttttaaatcggcttggatgtaccaagtcttacatgaaggattccactttccctatgactacccaaacctgcggacagcccagctggtgtatgaccgagaggttcagtggacgctgggagccattctatataaaacacgattcttaccactcaggtaaagtaagactgaccaatctggtatcttgagctcagaggatatcagttgatgcctcagaatcggtttctttctttttttttttaaccagcttagaataggtcttaagtgaccttcctctctaccccctcacaaaaacaaactcctttacttccatgtgagccactgttactaccaggcatgctcgaacagaaagaaggttgagcattactggtctggagtctcagctttgctgtttcagaaatccagctttatttgtttactcacaacaaaccagtctttaggactgagctcttactaatcacttccaagatactgacaagctaaaatgtcattcttgggttaccctggaaaacacatctgactaaagaacaggggtaggatgtctagagcaatctttcataacatacagaggcactccagacattgtgtcattgacttagaaggctttttggtgggtcagaattagaataaaggacgtgagatgtttttagtggggctactttcatcaaactctggtagcctgataccttacttttatgtactgtcagatatttgggacaatttttaggtacctgtaccctggactatttcagataaactcagatgaattttgtatctttgatgtctgttcctctaaactcaataccgtcagcagccaggcaggcgacagaagtgagggaagtgggctaggtgggggttgcccacaactggagcatgtatcccagttaatgggctggttactgtcacacacaagcactgtcccagcatttgccagttctcatctgtccagaaaagtcagaaatccatattttttatgaagtctttcagtttagagattcgcattctagaagaacactgcaggtcaaaccagacaaaactagatctggatctggactgctgaagagtggcttctgttctagccaggtggaccattacacttggttttcatatcgccttatttttatctgactgtaatacagttgatcaggtaacagctttatttagatatatcctagatcctaaggaaacatagtacctttattttttattatttttttgagacagggtcttgctctgttgcccaggctgagtgtggtggcagtgccgtgttcatagctcactgcaaccttgaactcctgggctcaagtgattctcctgcctcagccttctgagtagctgggaatacaggtgctcgccaccatgcccagctaattttttgatttttcttttgcagagatggggtcttgttatgttgaccaggctggttttgaactcctggcttcaagcaattctcctggcctggcctcccaaagtgctttgattacaagcatgtgccactgcacttggctgcatagcaactttaaaaaaaggatttagacacacacactctgatttctttattggattcaggggataccctattctcattagtactgtatttataagccatattttaagacttatgttacaggtgatcaatctagcctttctgttcattttttgggattcaatttcaaaggccttcccatcttggcttagattctggagggtgtaagcctggaggtcccttctgggggccgtgggaaggaagacacagaagggctcctggggcgggggatgttcttcagctttgcctgctctgtggagctggtgtcataaaatgtttatgtggatggaataaatgtgataacactactgggcctttcaaatcagtaaatgtctccctttgaaacttaacagttttttccacctacaaattcttaattcttccctagggatcttcggcaggaaggtgtccgacaagcccatggtagctggttccgtctctcctttgtatacaaccactatctcttctttgcctgtatcctggtggtgctactggccatcttcctataccttctgcggctacgccgaattcaccaccgacaaacacgagcctcagctccattggacttgctgtggcttgaagaggtggtgcccatgatgggagtacaggtggggccgtgaggctggaccaggactagagaagcttgagcacccccgagttgctgctcattgaattcctccactttcttatatagcctcagatgctgtgatgtctgaccttgtggatatttgcccttggaatttctactttactttctaccgtaattccttctccgtacccaggtcttctctgagagaagctataatttaatctgtgaggaactaaatgacaggagattggtgctaatacgggggaccaagctttgtccaagtgaagcaggcttcgactccttctgagaggtctggtgtgttcctagaatctcaccttttcttcccttgctaaagcatgaagtttggcatttggcacactggaagcctggttgaaatgaaatttgtagcatctgatacaaagccagagacattctagcaagtgcagcagccccttctttctctgtaacagagatatcatttatgtggagatccacaacctttaacagggatccaagatctttgcagttcaatcgaccacataggaatttccaggcaccaaaatgatataacttccttgcttccttgacaaagaagccatcatgggtgtgatccaagatccctgtcgtagtgttgatgatgttagtacatgattttaaaggttagaaccccttctaaatgaatggtctgtggaagattttagtatcttatctgatgcctggtatgatgaggatagaaaatttttccatttttatgtgcctcacaggctgtttgggcattaattttgctttttgagccttaagtgtgttagtaggatggagaaactgtgatggggactgggaacctggatttgtctgattttaggtcactgttccctgggcctgtttttgtgagcccttacacaggaagatataaagagagttctttcatttcactgctaaaatcagtatgtagtatggggaatgtatttgggttgtttttaaagaaaaggggaacagaatcaggagagtgggcaaaggcaataaaatcaaagttcttattaattatttctgagaaatagaagtttctcaatttatgactcttggaatgtctgaaagggagcaaatttggaatagatcaatctgttaataagccatctggcaactttcagaacctctattaagagactgctgagtcacaaacagcacttccattaatgaagcgagaggaaaagccataataattacatcttcacccactacccttccagagctttgcttctcctccacatttagccattaaattgcatgaggatttctcttcatcagggtccgcatggaatctttcttatattttaccctttcctacatgtagccttgaatgtcctttccacgaatatgctcccacggctgggagcattttcttttcttttcgtcacctttgatttttgggattagattaataggggaaaaagtccctggctttaaagaaaacaaaagtagaattcttcaaaaataaatttcatactgggaacagaaaggaactaaatgcttcataaaacagggaaaaagaaattaagatcatcctagaaataaactaagataaaaataagtatactgacccttggttggtagataaaaagatgaccagtcttgtattgttttaaaattagataaacatggattaagcatgcaaagactctgttcctttttttttttcttggagacagggcctcacgctgtcacccaggctggagtgcagttgtgcaacatcatggctcaccgcagcctcaacctcctgggctcaaacagtcctcccaactcagactccagagtagctgggactacaggtgtgcgccaccacactcagctaattttttattttatttttttagagatggagtctgtgttgtccaggctggtctcaaactcttgggctcaagcaatcctcccacctcagcctcccaaagtgctgggattacaagcatgagctactgcacctgccctctgtttcctttggaaatctcttacctttcattagggtttctttcatagcaatttcctttggtttttaagacttctacattgctttttcttttattatctgtgctccgtgaaccttatgaatgctgcttaaaaataatgtcaaaatatgttttagctgcctactcaggtaacgttttcttttgctctcatcttggtttccatatactatttttggttttttgtgagatctaatcaatgatctagtcagaagctacttcactggctaacagtgatcatgttcatgtgctaaaaatgaacttgaaacacggaagtagtggttggtccagtttgaaagctcttattagtattcttcatcctggctgtaataatagccattatttgttatgcctttgttatgtagcagacactcttaaggattttatgtgtattattcaaattgctattactgttctttttatagttgagaatctcaggatacctacatttatcactttttcaatatatatgtatttcttattcttattttgtcttggagtgtttaatgtgttatttcctgttcattactttaatattatggtatctaggcttgtctttattaccatgagcaaggtctccaggagttccacagtactgaaggaaaattttgtcatatccctcagaagaactgaatatttattattggtatgggctcctttgtttattctcttctcccaattaatagattttaaatgaaatcttattagctagaaacaaaagccacttactccttgctgagagccaattacttaaatatatttcttccttataataaaataatttgcttctaggagcagaaatctatcttgccataccctttggtttttaaagatttctcttctatttgcatttctgcactttggtggttctcccatgaagataattatggtgtcataaaattcacattccactggttcctttgaatcttaccaaccactcttgttaacagagacaatgaacctgaactgttttaggactcttgttattactgagacaggtcacaaacatcaaaataggagtccgtggcttgtagtgatgctttttagtcttgtgatagcacaatccatcactttccccaaaattcttgtcatagaacataatgaaaaatatgtaaaatacccatttatgtggcatttcattcacttaagttgcagttaactctaagccaaattataccattttttctctctgtactttagctccttgaatttccttaatctgggaaacttttgttcccacaccaaggaacaaattcagggggtacaagtgcaggtttgttacatgagtatattgagtgatgctgaggtttggggtacagatcccatcaccaggtggtgagcatagtacctaacagatagttctttaatccatgccctcctctctccctccctgctctagtagtccacagtgtctattctggtctgggaaattttcatcactttccaccaatcttctatttattctccaaatgtcttccaaagtatcctgccccaccccctcctcatcctaagagattcctttaacttcaagatcatatccagtgattgctgaaaaatgtctgccatgcacttgctaagctagtgtttttaggcattaacatttattatcacatccatatttatatttttgaaataatttatacttctcactgatatcatctaaacagatgcttctcacagttttatgttttgttttttgtcagggatgaaagacaagtgagtggtatcacttaagggaaagaacagtaggcttaacgaatagcagacctggattctagttctggctttgtcatttactagctctggtaccccaggccagtcacttaccatctctggttcggttctcatctatcaaacaaagaggctagacaagattagaaactaaaggcagaagacaaggtagaaaaatcatatgattttgggaagagcattttgtcctttggtttagaagaccaggctgcccaaaagagcctcctattttatccataacccctgatgataaggttggtgggaacagagtttctaatagtaatcataataaatttcagaagagttttaaagcttctggtcaacccccttgatttatatgggtgataaaactgaggcctagagcagttgtaatatgtgcaaagtcatagtgactggcctcctagcccaactactttgtcagctacaatgaaatgctcattaacagaatctttctgcaagtataaacagaatctattttttataaaacagctggccacaactaaccatgccccatctttacaactgcttctgacattcatttatgactgctttgctcacatttaggaataaactttgaaaaaaatactttgtcagaaatagtgccaagttttcactacatctattcttgttcctgtatttcttttcgtacttttaaattttatacatctttttaaaacaattttatacaatttcctttactacaacatccaagcaattcattagatgactacagcctagatgaaggtataaatgcctattacatctacctcattaaagaacttcgttgtaattcttgggcagtttccagactctgttacagaaacagagggctgtttctttttgttgtctttaaacttttcaaattaattcaaaactagtatctaattgtcctttttgctgtggtatgtggtgtaatgttgattgggaataagaattatggtagaaatagcagatgtttcaaattctcccatattagtctcttagggacgctagctccagattccagcccctggggcaataacttgtgaggattttcctggtgttacaaaaaatattgctgttaaaaaactaagactcaaaaccaaaagttgtgattaataataacaggattattagtcaataatattttgattaatactatagaatagcaacagtgaatatacctcaaattgaaaacttttaggttgtgttcttggctcattctctcataacctggatctaagttggaaagctgtggcaccctgtttgggtgtcccatctaccctgttttctgtttctgcagatggcttgttcaagcttcattttaagcctgctctgtctacttatcttccttatatcctaatagacttctcttgtgttattacacatttctcttttgctctaatatttcattattttccagtttgtcagtaccgttatcagagggacgaggaaggaataacacaccagttgaccattttgtttctctgaaaatctgagcaatacggagatccttttattagtaaaactgaatcattactcatactacaagggctttcacttttaaaatgtaatccatcattgcttgccatttttatgaaaaccaaagttgaaaagtcttctgaatcacaggctatgtatagccacacatgcatgacttcaggctagcataaagacatgtctgctcctgagcctcttcttttaaagggcaaccacttgtataccctctggtggccactcctccttctccactccaaggcagccctggtactttcctaagtggcccctcctacagagcacttgccggcatttggcctgctgctggtgaagacgccccttactagcttcataaatgtttttctgcaagcagggatcccagacacatactttggtttctagtgtttcagttactatgttgtatttgaaattctcattccacaattaccctttagttgaagtcctgaagtacatgccatgtactccccctttatttctaccttgatcaatggcctctgcggagtgtagtgaaagacatctttttattatgatctacactttaaaaaaccaaaggctgcctgtattacattgctttggggagttgttaagactctgttttttctactgcttcacattaaacaataattttgttgaattttgaattcttaaaattctcactgacaaacattttaggtcagtgttgaggaaaatgtgtgatgcatgttagagaggtgatgcattctcccttatgcagggacatgggtatatgtgttacatatgctgatatataacccaccattcatcccaggaccacaagggtagctgtagataaactggttatcctaaaatcatgattatcagtgttgatctctgcaaccaacattgctttagggagttgctagtcattacccctgctacaatagatagtatttgtcagtctaagttacagacaaaaaattctaggttgactgattaagaaagccatgtgttttaatttccttcatgttttaaaaacaatggacgtaagtgcagagagacctttgaaaatattaagggaaatctatttaatcctataggtatgtgatgacttgtttttttggaaaaaggtatttggaacatcaatctgtaattatccattttccattcatgcattcactaattcaatatttgatatgtgtctgggagtgctgggaataacataaatacaaaaaaaaccctaagataatcattcaccagaagctcatagatataatacagttatatagctaaatgcaaccagttgtttttccaaatgtactcatcatctgtaataaaagaaaaatgaagtaaaacatctgaaaccttaacttactcatgagttgctacttccttggaggcaactgtagaagcattaatatatggttctttgggttgggtcatactgccctctgctgactcagttactaactaaggacaacctgggtttgaggatcaggagaggatggtgtgggaacctgcctcaggaactacagttccctttctttgaaggattctatccagaagagaccatatcctactaacatactaataggagcaacatagcagatcaaatgataaggtggggtggaaattagaagggaatgggaataagctagtcagaactttctaaggtaactaggctattaggacctaagccagtggtccctagacttgtctgcacattggaatcacctggggaactttaaaaatatgccttttacttcctccagggattgtgacttaattggtcttagatgaggcttgggctttgggatttttctaagattcaaataagagagaagttgggaatctcttctaggcaatagcataagcccagccagggtccagcatttatgaaaaattgacaaactgttttgctaagaatcacctgtgttagtcggcttgcattgctataaggaaatactgacaatttttagaaagaaaagaggtttatttggctcactgttctgcatagaactgtataggaagcatggcgctggcatctgcttctggtgagggcctcacgaagcttacaatcatggcagaaggtgaaggggagccagtgtgtcacatggtgagagagagcaagcgagagaggaggaagttccaggctcttttaaacaaccagctcttgcataaacaaccagagtgagaactcactcattactatggggatggcacaaagtcatacataagggatccgcccccatgacccaaatacctcctactaggcccacctctaacactgaatgtcacactttgaacatgagatttggaggggacaaaacatccaaaccatatcaccacctgagaatggtacactacaggtcacagaaacttacagagtactggagttgaaagagaactgagatcacctagttcagagactaacgggaaacgttaggtcatttatggctctcagacacgttaagcctgcataacattttttaaaatcttgaaattagttcccaacacttaattgagagctttcacagaaaaatctagatatgtggcttatttttaaaaaacagaagatttgctgacttaaacactgcaaaattaaacatttatatctgaatccagcatctctttttgctttgtaaatgaggtcaaggatgaaatccagatgttcttcctttgtatttgtattgtcactgtatggaatctaggtatatccaaggaaaaataaacttaagataagcttattttccttatttcaaaaagcaaaacaaaaacccagaagatctaacaaccctggacctgtagagtggcagcaacagaccagaactcagcagtatagtccgagctggggcacctgctcgccagtgttactgtctccatcagcctgaccccagtgagcatttgatttggtctaccctactcttgccttctacagaactaaaactaacttcctgcaactttcatccattgctgccagctctgcagcataatggaagctcattccctcttctgcatgagacggcttcaacttctcaaggacaggaatcttgctctctctccagatgttctctgctccagttaaatatccctagttccttcacctattccctgtgtgacaggggttctggactcatcattctgatctcttcttctggatacacacttagtggccatcaatatcttgcttaaatttggtacccagagtgaaatgcagtatgttaggggtattttgactatggctgtgacacttctactgataaaacctgaagtaccactaatttttctgttatcatataataacaacatgaatactacttggttcatattgaacctgaggacaactaaaatcccgtcttttttatatgaaatgatataaggccaggtttcttcagcccaaacttatacaacttatttaatttaaatgagtatgttacatttctaatctgtttaatttcatctcgatggggtcattctgggactgttttcagttgccactgtcatctattatattagcaatattgggttgctccatcctcaaatcagatgtttctgatgccttcatccaaatcactgattttaaaagtaaagttgaataagacagggccctatgaaatatcaatagagaccaaaatcacattaattcagcagtcaacaatttgtttatctgggtagatgtccatgcactacaccatcaaggccatatttttcttattacaaagctgttaggaaaccctctcaggaaccaatttatactgtcgattccattcctctctctgaccttgtaatgttaacagccttatcaaaagaggaactagctgggcgtggtggcccatgcctgtaatctcagcactttgggaagccgagatgggcggattacctgaggtcaggagttcaagaccagcccggccaatgtggtgaaaccccttctctactaaaaatacaaaattagccaggcatggtgacttgtgcctgtagtcccagctactcgggaggctgaggcatgagaatcgcttgaacctgggaagtggaggttgcagagtgagctgagatcacgccattgtactccagcctgggcaacaagagtgaaactctgtctcaaaaaaaaaaaaaaaaatggaactatttggcgattacctccttttccaagtacttaaaaaccattttgctacatatacacattaagcttgtcaaaatctgcaatttccccatttctgaaaatcaggatattagaagacattagcttttttttttttgctgaagaccagctggctactttgggtatgtcaatcctatcctttcaatcttcacctaatggaagtgaagttaagatcataaagaaattctatttaggcagaattaaggactcaggagaacatccacgtagaaatcatccacgtagaaccaagagcttgccaacactgaaaaacctgacacaaagcctgttaagcagcaaatggcagacatttctttctctacattaaaactgattttcaacatgaaaagcagatttaaaagggaacatttagggtaaccacacttaatgcattcttgatccagtgactatctcaaaacaggaaaagatttttaagtaagttgaccatttggaaaccacttggtatgtcaaggtcatctcgtagaaaagcccaagttcttatgatctctgaagagctctcaaaagcagtcacagtcccaggaggctggtcctctaagaatcattttgggactcttcggagttcattcatcagccaaagagcaccagtgagcaaagccaaggagcctgactggtgagtggcggccagaggagttgggacatacatcagcagcgtgctgatgcccaagcccacctgtcacaaaggaaagaaggcaataggaaaggcagtaacccaaagttcacattgaaaatggccaggcgtggataaccacacacaaacctccacatcctcctatcagagcacttaaaatacacacatttttaatttcacaagcaaatatgcttacaatgaaagaaattcgaacaaaattgataaacctaaaattccccttattcttcaatccatcccagttccccagagtagtcactgttaccagtttctgcatacttgtactttagtatgtttatagagaaataaatatatagttttgtgcttttaaaaaacatattgttctgtcacttgctttttttcacttagcaatatacactatgtattgagatcttattaaactgctgtgcagtatcgcacagtatggatataccatagttttttttgttttgttttgttttgagacagagtttcactctgtctgccaggctggagtgcaatggcatgatcttggctcactgcaacctccacttccagggctcaagcaattctcctgcctcagcctcccaagtagctgggattacaggcgtgtgccaccccgcctggctaatttttgtattttttagtagagacagagtttcatcatgttggccaggctggtcttgaactcctgacctcaggtaatccgcccacctcggcctcccaaagtgctgggattacaggcgtgagccactgtgcccggcccatagttttttaactatttaggttgtttccaatttttcactatcacaattctatgatgaattttctcatacaaaaggtctttgttgcattggactgtttctaggactgacactaataagttcatttgctgggccaaagaattacccatttaacttttaaaagatattgccagcctgggtgacagagtgagactccatctctaaaaaaaaaaaaaaaagatattgccaaattgccttctggaaaaaactgtactgactcatgctctcaccaggaatatttgaaagtatccattttcctatgcccatggcaatacctgattatcttttttttcacttttttccaatttgataggcacaaaatggtacttattttttaaatttgctcctctctgattataagtgaagctgaacagcttttcatgtttactggccattaatcattgtttttgtggtaattgtgtattgatgtcctttacttattttccggttattaatcttttaatttattataaatatggaaaatattttctcctagtctgtcacctttccttttttttttttttttttttaaacagacagggtctcactctgttgtctaggctggggtgcagcggtgcgatcttgactcactgcagcctcaacctccctggctcaggtgatcctcccatctcagcctcccaagtagtttggactacaggcacacaccaacatgcccatctaatttttgtattttttttgtagagatggggttttgccatgttgcccaggctagtcttgaattcctggctcaagtgatctgcccacctaggcctcccaaagtgctgggattacagccatgagccactgtgcccggccccttttttaactttgtattggggatactgtcagaacaaaaagaagtggtttatacctgtgtatacgccaaagccagcagagtcactgctgccatcttggtccttctaggaaggggaattctccgagagaggaagtagagcactgtaatggcagtgactgaagtgattccctgcagggaagaaagagtctatcacattagatagaagtgccaggtttctaactcaccttacatgtatctcctctagaaccactcagcaaccatgaagtactttcctgtaccagtcacagagaacctccctgcagtcccagcctgatcactcctccacaggctgtctcttccaccatcctcttctgcttgccacttaaacgtcggtatcacccaggctccacctaagattctgtatgtactttatacaccctcactcccagtgatctcatccaccttccaatgtgggtgtccccctcatttttaattctttgcatccttatccctaaccatatctctaatcctatattcttaaagcagggctgaccccagcacatgagggttattattttcctgggctgtgagtggagaaagtgctggtgctgccagctggtgctaaaaaagacctaaagtctcattttcattcctatctcttcagaacaagggtccaggactggcaataatggtctccttcctcttccacggtatcagggagaatgttttctatcatatttctacatttatttcacttcatttccttttcagtgctgtccacaatgacaatttcaaccaggctttacttatgctaaaatactgtgcgcaggtggggactcagcccacaccaggtaacatgcctcagcccagcccccgttggacagctgagccctctggccccctctctctggacgtgctgctctcatctcacactcaacatacctccatctgatgacatcctcccacctctagctccacactcattctgagggtcccatccctgtaggtcatgtttcaagcatgctgtagaagaaactttgggatttcacttgatctttcttcacctttattcctgacagccaatcttattaactcttttcctttatttatttatttatcgtagagatgaggtctccctgtgttgcccaggctggtcttgaactcttgggctcaagcgatcctcttgccttagcctcccaaagtgctgggattacaggcatgagccattgcgcccagtgctcttatttttaaattaaatttaattttttaagagacaggctctcactctgtctcccaggctagaatgcagtaacgtgatcacagcttactgcagcctcaaactcctgctcaaacaatcctctcgcctcagcctcccaaagtgctaggattataggtgtgagccaccatgcccagcctctctattcctttaaattctctctcaaatgcatcattcttctcaagtcccactcccaccatgtaggccccatctccatcactctccctggcattacgcagcagcactatgcttctcacagtctccttactgctcatctttccccgctccaattcatcacacacaggcctccaagccaatctttgaatggcccatagcagaccctcaaaacatattcgcttaaatagaatgaaaagtactggtgaagctcctggctccttgagcttctggtttagctccgagagctacgtgcttagcagctatggtctccgcattcgcttctctactcaaccacatttctgctgaaatgactttctaggtacgtgcagaattgagggaggttatcacttgccaagtggtaaaaggcacatttgaacttttaagaagctggcaacgtcctgaaagctagaatttggctggggttggggtagggggacaggggtgaataatgaggacaaagacattagattagagaaatggtcctaaaatttcttccaaagagagcaggaaatatagttcctgctctaccctctcagtgttgccatcagtgcttcactgacaccccaaagcctatgataggctcctgtgctctctggcaggtaaccaccaactacacttaccagaatccggtgatcaaactgcaccatggtgggattctcaaaaacattcctcaggatgggggagaaggtaaagaggtcctccgggatccaggattctcccattttgggaaaggagttataaacaagcccagcatctagccctgccacaaaagcccctgtattccaaggtaaatggtatttattaaaatgagaggaagaagagaccaaatactagttctgatatagaaaaagtctgttatcccagagttaaactaagggaacagtcagagaataatagacatatctgcaacaggagttctccaacagagaagatacatcacaatcaccaaggaaacttcaaatctctgcatccttacctgctcccaccccaagattctgcttcctctagagaagtggagtagaggctgtggtgtggggggagggggagaggcttattagcttagaaaaattcccttagtgattttgatgccctcctcaccccgccactgagtgctactgatttattttagaaatgctctcccacagatgtctgcatgactgactcccttatttcctcagcttccactcagatgtcaccttaccaaagagatttcgcttgatgatcctagcccactttctgtctcctgaccctaatttatttttcttcatggcactaaatatcatctagcacattatgtttctattgtgcgttatctgtcttccccaaatgctcaataaatgtttgttgactgaatacggaagtgagaaaaatcccaaaacttataaactaaatcctggataaacaaataaagagggtattcatgaattaatggatgtctgatccattatttattatcaaagaaaatccagaaatgtttgggtcacactcgcttttttctttctttttttttttgagacgcagtctggctctgtcccccaggctggagtgcagtggcatgatctcggctcactgcaacctctgcctccagggttcatgcaattcttctgcctcagcctcccgagtagctgggactataggtgcgccctttggtagagacgaggtttcaccacgttgaccaggctggtctcgaactcccaacctcaggtgatccgcctgcctcggcctcccaaagtgctgggattacaggcataagccaccatgcctggcctttttttctttttttgagtcagggtcttgctctgtcacccaggctggagtgcagcagcgcaatctccgctcactgcagcctcgacctcctgggctcaagcaatcctcccgcctcagccccctgagtagctgagactacaggtgaataccaccacacatggctaatttttgtattttttgtagagacgaggtttcaccatgttgcccaggctggtcttgaactccctggctcaagcaatctacctgcctcagcatcccaaagtgctggaattacaggtgtgagccaccatgcccaacccactccatattttttttaaatgtcccttatgaagtaaaaattcatgctcttatgccaaaaataaaagtgttgagtggctcattggtttgaatcaatattatttttagtccagagcagtactatcaatagaactttctgtgagagtggaagtattctatatttgtgccaaccaatatactagcccctagccacatgtgcctgtggagcatctgaaatgttgctagtgtgactgaagaactaaattttaaattttatttaaccttaattaatttaagtttaaatatccacatgaggctacaggctcctctactggatagtgcagttctagaatgagagcagcagtggtggaagtgtgggttaaagaatgaaaacggccaggcatggtagctcatgcctgtaatcccagcactttgggaggctaaggcgggtggatcacctgaggtcagaagttcgaggccagcctggccaacatggtgaaaccccatctctactaaaaatacaaaaatcagctgggcgtggtggtgtgcacctgtagtcttagctactcgggaggctgaggcacgagaatcgcttggatttagggaggcagaggttgcagtgagctgagatcatgccactgcactccagcctgggcaacagagtgagactcagtctcaaaaaaaagaatgaaaaaatcctgtgttggtctctctgtgccaatgaactctccacctgcaaccatctctgagggcaagccttttctctgacccatgttgatgtaatgtgatgataacaatgtttatatatagtaacagctaacacttatgtagcctttgctacatgccaacaacgatgctacacatttcacatttagcagtcatactgttgtcgtaatctccattttatagataaggtctctaaggcccagagaggttacagagcttgcaaaggtcatatagttcacaggtagtgaagccaggatttgaacctaggccatctggatctaggtagatgttcaatatttttgttcaattgacagtaaagtagaatttttggaagagagaaaggaacaggaaacagggtgaagatgggggaatgagagaaacagatgtgaaaaggaaatataaagatgcaggaggaaggggcaaagcattaggcaagaggtcccagcttagagtgcaatgcaaacaggtcatctttgatgagctgagtcctacctgagagggccgtaaggaacaccagacctgctgttccatgagcaaatcgtctcaactgtaggagttggtgggtttcaggcaactaaatatgaaaaaaaatcattcagttaaactgtgttgcaggaacaatgagaggcagcaaagatctctaaggccaaacccaagtgacaaattaagatcagatcttctctgacccctagactaggttaagtactcctggcagatattctgttccaacatgtactgtattttattataattatagattactatctgttttcccttctaccccataagttttgtgaaggcaggaactgccatcttttttactagagcaatcttagcctagtgattggcacataggtactcattacgcatctgttcaaaaactgaatgatttccattattcaggaaacaatgcttcatcacggttgaaaggatgtagcttaagatcaggactggattttcatgtgtgtgatattagtgtttagcaaatatagtcagaatcaaaattgcataaagtgcttagagattcctccatttagtgtttttgataaaatcaaaatttgtttttattcttattaccaacttctaatactaataagtgaatcatcaaatatgaataagaactttataaacaggtgactatgccaccctcaaatggcttacactctactatatgaaaagttaggtatcattactaacatattataggacagtatatcagcactgtccaatagaactttctgtgatggaaaagttctatcatctacctaaggagagcttgaaacatgtggctagtatgactgaaaattaaataaaaaattaattttatttaaatataaagtttaaataaacaaaaagcttatgtaaataaattttatttaattaaaaaaattttttttctcactttgtcgcccagactggagtgcagtggcacaatcttggctcactgcaacctccacctcccaggctcaagcgattctcctgcctcagcctcccaagtagctgggattacaggtgcgcgccactattgcccagctaattttttaacttttagtagagatgggggtttcactatgttggccaggctggtctcaaactcctgacctcaaatgatccacccgcctcagcctcccaaagtgctgggattacaggtgtgagccaccgtgcccagccttaattagttaaaatttaaatagccatatgtagctagtagctactgtgttggacagcatagcactatatggctcattgggtagcatctcaaatcctttttgtaattaggtgaatctaaactaacagagaaaaacaattgataaagtcatcagtaacctttaagagtacaatttcagtagcaagagtgtgtgggtttatgtgtaagtgtgggtaaatgtgtgagtgtgtatgtattgggttgggtgaggaagataattacagggactgaaaagaaggaatagattgtcaggaagcagcagctatagatgcaggcaaaatgaattcattaagatgaattcattttagaagtctgaattaaaatgaattcattttagaagtttggctttgatgggcacggtggctcacacctgtaatcccagaactttgggaggccgaggcgggtggatcacctgaggtcaggagtttaagagcagcctggccaacatggtgaaaccctgtctctactaaaaatacagaaaattagccgagcatggtggtgtgcgcctgtagtcccagctactcgggaggctgaggctgaagaattgcttgaacccgggaggtggaggttgcagtgagccaaggtcacaccactgcactccagcctgggcaacagagcaagactccatctcaaataaataaataaatacataagtaaataaatgaagtttggctttgaaagtcaggagactttcaaataattccttatttttcagatgtggaattattcagtggttgtctactgtatcaatatttcaacccaatttggcttctctgtgggaatgactgccaagacaacacgtccagtccttactgggatctagctactagctccaagtacctaatggatgattcgacttaagagtcctgctgtcatctcaaacttttctccaggaacagcttactcaggtcaacccatgatttcaatacctaatataagactctttttttttttttggagatggaatttcgctcttgttgcccaggctagactgcaatggtgccatctcagctcactgcaacctctgcctcccggattcaagcaattctcctgcctcagcctctcgagtagctgggattacaggcatgtgccaccatggctggctaattttatatttttagtagagatggggtttctccaggttggtcaggctggtctcaaactcccaacctcaggtgatctgcctgcctctgcctcccaaagtgctgggattacaggcgtgagccaccgcgcctggccaagactcatttaaaaaaaaattctagggaaaaaaatgtcctataagggtgtggtgtcttggaacctctattattaatgaaggcctcaaaaaaatgttataccttgcttttaaatcaaagcataaaatgaaaaactagtactttgctttaatcagcagacagaaaaatacttcagacaaaatcactaaggtttactattagacttaactggcaggtccccatttaacgaacaatatagctcttgtccacaccagaagttcagaaacacctctgttctgatctttctcactttgccatccaccatcccttctaggagtcagaggtaaagcgactgggatatttcttgttgttggtactccctcccactctatttttcaatttgtttcacctttgccaatagaaaatgttggcaaaatattcaactcctatatgatccagcaattctacttctagatatatatccaaaagaaccaaaagcggggtcttgaacacagatatttgcacacaactcttaccttgtgcggagggagtagcagtgacagtgaggtccacaagctggcacaataaagaaccagggctgatcccaggtgggcagcaaggcggtactgactgacccgagggatgtcatgggagtctgatttttcttctagtccacttttcaccatataccatcccaacagaccctagaacccccaagagatgaagcaaacaaaacaaggttaaaatgatctgttcaactttcttttttttgttgtttttttgagacagagtctcactctgtcaccaggctggagtgcagtggcgggatcttggctcactgcaatctccgcctcccaggttcaagtgattctcctgcctcagcctcccaagtggctgggactacagttgcgcatcaccacgcctggctaatttttgtatttttagtagagatggggtttcaccatgttggccagatggtgtcaatctcttgacctcgtgatccgcccacctcagcctaccaaagtgctggtattacaggcgtaagccaccacacccggcctgatctgttcaactttactgaggaaatgagctatcaggagtactctctaccccacccctcctctttccataccctccccaatacgcagtgtcccaagattcatgatttatccacagttcttcacatatcaccattaatacttaactactatttagatcagaagtgtctgatcttttggcttccctgggccacactggaagaattgtcttgggccatgcataaaatacactaacactaacagtagctgatgagctttaaaaaaaaaaaaaggtccatggatatatctcataaaactagattgaatgttttggagaaacttaataaaggtaaatgcttaaaaacatctactgtcaagttaggttggaataagacaattataaaagtttcaggggaaaatcataaaaatcaataaggttttgcatgcagatcgctttgcaaatatctaagttcccactccgctttaagcaaaaccacagtttatggggatataagaaacctgcagttgaatgccaatctggggacgcatagtcaaagaaaaggccttgattttgtaaaagttggtaatgaacgtacagatttaagtttaaaagtttatgttatgtatcatattctatgattctctgctttaactggctttttcaattaaccaaacaattgttagttccaatcatatgaaataagacagccctttcactcccacttgccagtagaatcaggtcaaagaggtggactctgccacttctaaatatatactcttcaggaaatctttttgggcatttctctcccctttcaagattaccctggatattctaattaccttgatttcatctgcaagagacattgaaagatgaagacgtacacagttgattcactagcccactttcttctcccataccttatctgacatctttaatttctgcctccctaatagtgttttcagtgttggcttgtttttctaattctaaaatgttaactttcattttgttctacatgcctttctctggttactattagactttgattattgtttctgctgcctctatttcttctctctcatctccctccttaatcccttctttctttatttattttttttgagccagagtcttgctctgttgcccaggctggagtgcagtggtgcaacctctcagctcgctgcaacctccgcctccccggttcaatcaattcttctgcctcagcctccgaaatagctgggactacaggcccacgccagcatgcccagctaattttggtattttaggtagagacagggttttaccatgttggccaggctggtctggaactcctgatcccccaccttggcttccgaaagtgttgggattacaggtgtgagccactgcacccggccttaatcccttctaactgactcattttcttaccacttctgagttaaattaaccaattagcttcctcctgattaaattttgatgtttctttgatgccctgataatctcctttaggatctctaaaccttgacccaaatactcctatgtgtcttctcttttaatttgttgctcagtttcacccaactttttttttttcatcattctagcagtactaacctgttaactgtgggagtctttccttaagaggcgctcaacttacgtgattttaattgccatttatatctgaatatctctcagctacatgggtattctacaatccttcatcccacaaagtgtttctctcttttggaattttcctgtatgcttctgtggcattctagcacagggatccctctttcctatagcagacaagttagaaaaagaggagagacaagaacctagggagacacccatgatgggaaacaaactacatcttgcagcacatgaaaatatactactgagtgctttactgattccaggcactaagctaagtactttaaatatggattatctcatttaatatttacacgactgtacatggtggcactgttattatccccatttacaggtaaagaaatcatagctttcagaggttaggtaatttaccctaagtgtcagagctggggcttgaagctaggcctgtgacactaaaatgcatgctcttacctattctattaaagtgcctcagagattatttccttaaaaagaatgccaactaggggccgggcgcagtggctcacacctgtaatcccagcactttgggaggccaaggcaggcagatcacgaggtcaggagatcgagaccatcctggctaacatggtgaaaccccgtctctactaaaaatacaaaaaattagccaggcatagtggcaggtgcctgcagtcccagctaccgagaggctgaggcaggagaatggtatgaacctgggaggcggagcttgcagtgagccgagatcacgcgccactgcactccagcctgggcgacacagcgagactccgtctcaaaaaaaaaaaaaaaaaaacaatgccaactaggaagctcctgggagcatttctggtttctcaaccttgaataaatcttacctggaagcagacgaggccacagagggcaagaacacgtcctttcatgccacggctgagccagccctttctccaaaagtaggcagcaggcaggatgtacacaaggcctacaaggcgaccccacattcggtgtgagtactccatgtaccagatgaacttgaattctgtcagtgtcatatcatgattcaagctgggtgaaatggaaagtcaaaaaaggaggaggaggaaacatccttctgatttttattttcttacggaatgcaaaacctttctttctcagtcctgcaacttggtaggtctgccctcttcctcatcaacgacctcaggatgactttggatttgggggcttagaagacaagctgactaaacataactgaaccgaagttcatgaaataatctaaccattctgaagggtttaagtccaaaagatcaaatgggcctactgggatgtttacctaattttctctaatacttacattttaaattctggaaattgctggtatctttggaattctgcttcccattcctcttggcttgtaggtggcttcatctcctttattaaatgccaatctaccatcgagaggccagactctgtcaaccttaggataggaaagaaattttggggtgtatgcgtgaggctggattactcacaaaaggtttatagcaacaagtggatctgaacttaaccttgttaaaggtaaacacattgtttccttgtttcctcttttgagacatttctctgttactgcttggaattttgtcagaaacagctgccatcaggtacaaatttatttacccttatattctctcaatccttttattcaactctccccaattcttttttttttcccaattcttcctttcactagcattcctcaacaggtaaaatcaacccctacagccaaagaaatgtgttctaaatgcataaccaacattccttacccagggaaaagagacctgttacatgtatacaggtttagattcttgggtgaatttaaagacaataaaattcaaatttgtttcacttgctcataacaacctatataacacataaggtattttgaaataagggacgtggaatgtgaagagaatttgaggaagacacatttgattaaaactagaaacttttttaccaaaaggaattaggattcctagagtaaaagcctgattttaggcctgaggcaagaaatgcacaagatgagctcggaacatcttgtcatactagaaagtaaggaaactatcaaaggtaattagggccctgccaaaaagtcactagagccaatttcaggagatgcccactgactaaagatgggacaatctgagcaaatcactaacaccatcatcacaacggaccgaaacattatcgagtgtgtttgaacctatgatctcataatgagccttaaaaattcaaatcctttatttgttgcctttggaggatttgggggaccaatttattattttgaaaattggtaaataaagggaaagaagaatcaagtatgtatcctgcctttcctatacaaactataccttgggatatccaaactgatgatgagggaaagctttttagagttgagctaataaaatattataattttgctacgctaatgaaataatggatctaggcaatggtaattaatggctgttaacatctataatagacaccagatattcacgaatgttctattcacctactgaagtattttgctccctcatccctaatttgaatctgatcaaccaactactcattcacaggaaatagacgggacaaaggaacatgttaaatatcacacagttatgcagtcagcaaaatctaaactgtgcataaccataggacaaatgactagagtttcctcagcaactagaagagggggaaagggaggagtgtctaaatctatagtctcttgatagatttaaacaaacctaagaaacatgaaccaattgtgatgtacagaacttctttgggtttaattcaaacaaactgtaaaaaaagttttgagacaaacttggactctgattgaaagagaaaagatacataaacaatgcacaggtaccagttaagacataaaccagtctttatagaaggctcctactaataaaacactcaactgttctatggcagggcaagccatcagacatgttccttctttaaggcctcggtttctccatctatacaatgagggagctagactagatgctctgtaaaattcctttctccagctgggcatggtggctcatgcctgtaatcctggcactttgggaggccgaggtgggcagatcacctgaggtgaggagtttggatcagcctggccaacatggtgaaaccctgtctctactaaaaatacaaaaaattagccagatatggtggcacgcgcctagtcccagctacttgggaggctgaggcaggagaatcgcttgaactcaggagacggaggttgcagtcagccgagatcacaccactgcactccagcctggccaacagagcaagactctgtctcaaaaaaaaaaaaaaaaaaaatcctttctcctcagtcaacctgtgcttctactgatgatccaaatacctgactcactacgagcaaattacttacctagttactccaccaagaataactgctccagccactgttccactgcagaccaggagccatcggcccaccacccgctcagcagcctttgagggaagggacactgtaccccttccagattgcaaagctacttcagagatggtgctgtattgccctggcctcaaagggcgcctgatgcaatcacactaaagatcaagatagacaaattacaactggagaaacagggaatggctgctacccacactcaaccccattctgattagcgcgaagtaccatagcatccccacagccatgtcttgttaagtcatcatctcttatctggattactgcatcagccttccaactggttttccaattggttttcaaatctagcctcactcaaacctatccccaactacatgaatcttctcatctctgaatacttccctcagacttcactctacttacagatatggaatattttctttcacctctaggtctttcaacatttctctctggcttgtacacttcctttcccctgattaataatacctactgcagatctccgcttacatgtcacctcctctgggatgtattcccaggctcttcaaggtctgcaataggtcactcccacagcacactggaaagcccttaatacactgtaatgtacagtcaagcatcacttaacaacaggggcacatgttctgtgaaatgcattcttaagcaatttcatcattgtgtgaacctcatagaatgtacttacacaaatctaaaggctgggtgtagtgattcacacctgtaatcccagcactttgggaggcagaggcagggagatcacttgggtcaggaattcaagaccagcctggccaaaatggtgaaaccccatctttaccaaaaatacaaaaattagctgggcatggtggtgtatgcttgtaatcccagctatttgagaggctgaggtggcaggatcacttgaacctgggaggcagaggttgcagtgagccaaggtctcaccactgcactccagcctaggcgatgaagtgagactccatctctcaaaaaaaaaagtacttacagaaatctagatggtatcgcctactacacccctgagctatatggtatgacttattgctcttaggctataaatctgtatggcatattatgtaccgaatactgtaacacaatggtatttgtttatctaaacatagaaaaattacagtaaaaatatggtataaaagatttaaaaatggggccaggtgcaacggctcaagcctataatcccaaggctttgggaggccaaggtgagaggatcacttgaggccagtagttcgagaccagcctgggcaatgtagcgagaccccctatctctattttttcaaaaattaggcacagtggcacacacttgtagtcttagctacttaagtgactgaggtaagaggatgcttgaggccaggatttccaagctggaggctgcagtgagttataatcatgccacagcactccagcctgggtgacaaagtaaaacgctgtctctaaaaaagaaatttagagaaaaagatttttttttaaaaaaaaggtacacttggaaaggcagctccattataatcttatgggaccatgactgtatctgtggcctgttgttgaccaaaatgttgttatgcagcacatcactctaccttcaggttcatctgtttgtatctcccactaaactatgagctttggggtggcagtgtccggtcagtcttgctctctcccttctgctagctttgtttctaacactgttcctttatataatgagaccatgataaggatttcgcaaatgaataaactgacttcctccagggcaggagtcttgtaatatttatctttctttttccagttcctaatatataataaccactcaataattactagttaagcaaatgcatgccctcttcttactatatccctgtgagtccaaagatccatgctcggtttcctatttctgattaactgagtcacctttagaaaagtaactttaagcctcaatttccttctctgtaggatgcagtaatacttcctcatctgactacttggaactttttaagcaaaaataaactatatgggtaaaaattactcagcttttaccatgtgctaaaggcctgatgtatattaaagaatgtaatcctcataacaaaccttaaagtaggtattgttatccccattttacagataaggaaactgaagaacagaaagtttaattaacttggccaataccacacagcaggtcaatgttccagatctgaacctaggggctctgatctgaacctatgcgttgtgagtgcactgtaaggagctccggaaacgtgatgtggggctctacattatctttatcccggccctttcactccatccccgctcccgcgactcggagtccgctgcagtgcggtacctgtgctctaggcgctgccctaggagccaggagcggcagatactgcctccccttcaaggccctcaacggcggaaagagcaatcgctgcatactgatgacagggaacagccacctcttccacaacccagggctctgtggtctccctcctccgcc

SEQ ID NO: 10167 - DNA, 445 bp, Homo sapiens
attttacacaaacaacacactgataatagaactgttgttcctatcttaggagagtaactgaagcataaagagcttccccttggccaggaagcctctgaataacatgcacagattgtgtactaatgaatgtttatatgaagagtcttgcctttatttattatttatttatttttgagacagagtctcactctgtcatccaggttggagtgcagtggcacaatcttggctcactgcaacctccacctcccgggttcaagtgattctcctgcctcaacctcctgagtagctgggattacaggtgtgtgccaccatgccctactaattttttatatttttagtagagatggggtttcgccatgttggccaggctgatctggaactcctggcctcatgatctacctggctcagcctcccaaagcgctgggattacaggcttgaaccacca

SEQ ID NO: 10168 - DNA, 6850 bp, Homo sapiens
tgcctcagcctcccaaagtgctgggattctgtaatcccactgtaatcccagtggctgagccactgcgcccagcctgcttttgacttttacgacatcgacccttctatgatacatcactgaaactaatacaaatggtggaagaattggtatctcatagaaacatttttagagaaatgaaaaagcagaaaagtcaagacaaattatagtgtatttctgtaaagttacacagaatgtgctagcctctcctgcctccccctccacttcttctgcctctgccactcctgagacagcaagaccaaccctacccttctgcctactcaacagtgaagataatggggatgaaggcctgtatggtgatccagttaatgaatagtaaatatactttctcttccttaggattttcttaatatttttttctaactttacttttagaatattgcttacaatacataaaacaaaaatgcttccagtcaacagcaggctattacattttagggcaaaatttattatagttctcagttacataagtgggagctgaatgatcagaacccatggacacatagtggggaacaacatacactggagcctgtttggtgggggagttggtcaacggggagggagagcatcaggaagagtacctaatggatgctggggttaatacctaggtgatgggttgatctgtgcagcaaaccaccatgacacacatttacctatataacaaacctgcgcatgtacgccagaacttaaaagttgaaggaaaaaaaaatttcattatggcagagttttgactacatgggtggtcggtgcccctaacccctccattgttcaagggtcaagtgcatattaatataatcagaaaaataacagaacgagaattttttaaattattgcatattgaaagtgtactcataggcaattagtatgctaaatatatattacaagttacgagcaaaatagtggttacatcgattgatttttgaatagtggaccagccttgcattgatgtaataaactcccacttggatgtgatatataatactgctgcattcactttgctagctaacaatagaaactaagattagaaggaaagcatatgtttagcttagcatggtggttccaaatctggctaatcaaaatcaactggaggacttgaaaacacaaatttccaaaccctaactctgcagtgagtttggtgtgctgcctaggaacctgcattttaaatatgctttctaataatatttatggagccaagtaagcccagccatctatttataaagtggaatagtacattgagattgttggtttagtgtttaaaacaaaagcaaaatatctttgagaagtctatcaggtttttcttacacacgtgatagacatgtaatttagtgcttcctattattccaggatacagaaatgaacaatagtgtctaccacctggatgtacactgtttaataggtgaaatagatatgtaaaagcaattaaaatatgataaatgctatgagagagaagtaaaaagtgttataggtgatctgataatggactgattgattacctggcagttttaaggaagcctttaaaaataatatatttgaactgggttttaaagaatgatataaatgttgctaatacaccaaaaaaatgtcatctgcaaatatggtttgttcactaaatggagagaaggggaggatgataggacatgaggctaggaaatgtaggttgcagctcaatgatgtgtatgtagggccttattttccattctgaaacatagttagtggatttatatcaaaggatttcaaatagaagaacatcatgatgagaataattttaggatttatatactctactttagggggtggagagttctttttacctaggcttagggaatagaaagtggtgtagagaatataacttcaattacttctttcatcatttttcttcctttagtccacaagccctagccatgccgtggtagccaatgttcagcttgtcttgcatctaatgaagcaacacagtaaagctttgtgcaatgatcgagtcatcaacagtattcctttggcaaagcaagtatcttcacgaggtggtaaaagtaagaagttgtcagtaacacctccctcctccaacggtattaatgaggagttgtcagaagtcttacagactttacaggatgaatttgggcaaatgagcttgtgagtttttgtttttttttttaaattcagtttagctctaaaacctcattttttaaaaacttgttgactttattaaatcttactttcctttgttgagcaagtatggttgagcacaatccttataccaaccaagttactgggactttaacaaatacaactaataagggtaaaatctctctctttttaaatactgttaaatgttttgaagaccaaggtttatatttaagttttatttctttgagaacttatgatatacagtcatgcatcactgaatgacaaagatgtgctctgagaaatacatcattaggcgattttcttttccttgtgctaacataagagtgtgctaagcttatagcttattgctcctaggctacaaacctatacagcatgttactctactactaaatactatatgcagttgtaacacaatggtaagtatttgtgtatataaacatctaggtagagtaaaaatatgatactaaagtcttacgggaccactgttgtatatgtggtctgttgtttactacatcatcatctggcacctgacatcacattcattttagctaaacttaactgataagacatgagtgtttgaagagcaagattcatctgtagactttacatatacaatactcttttggggaaaataagaatataaagaattaaccttgaaattaagaactcttgcatttccctctagtgcctttcttgaacttttaaattcatatttttaattaaaaatttcttgatctaggctaggcatggtggctcacacctgtaatcccagcactttgggaggctgaagtgggcatatcacatcctggctaacagggtgaaaacctgtctgtactaaaaatacaaaaaattggccaggcatggtggcaggcgcctgtagtcccagctactcgggaggctgaggcaggagaatggcgtgaacccgggaggcagagcttgctgtgagccgagatcatgtcactgcactccagcctgggcgacagagcaagactccgtctcaaaaaaaaaaaaaaaatttattgctctgttcaaaaaatggagtcattttttaaacacatggagcagtaacccataatgaggtataatagacctaaccatgaaacacagaaaacttaaccatgttctacttctgctttgtatatagtgatcaccagcagcttgcaaaacttatccaggagtcgccaaccgttgaactgaaagacaagttggagtgtgaattggaggcattagtgggaaggatggaagcaaaagccaaccaaataactaaagttcgaaaataccaagcccaggtaactcagttttccttcactcaagtttctaatgattaagaaaaaaaaaacactttaattcaaatattaaatgatgacactaagtgtatcatagataaatatctacaggagatacttctttactgaagacatttgttcattgagaattggtaagtggattaagaaagaagacacttttagtcacttagcatattcatctaagaaacatctttcaaatactgaatatatttaatattctttatgaataagctttaacttctttgatgaatttaaattggagtttatccaagtaagtttttttaaaagcacctgcgaaattctgtttccaaaggaataagtcatacattaaatatgtgaaatatatttatgttgctaatcattttatatcagccaacaatgtagtactaccagatgcagtggtgacatcacactcaagggttttcaaccagagagaaacatgattcatatatttaagagattactgtagtgactaggggtagggtaatgggatcaaggcagagaggctgagagatcagctatagatgtatcagaggtggtcagcaagacagtagttgggtttgggcagaggtaaacagatttgaggtatgttttggaagtaaaaaaaatattggggttacttgctgctgggtatcatgtagaaggagagggagttaggatggtgattccactgactaaaatggagaaagctgagaagttcagagagcagaacagttttgttgactgttgattggtagccatatgatagacacacagtgccaagtgctctgagtatatcttctcatttaattttcacaaaaggcttctgaggtgggtatattctcatattatagatgaggtagatgctaagccacattttctgggaagtatgcatatatcctcagtgaaattaaataacttgcccaagtaccagcttactgggaaatggcagagctgggatgaaactagccttttcaactctaaaactttggctgttttttcaaagttcatgtatgaaaaagaaatacaagcaaattattcctgtaggagtaaggagtaatggtctaatttgttgcttatactaattagacttattctattggaacaccaacatgccagcatcagtttggctaaagtaaaaataaagctcccgtatttaaaattattctaaaaataatggaacaaaaataaaattcttttcatagtattaatacattaccaattacatctgttcatccatctggaaattgcttctttgcctcctcagactagtttctagaatatctttctcctcttctcccatttgtgaaaatccttcccattcttcttttctctgtgtctgattttttgcctccttcatgagtctttccttcaactccccttgtttctcactcgccctgttctgtactttggcaatattgccttaatttaggacaaccagaatttgtttactcatgtctacttgtttgtgtattgttttatatatatataagcatatatttatttatattaatatttaagtgttaaatgactagtgcagtagattttgaagtctttaaaagaaagcctagaatgtattatttttcagttagcatgagagttaaccaaaaaaaggtactcttgtactttttgttgtcagaaaaaaaatattttcattaaattctccttttccttcctgccttggttatttggtatagctggagaaacagaagttagagaagcagaagaaggaattaaaagctaccaaaaagactcttgatgaagaaagaaacagcagcagccgttctggaatcacagggaccacaaataagaaagattttatgaaactgagacctggagaaaaaaggagaaaaaatcttcagttattgaaggacatgcaaagcatacagaattcattacaaagcagtagtttgtgttgggattactgactcataaccaggtcagaaattttattcagataatctgtacctcatcaatcagatgatgacaatttacttcccaggtctcatactcacttatgttggaattaattaatagcaggtgttaaaggacccaggcttcattacacaggcttttcatgtatgcaggatgactcaatgttaaagcatttaaatggaaaccaggggagttttaaagcccgagaaaccacacataatcttttgttgagatgagtttgctgtactgacgctgcactttgtaaacagattaccagttttttacttgtgggtgtgattttttaaaatagttctttatatataattaaaattaggtttaaattttcaaaatatgagactatgctataggcagtgcttgcttgaaaagtctcatttttaaatctccctggcatgaggtgcccacttcccctttccaaagcaaccattaaacatactttgtttctactattggtggagtttttctatatttaaaaatacatatatatttcagaggatttttattttgcttttgggcatttcagactttgatcagtgttaagtgcacttgtattgctttttaatctgttaattttttaaagacccaagcagtcattttgagttatatctataaaaattataaaaggatttttgaaagtataaacaaattgtcagtgaaataaatgagattttggaataaagtgagaatgggagaagggatatgttgtgagcatataccttcacagttcttaatacctgttttgtaatcatgatattcagtcaaggcattatggtttttaatcttgaaacttagagaaccctttgaatatttgcttttactggtgtacagtatgagtggaatataaactgtacacataattatcatgttgatataaatcataatttcaactagatcaagacatgttaaccttttataaatttaaagtcaataaagcacctttttaaaggaaacactgcaactttccttaacagcctgttaataaaggctttgtgacaagctctcaaaaaatgcatttctaaataggaggacatcaatgtattgatgaagagaaaaaactagtacttagttgccacactcatgcttacatagaaagagagcccaagaatattagatttcctcatgatacaagatactacagtaacaggctttaatttaggatccttaagattttggggtattatttgtgactctcctgaaattgtaaacttgtgcttctgtgtccagttttctaatgagtaggttcgtagcttgattgaattaataattgtgagcccatagacacaagggaagtgagaaacagtgctctggtgacatgataaatatatgtgtcaaccaccatttcagctattgaaaactcctgttatctccttgtttgaatttcaggtcattaaattgtataaccatcatttgaa

SEQ ID NO: 10169 - DNA, 6841 bp, Homo sapiens
tgcctcagcctcccaaagtgctgggattctgtaatcccactgtaatcccagtggctgagccactgcgcccagcctgcttttgacttttacgacatcgacccttctatgatacatcactgaaactaaaacaaatggtggaagaattggtatctcatagaaacatttttagagaaatgaaaaagcagaaaagtcaagacaaattatagtgtatttctgtaaagttacacagaatgtgctagcctctcctgcctccccctccacttcttctgcctctgccactcctgagacagcaagaccaaccctacccttctgcctactcaacagtgaagataatggggatgaaggcctgtatggtgatccagttaatgaatagtaaatatactttctcttccttaggattttcttaatatttttttctaactttacttttagaatattgcttacaatacataaaacaaaaatgcttccagtcaacagcaggctattacattttagggcaaaatttattatagttctcagttacataagtgggagctgaatgatcagaacccatggacacatagtggggaacaacatacactggagcctgtttggtgggggagttggtcaacggggagggagagcatcaggaagagtacctaatggatgctggggttaatacctaggtgatgggttgatctgtgcagcaaaccaccatgacacacatttacctatataacaaacctgcgcatgtacgccagaacttaaaagttgaaggaaaaaaaatttcattatggcagagttttgactacatgggtggtcggtgcccctaacccctccattgttcaagggtcaagtgcatattaatataatcagaaaaataacagaacgagaattttttaaattattgcatattgaaagtgtactcataggcaattagtatgctaaatatatattacaagttacgagcaaaatagtggttacatcgattgatttttgaatagtggaccagccttgcattgatgtaataaactcccacttggatgtgatatataatactgctgcattcactttgctagctaacaatagaaactaagattagaaggaaagcatatgtttagcttagcatggtggttccaaatctggctaatcaaaatcaactggaggacttgaaaacacaaatttccaaaccctaactctgcagtgagtttggtgtgctgcctaggaacctgcattttaaatatgctttctaataatatttatggagccaagtaagcccagccatctatttataaagtggaatagtacattgagattgttggtttagtgtttaaaacaaaagcaaaatatctttgagaagtctatcaggtttttcttacacacgtgatagacatgtaatttagtgcttcctattattccaggatacagaaatgaacaatagtgtctaccacctggatgtacactgtttaataggtgaaatagatatgtaaaagcaattaaaatatgataaatgctatgagagagatgtaaaaagtgttataggtgatctgataatggactgattgattacctggcagttttaaggaagcctttaaaaataatatatttgaactgggttttaaagaatgatataaatgttgctaatacaccaaaaaaatgtcatctgcaaatatggtttgttcacaaaatggagagaaggggaggatggtaggacatgaggctaggaaatgtaggttgcagctcaatgatgtgtatgtagggccttatacatagttagtggatttatatcaaaggatttcaaatagaagaacatcatgatgagaataattttaggatttatatactctactttagggggtggagagttctttttacctaggcttagggaatagaaagtggtgtagagaatataacttcaattacttctttcatcatttttcttcctttagtccacaagccctagccatgccgtggtagccaatgttcagcttgtcttgcatctaatgaagcaacacagtaaagctttgtgcaatgatcgagtcatcaacagtattcctttggcaaagcaagtatcttcacgaggtggtaaaagtaagaagttgtcagtaacacctccctcctccaacggtattaatgaggagttgtcagaagtcttacagactttacaggatgaatttgggcaaatgagcttgtgagtttttgtttttttttttaaattcagtttagctctaaaacctcattttttaaaaacttgttgactttattaaatcttactttcctttgttgagcaagtatggttgagcacaatccttataccaaccaagttactgggactttaacaaatacaactaataagggtaaaatctctctctttttaaatactgttaaatgttttgaagaccaaggtttatatttaagttttatttctttgagaacttatgatatacagtcatgcatcactgaatgacaaagatgtgctctgagaaatacatcattaggcgattttcttttccttgtgctaacataagagtgtgctaagcttatagcttattgctcctaggctacaaacctatacagcatgttactctactactaaatactatatgcagttgtaacacaatggtaagtatttgtgtatataaacatctaggtagagtaaaaatatgatactaaagtcttacgggaccactgttgtatatgtggtctgttgtttactacatcatcatctggcacctgacatcacattcattttagctaaacttaactgataagacatgagtgtttgaagagcaagattcatctgtagactttacatatacaatactcttttggggaaaataagaatataaagaattaaccttgaaattaagaactcttgcatttccctctagtgcctttcttgaacttttaaattcatatttttaattaaaaatttcttgatctaggctaggcatggtggctcacacctgtaatcccagcactttgggaggctgaagtgggcatatcacatcctggctaacagggtgaaaacctgtctgtactaaaaatacaaaaaattggccaggcatggtggcaggcgcctgtagtcccagctactcgggaggctgaggcaggagaatggcgtgaacccgggaggcagagcttgctgtgagccgagatcatgtcactgcactccagcctgggcgacagagcaagactccgtctcaaaaaaaaaaaaaaaaatttattgctctgttcaaaaaatggagtcattttttaaacacatggagcagtaacccataatgaggtataatagacctaaccatgaaacacagaaaacttaaccatgttctacttctgctttgtatatagtgatcaccagcagcttgcaaaacttatccaggagtcgccaaccgttgaactgaaagacaagttggagtgtgaattggaggcattagtgggaaggatggaagcaaaagccaaccaaataactaaagttcgaaaataccaagcccaggtaactcagttttccttcactcaagtttctaatgattaagaaaaaaaaaacactttaattcaaatattaaatgatgacactaagtgtatcatagataaatatctacaggagatacttctttactgaagacatttgttcattgagaatgggtaagtggattaagaaagaagacacttttagtcacttagcatattcatctaagaaacatctttcaaatactgaatatatttaatattctttatgaataagctttaacttctttgatgaatttaaattggagtttatccaagtaagtttttttaaaagcacctgcgaaattctgtttccaaaggaataagtcatacattaaatatgtgaaatatatttatgttgctaatcattttatatcagccaacaatgtagtactaccagatgcagtggtgacatcacactcaagggttttcaaccagagagaaacatgattcatatatttaagagattactgtagtgactaggggtagggtaatgggatcaaggcagagaggctgagagatcagctatagatgtatcagaggtggtcagcaagacagtagttgggtttgggcagaggtaaacagatttgaggtatgttttggaagtaaaaaaaatattggggttacttgctgctgggtatcatgtagaaggagagggagttaggatggtgattccactgactaaaatggagaaagctgagaagttcagagagcagaacagttttgttgactgttgattggtagccatatgatagacacacagtgccaagtgctctgagtatatcttctcatttaattttcacaaaaggcttctgaggtgggtatattctcatattatagatgaggtagatgctaagccacattttctgggaagtatgcatatatcctcagtgaaattaaataacttgcccaagtaccagcttactgggaaatggcagagctgggatgaaactagccttttcaactctaaaactttggctgttttttcaaagttcatgtatgaaaaagaaatacaagcaaattattcctgtaggagtaaggagtaatggtctaatttgttgcttatactaattagacttattctattggaacaccaacatgccagcatcagtttggctaaagtaaaaataaagctcccgtatttaaaattattctaaaaataatggaacaaaaataaaattcttttcatagtattaatacattaccaattacatctgttcatccatctggaaattgcttctttgcctcctcagactagtttctagaatatctttctcctcttctcccatttgtgaaaatccttcccattcttcttttctctgtgtctgattttttgcctccttcatgagtctttccttcaactccccttgtttctcactcgccctgttctgtactttggcaatattgccttaatttaggacaaccagaatttgtttactcatgtctacttgtttgtgtattgttttatatatatataagcatatatttatttatattaatatttaagtgttaaatgactagtgcagtagattttgaagtctttaaaagaaagcctagaatgtattatttgagtttcagttagcatgagagttaaccaaaaaaaggtactcttgtactttttgttgtcagaaaaaaaatattttcattaaattctccttttccttcctgccttggttatttggtatagctggagaaacagaagttagagaagcagaagaaggaattaaaagctaccaaaaagactcttgatgaagaaagaaacagcagcagccgttctggaatcacagggaccacaaataagaaagattttatgaaactgagacctggagaaaaaaggagaaaaaatcttcagttattgaaggacatgcaaagcatacagaattcattacaaagcagtagtttgtgttgggattactgactcataaccaggtcagaaattttattcagataatctgtacctcatcaatcagatgatgacaatttacttcccaggtctcatactcacttatgttggaattaattaatagcaggtgttaaaggacccaggcttcattacacaggcttttcatgtatgcaggatgactcaatgttaaagcatttaaatggaaaccaggggagttttaaagcccgagaaaccacacataatcttttgttgagatgagtttgctgtactgacgctgcactttgtaaacagattaccagttttttacttgtgggtgtgattttttaaaatagttctttatatataattaaaattaggtttaaattttcaaaatatgagactatgctataggcagtgcttgcttgaaaagtctcatttttaaatctccctggcatgaggtgcccacttcccctttccaaagcaaccattaaacatactttgtttctactattggtggagtttttctatatttaaaaatacatatatatttcagaggatttttattttgctttttggcatttcagactttgatcagtgttaagtgcacttgtattgctttttaatctgttaattttttaaagacccaagcagtcattttgagttatatctataaaaattataaaaggatttttgaaagtataaacaaattgtcagtgaaataaatgagattttggaataaagtgagaatgggagaagggatatgttgtgagcatataccttcacagttcttaatacctgttttgtaatcatgatattcagtcaaggcattatggtttttaatcttgaaacttagagaaccctttgaatatttgcttttactggtgtacagtatgagtggaatatgaactgtacacataattatcatgttgatataaatcataatttcaactagatcaagacatgttaaccttttataaatttaaagtcaataaagcacctttttaaaggaaacactgcaactttccttaacagcctgttaataaaggctttgtgacaagctctcaaaaaatgcatttctaaataggaggacatcaatgtattgatgaagagaaaaaactagtacttagttgccacactcatgcttacatagaaagagagcccaagaatattagatttcctcatgatacaagatactacagtaacaggctttaatttaggatccttaagattttggggtattatttgtgactctcctgaaattgtaaacttgtgcttctgtgtccagttttctaatgagtaggttcgtagcttgattgaattaataattgtgagcccatagacacaagggaagtgagaaacagtgctctggtgacatgataaatatatgtgtcaaccaccatttcagctattaaaaactcctgttatctccttgtttgaatttcaggtcattaaattgtataaccatcatttgaa

SEQ ID NO: 10170 - DNA, 6855 bp, Homo sapiens
tgcctcagcctcccaaagtgctgggattctgtaatcccactgtaatcccagtggctgagccactgcgcccagcctgcttttgacttttacgacatcgacccttctatgatacatcactgaaactaaaacaaatggtggaagaattggtatctcatagaaacatttttagagaaatgaaaaagcagaaaagtcaagacaaattatagtgtatttctgtaaagttacacagaatgtgctagcctctcctgcctccccctccacttcttctgcctctgccactcctgagacagcaagaccaaccctacccttctgcctactcaacagtgaagataatggggatgaaggcctgtatggtgatccagttaatgaatagtaaatatactttctcttccttaggattttcttaatatttttttctaactttacttttagaatattgcttacaatacataaaacaaaaatgcttccagtcaacagcaggctattacattttagggcaaaatttattacagttctcagttacataagtgggagctgaatgatcagaacccatggacacatagtggggaacaacatacactggagcctgtttggtgggggagttggtcaacggggagggagagcatcaggaagagtacctaatggatgctggggttaatacctaggtgatgggttgatctgtgcagcaaaccaccatgacacacatttacctatataacaaacctgcgcatgtacgccagaacttaaaagttgaaggaaaaaaaaatttcattatggcagagttttgactacatgggtggtcggtgcccctaacccctccatggttcaagggtcaagtgcatattaatataatcagaaaaatcacagaacgagaatgttttaaattattgcatattgaaagtgtactcataggcaattagtatgctaaatatatattacaagttacgagcaaaatagtggttacatcgatggattttagaatagtggaccagccttgcattgatgtaataaactcccacttggatgtgatatataatactgctgcattcactttgctagctaacaatagaaactaagattagaaggaaagcatatgtttagcttagcatggtggttccaaatctggctaatcaaaatcaactggaggacttgaaaacacaaatttccaaaccctaactctgcagtgagtttggtgtgctgcctaggaacctgcattttaaatatgctttctaataatatttatggagccaagtaagcccagccatctatttataaagtggaatagtacattgagattgttggtttagtgtttaaaacaaaagcaaaatatctttgagaagtctatcaggtttttcttacacacatgatagacatgtaatttagtgcttcctattattccaggatacagaaatgaacaatagtgtctaccacctggatgtacactgtttaataggtgaaatagatacgtaaaagcaattaaaatatgataaatgctatgagagagatgtaaaaagtgttataggtgatctgagaatggactgattgattacctggcagttttaaggaagcctttaaaaataatatatttgaactgggttttaaagaatgatataaatgttgctaatacaccaaaaaaatgtcatctgcaaatatggtttgttcacaaaatggagagaaggggaggatgataggacatgaggctaggaaatgtaggttgcagctcaatgatgtgtatgtagggccttattttccattctgaaacatagttagtggatttatatcaaaggatttcaaatagaagaacatcatgatgagaataattttaggatttatatactctactttggggggtggagagttctttttacctaggcttagggaatagaaagtggtgtagagaatataacttcaattacttctttcatcatttttcttcctttagtccacaagccctagccatgccgtggtagccaatgttcagcttgtcttgcatctaatgaagcaacacagtaaagctttgtgcaatgatcgagtcatcaacagtattcctttggcaaagcaagtatcttcacgaggtggtaaaagtaagaagttgtcagtaacacctccctcctccaacggtattaatgaggagttgtcagaagtcttacagactttacaggatgaatttgggcaaatgagcttgtgagtttttgtttttttttttaaattcagtttagctctaaaacctcattttttaaaaacttgttgactttattaatcttactttcctttgttgagcaagtatggttgagcacaatccttataccaaccaagttactgggactttaacaaatacaactaataagggtaaaatctctctctttttaaatactgttaaatgttttgaagaccaaggtttatatttaagttttatttctttgagaacttatgatatacagtcatgcatcactgaatgacaaagatgtgctctgagaaagacatcattaggcgattttcttttccttgtgctaacataagagtgtgctaagcttatagcttattgctcctaggctacaaacctatacagcatgttactctactactaaatactatatgcagttgtaacacaatggtaagtatttgtgtatataaacatatctaggtagagtaaaaatatgatactaaagtcttacaggaccactgttgtatatgtggtctgttgtttactacatcatcatctggcacctgacattacattcattttagctaaacttaactgataagacatgagtgtttgaagagcaagattcatctgtagactttacatatacaatactcttttggggaaaataagaatataaagaattaaccttgaaattaagaattcttgcatttccctctagtgcctttcttgaacttttaaattcatatttttaattaaaaatttcttgatctaggctaggcatggtggctcacacctgtaatcccagcactttgggaggctgaagtgggcatatcacatcctggctaacagggtgaaaacctgtctgtactaaaaatacaaaaaattggccaggcatggtggcaggcgcctgtagtcccagctactcgggaggctgaggcaggagaatggcgtgaacccgggaggcagagcttgctgtgagccgagatcatgtcactgcactccagcctgggcgacagagcaagactccgtctcaaaaaaaaaaaaaaaatttattgctctgttcaaaaaatggagtcattttttaaacacatggagcagtaacccataatgaggtataatagacctaaccatgaaacacagaaaacttaaccatattctacttctgctttgtatatagtgatcaccagcagcttgcaaaacttatccaggagtcgccaaccgttgaactgaaagacaagttggagtgtgaattggaggcattagtgggaaggatggaagcaaaagccaaccaaataactaaagttcgaaaataccaagcccaggtaactcagttttccttcactcaagtttctaatgattaagaaaaaaaaaaacactttaattcaaatattaaatgatgacactaagtgtatcatagataaatatctacaggagatacttctttactgaagacatttgttcattgagaattggtaagtggattaagaaagaagacacttttagtcacttagcatattcatctaagaaacatctttcaaatactgaatatatttaatattctttatgaataagctttaacttctttgatgaatttaaatcggagtttatccaagtaagtttttttaaaagcacctgcgaaattctgtttccaaaggaataagtcatacattaaatatgtgaaatatatttatgttggtaatcattttatatcagccaacaatgtagtactaccagatgcagtggtgacatcacactcaagggttttcaaccagagagaaacatgattcatatatttaagagattactgtagtgactaggggtagggtaatgggatcaaggcagagaggctgagagatcagctatagatgtatcagaggtggtcagcaagacagtagttgggtttgggcagaggtaaacagatttgaggtatgttttggaagtaaaaaaaatattggggttacttgctgctgggtatcatgtagaaggagagggagttaggatggtgattccactgactaaaatggagaaagctgagaagttcagagagcagaacaggtttgttgactgttgattggtagccatatgatagacacacagtgccaagtgctctgagtatatcttctcatttaattttcacaaaaggcttctgaggtgggtatattctcatattatagatgaggtagatgctaagccacattttctgggaagtatgcatatatcctcagtgaaattaaataacttgcccaagtaccagcttactgggaaatggcagagctgggatgaaactagccttttcaactctaaaacttcggctgttttttcaaagttcatgtatgaaaaagaaatacaagcaaattattcctgtaggagtaaggagtaatggtctaatttgttgcttatactaattagacttattctattggaacaccaacatgccagcatcagtttggctaaagtaaaaataaagctcccgtatttaaaattattctaaaaataatggaacaaaaataaaattcttttcatagtattaatacattaccaattacatctgttcatccatctggaaattgcttctttgcctcctcagactagtttctagaatgtctttctcctcttctcccatttgtgaaaatccttcccattcttcttttctctgtgtctgattttttgcctccttcatgagtctttccttcaactccccttgtttctcactcgccctgttctgtactttggcaatattgccttaatttaggacaaccagaatttgtttactcatgtctacttgtttgtgtattgttttatatatatataagcatatatttatttatattaatatttaagtgttaaatgactagtgcagtagattttgaagtctttaaaagaaagcctagaatgtattatttgagtttcagttagcatgagagttaaccaaaaaaaggtactcttgtactttttgttgtcagaaaaaaaatattttcattaaattctccttttccttcctgccttggttatttggtatagctggagaaacagaagttagagaagcagaagaaggaattaaaagctaccaaaaagactcttgatgaagaaggaaacagcagcagccgttctggaatcacagggaccacaaataagaaagattttatgaaactgagacctggagaaaaaaggagaaaaaatcttcagttattgaaggacatgcaaagcatacagaattcattacaaagcagtagtttgtgttgggattactgactcataaccaggtcagaaattttattcagataatctgtacctcatcaatcagatgatgacaatttacttcccaggtctcatactcacttatgttggaattaattaatagcaggtgttaaaggacccaggcttcattacacaggcttttcatgtatgcaggatgactcaatgttaaagcatttaaatggaaaccaggggagttttaaagcccgagaaaccacacataatcttttgttgagatgagtttgctgtactgacgctgcactttgtaaacagattaccagttttttacttgtgggtgtgattttttaaaatagttctttatatataattaaaattaggtttaaattttcaaaatatgagactatgctataggcagtgcttgcttgaaaagtctcatttttaaatctccctggcatgaggtgcccacttcccctttccaaagcaaccattaaacatactttgtttctactattggtggagtttttctatatttaaaaatacatatatatttcagaggatttttattttgctttttggcatttcagactttgatcagtgttaagtgcacttgtattgctttttaatctgttaattttttaaagacccaagcagtcattttgagttatatctataaaaattataaaaggatttttgaaagtataaacaaattgtcagtgaaataaatgagattttggaataaagtgagaatgggagaagggatatgttgtgagcatataccttcacagttcttaatacctgttttgtaatcatgatattcagtcaaggcattatggtttttaatcttgaaacttagagaaccctttgaatatttgcttttactggtgtacagtatgagtggaatatgaactgtacacataattatcatgttgatataaatcataatttcaactagatcaagacatgttaaccttttataaatttaaagtcaataaagcacctttttaaaggaaacactgcaactttccttaacagcctgttaataaaggctttgtgacaagctctcaaaaaatgcatttctaaataggaggacatcaatgtattgatgaagagaaaaaactagtacttagttgccacactcatgcttacatagaaagagagcccaagaatattagatttcctcatgatacaagatactacagtaacaggctttaatttaggatccttagattttggggtattatttgtgactctcctgaaattgtaaacttgtgcttctgtgtccagttttctaatgagtaggttcgtagcttgattgaattaataattgtgagcccatagacacaagggaagtgagaaacagtgctctggtgacatgataaatatatgtgtcaaccaccatttcaactattaaaaactcctgttatctccttgtttgaatttcaggtcattaaattgtataaccatcatttgaa

SEQ ID NO: 10171 - DNA, 1575 bp, Homo sapiens
acgttgtaacagagctttattgctattcatttcaaataaggttatgtttacagacttgtggtagacatgtgaattgttcattcctatataatgtgaattgcagtggtagtagcggtatacacagtgctatgggggcacagaggaaggtggggatgtcagagaaggcagtcgtgaatcagataacttcccaaaggaagagatgatgcctaaactctagaaaataggaattagtcacaagggagaacagttgttccaggtgcacaagacagactgaaccaaagtggggaggcaggaatctgcagattacatgaggcaattgtgaacagcagagtagcattggtacgtaaaagttgaggtatgcagagactaggtcgaaggaggctaaggagcttcaacttaatcatactggtctctaaattttgtaaccctaatcaaaaagggaaaaaattacacctgcacaaccaatagacatacaaagttatgaaacatgtaactgtcaattcaaatatttaaaagttttgcttgtgtaaatatataaaaagggctagtattcctcctccctccctcccacacacaccagtggtatatattaaatgcccaagtgcatgtactccatattggagacttctgcagaaggtgaggggaaccactggaaggttctcagcagagaagtggtagggttgcacttagatttccctggcttttgatttgaatttgaagtggatgcaagtatgttaagactagaagctttaaattcttgatctcttcagccattctacattcttttatgtggtatcaggccaagataaccaaggtttaaatgaggaaaatggcagatgcgtttgtgaaatacttggagtagaaagcttaatttttaattactgatttgctagccacttaaatgccctgttaaaaagcttatatttcacacaattaccaaagaaatcattttggtaccaattttgctaaattggatatactaatagaaacttcctcactgcaagaccaagagggaggctaaggttcagactctctgtatagtgaattagtgagtggaaaaacactgtatattttaattgtttgatttgggtgttggttaaggaaaaatgggtacaaactgaacattttcatctggggtgcatattcctccaataatttccaaatatttctggggaaaaaaaagaaatggcaactttggacaagaacaaagtttaaaagtcagttggaatttcttttaattaaaagaccaaggggacaagaagctcctttgttacagtacattacatatggctcttatgtagaataaaatagacatcagagtcaaatgtttctaccagcaccaaactcttacttgtagcaggtgaacagtgaagcaagatttcttttactggctttgagattgtaatacatcttttacatgcagtgtgttctttggtagacttaatcgttgagtgaaattacagaatttgcaaaggaaaaaaatgtaaaatttgagcacagtacttctcactataagctatttatacagaattcagaaaaaatgtcaatcctagtaagatttttaaatacttctta

SEQ ID NO: 10172 - DNA, 12281 bp, Homo sapiens
acgttgtaacagagctttattgcaattcatttcaaataaggttatgtttacagacttgtggtagacatgtgaattgttcattccaatataatgtgaattgcagtggtagtagcggtatacacagtgctatgggggcacagaggaaggtggggatgtcagagaaggcagtcgtgaatcagataacttcccaaaggaagagatgatgcctaaactctagaaaataggaattagtcacaagggagaacagttgttccaggtgcacaagacagactgaaccaaagtggggaggcaggaatctgcagattacatgaggcaattgtgaacagcagagtagcattggtacgtaaaagttgaggtatgcagagactaggtcgaaggaggctaaggagcttcaacttaatcatactggtctctaaattttgtaaccctaatcaaaaagggaaaaaattacacctgcacaaccaatagacatacaaagttatgaaacatgtaactgtcaattcaaatatttaaaagttttgcttgtgtaaatatataaaaagggctagtattcctcctccctccctcccacacacaccagtggtatatattaaatgcccaagtgcatgtactccatattggagacttctgcagaaggtgaggggaaccactggaaggttctcagcagagaagtggtagggttgcacttagatttccctggcttttgatttgaatttgaagtggatgcaagtatgttaagactagaagctttaaattcttgatctcttcagccattctacattcttttatgtggtatcaggccaagataaccaaggtttaaatgaggaaaatggcagatgcgtttgtgaaatacttggagtagaaagcttaatttttaattactgatttgctagccacttaaatgccctgttaaaaagcttatatttcacacaattaccaaagaaatcattttggtaccaattttgctaaattggatatactaatagaaacttcctcactgcaagaccaagagggaggctaaggttcagactctctgtatagtgaattagtgagtggaaaaacactgtatattttaattgtttgatttgggtgttggttaaggaaaaatgggtacaaactgaacattttcatctggggtgcatattcctccaataatttccaaatatttctggggaaaaaaaagaaatggcaactttggacaagaacaaagtttaaaagtcagttggaatttcttttaattaaaagaccaaggggacaagaagctcctttgttacagtacattacatatggctcttatgtagaataaaatagacatcagagtcaaatgtttctaccagcaccaaactcttacttgtagcaggtgaacagtgaagcaagatttcttttactggctttgagattgtaatacatcttttacatgcagtgtgttctttggtagacttaatcgttgagtgaaattacagaatttgcaaaggaaaaaaatgtaaaatttgagcacagtacttctcactataagctatttatacagaattcagaaaaaatgtcaatcctagtaagatttttaaatacttcttaaaaacttgctaattagcttctgtgtgttcagacacacaagacaagtgaaatacactgtagtaaataattagtttttaaaatatctttcatgatgtttctggtaattgggctaatctgaagggcatggaattctttgaactcctgtatggctactttctccccttcattttcccccaagcacatctataaggcctcccattttggatcaacttgctaatatgtcttaagtatgtaaataatgacggcaataattttcaactactaccacaccgtagtatcttcaacactttgccttttactatatgaagaatatggaagttgaaaagtgatcaaggtaaatcagttactgaaaaaaagaaaaacctagaatggagaaagggatatcaaatgattttgatctgtcatgacatcaaggcccaatatatgtgatgccacagaatttcagtgttggtttgaaaactgatgttcctctgcacagtgagcacagagtgtatttctaaaatggttttaatattaccagatgccaaaaatttgtaacagcatttgccttttaatagaaacttgttcccactgtgaatccaggattgaagtattttaatattctttggatacttaaaagattagtatcataatcatgtaattacatatggagttacttcacttaagccacctgcactgctacagttctaaactcatcctagagagatttaaaataaataaagtgactgaactttctctcatagatggggtctaaattccgaagactttctactcatagagctgccagtgtaatcaagagtgtatagcaatgatgcccctgatcttacagtcctttatacaacagtttggacaggagtgacacactgtgcaggagagctggctctctctgaggatgaggttgatcggttagaaatctctctctgtagttcctctacttttttctgaagctctgctcgtttagcaagaagttctttgtatctgttgtgaataggttcctgcaagagcaaaacataaaatattcaactaggcaatcctgaccaaagccaggtcaaatcattccctaaatgttgcagtgtatgttttttcagctgttggaaccaatggcacctttccaacccatcagtgaaattaaataccgggactgtggacaccactaatcttttcactggctttcccagtgcccctgagtatttccaaagaataacctgctgtgtaggtgctcctgaaactggtacttttccaaatacaacaaataattaacaagacaattaaaagacagtagtcagaagattccctgttatttataggtttttagtcttaaacagttctaagtagttaatattccataaacatattcacagtagaccagaattttgttcagcttttaactttcctaaagctactttcttcagcttattaaaacaagaccccctagaggttatccagacagaggagggaagatgcaagaaaagagagcagtgatttgtccaatgtcatacaagcagtcctaagaaccaggtatactgattaccctgccccagtgtagtatttttctactatacaattgttaactatcaatgggtaaggagtaaagttttaaatatgcacagataatctttccagctgcttttaaggagacaaagttgcactgcatgaatgaaaactcccattgtatattgtaaggcacatacctgtggtttcatccgtggattccaccttatgtaatatcccacccagagctctaggtggcgcatgctggctactggataaaggacatgattggaatagctcccatagagaggattagtgaagtcttccagctggctgcttatgtaagaccacagtgacacagtccttttaggaagattctgtaggcaggaaaaataggtaaagattctccaccacataagccatttacactttagatgaaatttgtgaagaagtactttgttgtcattaaaatctctttagaggaagtggacttggagacttcagtgataaaccaacttatattaagatcagagggtactggaaaacagtatgcagttcctcaaagagataccatatgacccaacaattccactcttgtacatatccagcaaacagaagacatgtctgtacaaaaacttttttatagatgttcaaagcagcattattcattaacagccaagaagtgggaacaacctaaaagtccatcaactgacgaatggataagtaaaatatatccacacaatggaatattattcagccataaaaagaaatgatataaaatgtatgaaccttgaaagcatattaaaggaaaggagctagacacaaggtttacatattaaatgattccatttatatgaaatgtccagaagaggcaaatctagagacaaaaacattagtgtttggcaggggtgaatggggagtgactattaacaggttttctgaggtgatgaaatgttctgaaatgaaaatgtgatggctgtacaactcagatatactaaaaaccagtcaactatacactatcaaagtgaatttcatggtatgcatattattatcaatttaaaaagtttttttaaaaataatcaatgattcctaccccaaggctctcaaaaaataaaactcttcgaaacttagctatgctatttctaatgaacattccttaagttgttgagtgcctgctatgcatagaaatacttactgcatgctagacactgaagacataaggtgaatttaaaaatttaatacctgcctttaaggaagtctaggaaatactacatagcagttcttgtggtattttgtattgcttatttaataatcttcataattttacaaaagcagacattaacttccccaagcgaactgttacagtaagtgatagatccaggatttgaacccagcaactgggcttcagtgcaagtacttattcctactgtgctttataaaataaaacataaatactttgtaaccacattttttagaataaaagttgatgcagagggagataccaatcaagatgattaagatgttgatacataggatagacaagttttgataaagaagtaaaacttgaaatgtaatccttacaccatttcttcttaataccaaccccacttaacagtgatacctttggggaaaagggataacgaaaaactttaactttctacatactatcttttccgtatttgaatttttttatggtattactttacaacttaaaaaactcaaaaacttaacctaaaatgtctcaataagtaggatatacttgggaatttgagctgcctattcactcgaatatacattttctgctaattaaatttttctgcacctgctgtaaaggatttccattctacatggaaaaattggtacactggtgctccttagatttcacgtacttcagttctctttagcagaaaccacttcccactcatgaactcagcagacagctagctagcaccttcagccttgtgacaaagatacttcagaatatatcaggtccagatatatggaaggaagccctcaatattatagcatgtaagataaagtatgacccaaaagaatgacttcagttgaaatctgtcacagagtacattcttttagggaaaagtatacagtagagatagtatggggaaggtcatgtttcatattttacctcttttcctctctgttgttcactattacagaggaatgttccgaataagcagctgtataggtggtccaaaatggtaatgagaaaatactcattgaattcaaatgcggtaggaaactgcaaatcaaacatcacaaacacataaattaagacattcttcaagcatattcatccctgtcatgggtagatccttttgaggtagtatttaaaatgaagttaaacattcaaatctacattattccaagccattatggcattattcgtatggttttcttttcaaaaatcatgttatcacttttctgatcatgatgtttctgtatctgctatatctgctaaccctaaatttgcaggctgaattttgacttaggcaattctggcaactctaggcattctctgcccaaaatgaccacaaacaacattaagattctttaaattttcaagaacatagttgtttttcttttttaaggattacacacaaaatgccaataatgtctccagaaaatgtcagcaatacacaaaagtaaacatctaaggcagataatttacaagtcaaccaacctattaaatatttagatggtgcaaaagtaattgcggcttttgccattgaaatggcaattacttttgcaccgacgtaaacttttcagggaacatccatcccatcaaaccagagtcccttgtaagccactattttggcagcatctaacaaaaagaaaattcactctctaacccaagccaggggcttgactggatgtcttagttttacacaacacaattttaggggactaatcaaatgaaaaattacgaacccctgaaagttagaaggtttcgtttaatccatcctatctaatatttcagaattatttggaagcttctatgtaagattctaccaattatagggctgtacgtgataagaaattatataaatatttagattgcagactgtgaaaatacacattgcttccaagcttttacatcttagatcccttcctttatagtggaggaaaatagtataaacatcatgtaaatggaacatggatgaaaacaactttgccttaaagtttcctacattttagcaagtatagacagggtaacatgacagatttcctaaacaagaaagggcacttactaggccttgatttttgtggctgtgaagctgaatgaagcagatgatcaagcagaagatgaccaagcatttccacaacaaaaccaattgtaaaaaactttgtcaagtcccatttattcctttaaaaaataaatcccacctatttttcacactcttaacagccctattattagcgaaatatgaatgcatcctgaatcactaaatagcaatcccaaggatctaagcctgcgattagtttttcatcttcttggcaaaactgttagctcagttatgagaagacagtgtaatcagtaggcatttcctcacaaagaaagtaaaatagcagggcattaactgcagctattgcttttaaaaccctcagcagaagagaactattttgttttctttacatgtttaaaatctaaaaggcccttcaacaattgcttcctgatctcagggctgaggtgacagagatgaggatggaaataggaggagaggtatagaatctggctgtcataacatagttggttctgttttgacaaatgtgctattcaagtctctgtactagtattcaagtatttataaaactgataattgctaacaaacattatgactagttaatatgctttatattcaggaagaaaatatacagaaaaacactaggtgtataaaataaagatggctacaaagtattttaggttctatcaaaaatacagatttaaactgattttcttttatttagtgccaggctcaaaattaggattaaactacttttagatagacagcatatataaagttaacaaaattaaaattactaaggaagaaatgtattatgatgtattcttctcccatccaagtgctaacaaggcccgaccctgcttagcttccaaaatcagatgagatgggtgcattcagggtggttggctatagattatcgtgtactcttctttgcaagaaattggtaaatgtgctttttttctagcaaacatatcagaactgatacattcaaacacatcgtttccttcaaggtattcaccttggaaagcagtacacacaaccatcaacaataccacagtttcaaagagctttcctactcctttgatggcgaattttatttctaccaagagtcaaaggttatttaagactgaatatggtaacagtcaaaagtggggtcctaatgttttgggtcaaacatccaaaaaaggattgtagggacttaggtagttgatatactgcctcaaagccaattccaaaggaaaaagtcaaacctaatccaagaaagtattaaacactgcacctctccttcctcttacctcccaacacaccaaaggtctgatttataaaccaaaactgaattgtatacaccttttcagtatatatgctaaaatactagtctcatcatatcatagtcatagctacaaaaatgcttcatttaacccaacagtttctaaataattcacccaagtagaaatgcttatggaggcaagggactgttaaatatataattgatgattatttcaccccattaccattaattttcttgtattgaaataaacagtattttattgaagctaaaaatatgctcctaaataaatatgatccaaagccaggcagagccagcacttgccctactttaaattcatatggcaatctaaataaaaacaattcagacttccagttgttttggggtctaataaacccttgggtaaataattatctcccaatgagctgcattcaacagggtttcgagatggtttgagtcagaattaaatcatatttttaagacaatgacccgttgcctcattaataaagtgatctcacaataaaccaggtgttttctcagtcccctctactctttccaaaagattaaattcatttatattaatatttcaaataaatttgttagaagttctaaaagccataatagctctctctatgcccaaaaataaaaagaactggatgtagtatgtgcctcccttgttatgctttctatataaacatttttcccttaaaataaaaattttcagaagaagcagattgaaattcaaaaaaaaaaattaacagttaaagttacttaaaatattttattttgcttgcggtacctagcttattttttctccactcttagcaatatataaatgtgtttttaggtgagcctatttaacactatttgttcaaaacaaatgataaaacctctcaggagttattatcaatgctactcactgaaatactaatagaatcaaattttcaagtgttaatctttaacctgattcataatgtgacaataaatagctctcacatggacatggagatgttacaagaatttccatttaatgatctataggctaatcagtgaccaaatctccccactctgacaggaaaactgaaaggagatgtgtaagaatacataggccagataaattacctgtcttgtcatctgccagacacagtcaataaattgaagaaaaacaggcgatctgtctgcatctgcatggttcttatctccatggccaactctctgaagcaaaaagagtgaaatatatgaacttagggggatttttcatgtttgatggaaataattttttaaaaaaataattggtcaatagtctaaaaattttcaaagtcgggtgctgtggtttacacctgtaatcccaacactttgggaggctgtggtggaaggatcacttggagccaggaattcgagatgggtctgggcaacatagcaagaccccatctctacaaaacatttttaaaagccaggcatggtggcgtgcacctgtagtcctagctttcaggaggctaaggtgggaggctggcttgcgcccaaaagtacaggactacagtgaactacggtcgcatcactgcactccagcctgcatgacagcaaggccctgtctcaaatacataaaaattttcagaaagtcttttaaagagcattgcaaagtaagtaaaaaatcacccattatcctgccaagcagaaacattttgatgtgcaaactgctcagatattttctgacacaagtgcttataatatgaattactactctgtttaataaactcagatcctaaaaggttgctaataaaagatggaagcagtcagaacctcagaggccagatttttgtcctggagattttaatttctctctgagaaataagttacatggacactggcctcagaaagcaccattctctgttcatatcttgaccactgagtgaagggtaccccctcctatcttagcactaatgtgtcttcatcaggaggaaccatattagcacacatcttagaaaacctgtcaaaaatgcttgacatccaccctccaagcatgcagtcatctacctagtttctcagttatttcctctgaggacctttgactcagataactgaaaacagaatcctgctccttaccccaaagcaggaattctaaaagtgtggtccacaaacatccaagggctgtgaggtcaaaactatttccataatattaagacattatttacctttttcagtgtgttggcatttgcactaatgatgcagaagttatgaaggataaaaattctggtgcctttgcaggcatcaagcagggcaatgcttataattaaaactgcattcgtacccactgtattctaccctaccagacactcacagttaaattaaagaaaaaaagtccatttctcttatgccagtgtacttaacaacgcagtaaaaattactgattttattaaatctcatcccttaagtacactttttttttaatggcctgtgtgacaaaacgggaaatatgtgttaactctttgctactgcatgtagtatggtaggagatagcactttctcatcatttttacttgaaagaaaaattaatgtatgcacttgtggttagaaagacttaaagactttttttttttgaaaaggtacaatgtgaattatcactgaaaggaaaacagctgacaatatttgttgtcaatgaaaaaattcaagcttttgagtgaaaactcaatttttggtgaacttttgcccaccataatgagcttaaaaatacttgaaggcttttctgacaaaaccaatggtgatgattaacaagtgtgattttatggtattatatgatgaaatgcatttacatttggaagatctgtgtaactcaataagccagtattttccaaataaccaatatgtgatgttacaaaaccacacatgggtaaaagatctattcaaaatggaagtgagaccaatggaatttaatgataaaaaaaattcattaacttgattttggattccatataacaactaacctctaagaaactaccatttatcaagttctggcgtagtatcaaagaagaatatctacaattccctgaaaaagctattaaaatactttctgcttttccacttacatatctgtatatggttagatattcttcatatactaaaaccaacaaaacataacagattgaaggtaaaaatagatataaaattcagctatcttctattaagccaaactcattaaatttgcaaaagtaaaacaatgccagtcttttcattaaactttttgttttggaaaatattttttttagtttaaatatttctgttaatatataataagcttatttcctaaattaagaaatatttttaaattttttcaaatttaattttcaatatggcaaatattgatataactcacataaagttctctgggtaacaagtttggggagttaggaaaaaaaagttctatccataattgttaacaatgtaaagggggtcctgaaaccaaaaagtttgagaatcattactctacattaaccttgtgagcaaatcctcttgactgggtgccctttaattgtcaagattctattttcagaatataactaggtaaaaagaacggggggagtaggtaaccagagttagcaatttaggaatccatagcaacttcgaacaccccaaaatgtttgattttgaacacatttatataaacatgtgcagctttggctgactaaaacttgattctttgaagtacgagtttgttttaaatggccgtttcatgataagtacattgtgtagagaacggcaaaatgtgagccatctgaataaacactccaggtacccaattttatttaacagttcaagttcaaaagagcagactaactttaaatgtctgttcctttcatgttacagttaacccttgaacaacacggttagaactgcacaggtccacttatatgcagatttgtttcagccaaatgcaggatgcggaacccacatacacagagggccaactttacatggtcccagcagggccagcttcagaacttgaatatgtgtggattttggcctgttcatgggatctgggaaccaagcccccacatataccaagggacaactgtataaacactgctagtatactctggtaactactggatactaaaggtaaacattacagacagcatctgggtaaagacccttctaaaagtttttcaattatttaggaaaacgcctgcccagaaacacccgtggacatcactgaatgatatccgatgtttcccagtggagatcacagaaaagactgggtcagacacttgacaaatagctagctctgactccagactagtcatgttagggatatcttaatgctttccaaaacaagcaaaaacgtttaccccactagataaatgatcaatttcagatgaatatcttattttaaaaaacacatttttttcacatgccttggcatgaatgcatgtgatatatccaaagtcaaggttccttacttactagttgaaatcgatgtccaaaacttagccattctttctccacaaggacttcaaatcctcggatggttcgatagtatccatccaacatgagcatggcaagggaagtgagctgagctgtgcgatcccaaccatcactgcaatgcactaccacagacgtcttccctgactctaccttgtcagcaatcctaagagcccctgcaagaataagct

SEQ ID NO: 10173 - DNA, 17792 bp, Homo sapiens
acgttgtaacagagctttattgcaattcatttcaaataaggttatgtttacagacttgtggtagacatgtgaattgttcattccaatataatgtgaattgcagtggtagtagcggtatacacagtgctatgggggcacagaggaaggtggggatgtcagagaaggcagtcgtgaatcagataacttcccaaaggaagagatgatgcctaaactctagaaaataggaattagtcacaagggagaacagttgttccaggtgcacaagacagactgaaccaaagtggggaggcaggaatctgcagattacatgaggcaattgtgaacagcagagtagcattggtacgtaaaagttgaggtatgcagagactaggtcgaaggaggctaaggagcttcaacttaatcatactggtctctaaattttgtaaccctaatcaaaaagggaaaaaattacacctgcacaaccaatagacatacgaagttatgaaacatgtaactgtcaattcaaatatttaaaattttgcctctctgtaaatatataaaaagggctagtattcctcctccctccctcccacacacaccagtggtatatattaatgcccaagtgcatgtactccatatggagacttctgcagaaggtgaggggaaccactggaaggttctcagcagagaagtggtagggttgcacttagatttccctggcttttgatttgaatttgaagtggatgcaagtatgttaagactagaagctttaaattcttgatctcttcagccattctacattcttttatgtggtatcaggccaagataaccaaggtttaaatgaggaaaatggcagatgcatttgtgaaatacttggagtagaaagcttaatttttaattactgatttgctagccacttaaatgccctgttaaaaagcttatatttcacacaattaccaaagaaatcattttggtaccaattttgctaaattggatatactaatagaaatttcctcactgcaagaccaagagggaggctaaggttcagactctctgtatagtgaattagtgagtggaaaaacactgtatattttaattgtttgatttgggtgttggttaaggaaaaatgggtacaaactgaacattttcatctggggtgcatattcctccaataatttccaaatatttctggggaaaaaaaagaaatggcaactttggacaagaacaagtttaaaagtcagttggaatttcttttaattaaaagaccaaggggacaagaagctcctttgttacagtacattacatatggctcttatgtagaataaaatagacatcagagtcaaatgtttctaccagcaccaaactcttacttgtagcaggtgaacagtgaagcaagatttcttttactggctttgagattgtaatacatcttttacatgcagtgtgttctttggtagacttaatcgttgagtgaaattacagaatttgcaaaggaaaaaaatgtaaaatttgagcacagtacttctcactataagctatttatacagaattcagaaaaaatgtcaatcctagtaagatttttaaatacttcttaaaaacttgctaattagcttctgtgtgttcagacacacaagacaagtgaaatacactgtagtaaataattagtttttaaaatatctttcatgatgtttctggtaattgggctaatctgaagggcatggaattctttgaactcctgtatggctactttctccccttcattttcccccaagcacatctataaggcctcccattttggatcaacttgctaatatgtcttaagtatgtaaataatgacggcaataattttcaactactaccacaccgtagtatcttcaatactttgccttttactatatgaagaatatggaagttgaaaagtgatcaaggtaaatcagttactgaaaaaaagaaaaacctagaatggagaaagggatatcaaatgattttgatctgtcatgacatcaaggcccaatatatgtgatgccacagaatttcagtgttggtttgaaaactgatgttcctctgcacagtgagcacagagtgtatttctaaaatggttttaatattaccagatgccaaaaatttgtaacagcatttgccttttaatagaaacttgttcccactgtgaatccaggattgaagtattttaatattctttggatacttaaaagattagtatcataatcatgtaattacatatggagttacttcacttaagccacctgcactgctacagttctaaactcatcctagagagatttaaaataaataaagtgactgaactttctctcatagatgggttctaaattccgaagactttctactcatagagctgccagtgtaatcaagagtgtatagcaatgatgcccctgatcttacagtcctttatacaacagtttggacaggagtgacacactgtgcaggagagctggctctctctgaggatgaggttgatcggttagaaatctctctctgtagttcctctacttttttctgaagctctgctcgtttagcaagaagttctttgtatctgttgtgaataggttcctgcaagagcaaaacataaaatattcaactaggcaatcctgaccaaagccaggtcaaatcattccctaaatgttgcagtgtatgttttttcagctgttggaaccaatggcacctttccaacccatcagtgaaattaaatacagggactgtggacaccactaatcttttcactggctttcccagtgcccctgagtatttccaaagaataacctgctgtgtaggtgctcctgaaactggtacttttccaaatacaacaaataattaacaagacaattaaaagacagtagtcagaagattccctgttatttataggtttttagtcttaaacagttctaagtagttaatattccataaacatattcacagtagaccagaattttgttcagcttttaactttcctaaagctactttcttcagcttattaaaacaagaccccctagaggttatccagacagaggagggaagatgcaagaaaagagagcagtgatttgtccaatgtcatacaagcagtcctaagaaccaggtatactgattaccctgccccagtgtagtatttttctactatacaattgttaactatcaatgggtaaggagtaaagttttaaatatgcacagataatctttccagctgcttttacggagacaaagttgcactgcatgaatgaaaactcccattgtatattgtaaggcacatacctgtggtttcatccgtggattccaccttatgtaatatcccacccagagctctaggtggcgcatgctggctactggataaaggacatgattggaatagctcccatagagaggattagtgaagtcttccagctggctgtttatgtaagaccacagtgacacagtccttttaggaagattctgtaggcaggaaaaataggtaaagattctccaccacataagccatttacactttagatgaaatttgtgaagaagtactttgttgtcattaaaatctctttagaggaagtggacttggagacttcagtgataaaccaacttatattaagatcagagggtactggaaaacagtatgcagttcctcaaagagataccatatgacccaacaattccactcttgtacatatccagcaaacagaagacatgtctgtacaaaaacttttttatagatgttcaaagcagcattattcattaacagccaagaagtgggaacaacctaaaagtccatcaactgacgaatggataagtaaaatatatccacacaatggaatattattcagccataaaaagaaatgatataaaatgtatgaaccttgaaagcatattaaaggaaaggagctagacacaaggtttacatattaaatgattccatttatatgaaatgtccagaagaggcaaatctagagacaaaaacattagtgtttggcaggggtgaatggggagtgactattaacaggttttctgaggtgatgaaatgttctgaaatgaaaatgtgatggctgtacaactcagatatactaaaaaccagtcaactatacactatcaaagtgaatttcatggtatgcatattattatcaatttaaaaagtttttttaaaaataatcaatgattcctaccccaaggctctcaaaaaataaaactcttcgaaacttagctatgctatttctaatgaacattccttaagttgttgagtgcctgctatgcatagaaatacttactgcatgctagacactgaagacataaggtgaatttaaaaatttaatacctgcctttaaggaagtctaggaaatactacatagcagttcttgtggtattttgtattgcttatttaataatcttcataattttacaaaagcagacattaacttccccaagcgaactgttacagtaagtgatagatccaggatttgaacccagcaactgggcttcagtgcaagtacttattcctactgtgctttataaaataaaacataaatactttgtaaccacattttttagaataaaagttgatgcagagggagataccaatcaagatgattaagatgttgatacataggatagacaagttttgataaagaagtaaaacttgaaatgtaatccttacaccatttcttcttaataccaaccccacttaacagtgatacctttggggaaaagggataacgaaaaactttaactttctacatactatcttttccgtatttgaatttttttatggtattactttacaacttaaaaaactcaaaaacttaacctaaaatgtctcaataagtaggatatacttgggaatttgagctgcctattcactcgaatatacattttctgctaattaaatttttctgcacctgctgtaaaggatttccattctacatagaaaaattggtacactggtgctccttagatttcacgtacttcagttctctttagcagaaaccacttcccactcatgaactcagcagacagctagctagcaccttcagccttgtgacaaagatacttcagaatatatcaggtccagatatatggaaggaagccctcaatattatagcatgtaagataaagtatgacccaaaagaatgacttcagttgaaatctgtcacagagtacattcttttagggaaaagtatacagtagagatagtatggggaaggtcatgtttcatattttacctcttcctctctgttgttcactattacagaggaatgttccgaataagcagctgtataggtggtccaaaatggtaatgagaaaatactcattgaattcaaatgcggtaggaaactgcaaatcaaacatcacaaacacataaattaagacattcttcaagcatattcatccctgtcatgggtagatccttttgaggtagtatttaaaatgaagttaaacattcaaatctacattattccaagccattatggcattattcgtatggttttcttttcaaaaatcatgttatcacttttctgatcatgatgtttctgtatctgctatatctgctaaccctaaatttgcaggctgaattttgacttaggcaattctggcaactctaggcattctctgcccaaaatgaccacaaacaacattaagattctttaaattttcaagaacatagttgtttttcttttttaaggattacacacaaaatgccaataatgtctcaagaaaatgtcagcaatacacaaaagtaaacatctaaggcagataatttacaagtcaaccaacctattaaatatttagatggtgcaaaagtaattgcggcttttgccattgaaatggcaattacttttgcaccgacgtaaacttttcagggaacatccatcccatcaaaccagagtcccttgtaagccactattttggcagcatctaacaaaaagaaaattcactctctaacccaagccaggggcttgactggatgtcttagttttacacaacacaattttaggggactaatcaaatgaaaaattacgaacccctgaaagttagaaggtttcgtttaatccatcctatctaatatttcagaattatttggaagcttctatgtaagattctaccaattatagggctgtacgtgataagaaattatataaatatttagattgcagactgtgaaaatacacattgcttccaagcttttacatcttagatcccttcctttatagtggaggaaaatagtataaacatcatgtaaatggaacatggatgaaaacaactttgccttaaagtttcctacattttagcaagtatagacagggtaacatgacagatttcctaaacaagaaagggcacttactaggccttgatttttgtggctgtgaagctgaatgaagcagatgatcaagcagaagatgaccaagcatttccacaacaaaaccaattgtaaaaaactttgtcaagtcccatttattcctttaaaaaataaatcccacctatttttcacactcttaacagccctattattagcgaaatatgaatgcatcctgaatcactaaatagcaatcccaaggatctaagcctgcgattagtttttcatcttcttggcaaaactgttagctcagttatgagaagacagtgtaatcagtaggcatttcctcacaaagaaagtaaaatagcagggcattaactgcagctattgcttttaaaaccctcagcagaagagaactattttgttttctttacatgtttaaaatctaaaaggcccttcaacaattgcttcctgatctcagggctgaggtgacagagatgaggatggaaataggaggagaggtatagaatctggctgtcataacatagttggttctgttttgacaaatgtgctattcaagtctctgtactagtattcaagtatttataaaactgataattgctaacaaacattatgactagttaatatgctttatattcaggaagaaaatatacagaaaaacactaggtgtataaaataaagatggctacaaagtattttaggttctatcaaaaatacagatttaaactgattttcttttatttagtgccaggctcaaaattaggattaaactacttttagatagacagcatatataaagttaacaaaattaaaattactaaggaagaaatgtattatgatgtattcttctcccatccaagtgctaacaaggcccgaccctgcttagcttccaaaatcagatgagatgggtgcattcagggtggttggctatagattatcgtgtactcttctttgcaagaaattggtaaatgtgctttttttctagcaaacatatcagaactgatacattcaaacacatcgtttccttcaaggtattcaccttggaaagcagtacacacaaccatcaacaataccacagtttcaaagagctttcctactcctttgatggcgaattttatttctaccaagagtcaaaggctatttaaaactgaatatggtaacagtcaaaagtggggtcctaatgttttgggtcaaacatccaaaaaaggattgtagggacttaggtagttgatatactgcctcaaagccaattccaaaggaaaaagtcaaacctaatccaagaaagtattaaacactgcacctctccttcctcttacctcccaacacaccaaaggtctgatttataaaccaaaactgaattgtatacaccttttcagtatatatgctaaaatactagtctcatcatatcatagtcatagctacaaaaatgcttcatttaacccaacagtttctaaataattcacccaagtagaaatgcttatggaggcaagggactgttaaatatataattgatgattatttcaccccattaccattaattttcttgtattgaaataaacagtattttattgaagctaaaaatatgctcctaaataaatatgatccaaagccaggcagagccagcacttgccctactttaaattcatatggcaatctaaataaaaacaattcagacttccagttgttttggggtctaataaacccttgggtaaataattatctcccaatgagctgcattcaacagggtttcgagatggtttgagtcagaattaaatcatatttttaagacaatgacccgttgcctcattaataaagtgatctcacaataaaccaggtgttttctcagtcccctctactctttccaaaagattaaattcatttatattaatatttcaaataaatttgttagaagttctaaaagccataatagctctctctatgccaaaaagtaaaaagaactggatgtagtatgtgcctcccttgttatgctttctatataaacatttttcccttaaaataaaaattttcagaagaagcagattgaaattcaaaaaaaaaattaacagttaaagttacttaaaatattttattttgcttgcggtacctagcttattttttctccactcttagcaatatataaatgtgtttttaggtgagcctatttaacactatttgttcaaaacaaatgataaaacctctcaggagttattatcaatgctactcactgaaatactaatagaatcaaattttcaagtgttaatctttaacctgattcataatgtgacaataaatagctctcacatggacatggagatgttacaagaatttccatttaatgatctataggctaatcagtgaccaaatctccccactctgacaggaaaactgaaaggagatgtgtaagaatacataggccagataaattacctgtcttgtcatctgccagacacagtcaataaattgaagaaaaacaggcgatctgtctgcatctgcatggttcttatctccatggccaactctctgaagcaaaaagagtgaaatatatgaacttagggggatttttcatgttttgatggaaataattttttaaaaaaataattggtcaatagtctaaaaattttcaaagtcgggtgctgtggtttacacctgtaatcccaacactttgggaggctgtggtggaaggatcacttggagccaggaattcgagatgggtctgggcaacatagcaagaccccatctctacaaaacatttttaaaagccaggcatggtggcgtgcacctgtagtcctagctttcaggaggctaaggtgggaggctggcttgcgcccaaaagtacaggactacagtgaactacggtcgcatcactgcactccagcctgcatgacagcaaggccctgtctcaaatacataaaaattttcagaaagtcttttaaagagcattgcaaagtaagtaaaaaatcacccattatcctgccaagcagaaacattttgatgtgcaaactgctcagatattttctgacacaagtgcttataatatgaattactactctgtttaataaactcagatcctaaaaggttgctaataaaagatggaagcagtcagaacctcagaggccagatttttgtcctggagattttaatttctctctgagaaataagttacatggacactggcctcagaaagcaccattctctgttcatatcttgaccactgagtgaagggtaccccctcctatcttagcactaatgtgtcttcatcaggaggaaccatattagcacacatcttagaaaacctgtcaaaaatgcttgacatccaccctccaagcatgcagtcatctacctagtttctcagttatttcctctgaggacctttgactcagataactgaaaacagaatcctgctccttaccccaaagcaggaattctaaaagtgtggtccacaaacatccaagggctgtgaggtcaaaactatttccataatattaagacattatttacctttttcagtgtgttggcatttgcactaatgatgcagaagttatgaaggataaaaattctggtgcctttgcaggcatcaagcagggcaatgcttataattaaaactgcattcgtacccactgtattctaccctaccagacactcacagttaaattaaagaaaaaaagtccatttctcttatgccagtgtacttaacaacgcagtaaaaattactgattttattaaatctcatcccttaagtacactttttttttaatggcctgtgtgaccaaacgggaaatatgtgttaactctttgctactgcatgtagtatggtaggagatagcactttctcatcatttttacttgaaagaaaaattaatgtatgcattgtggttagaaagacttaaagactttttttttttgaaaaggtacaatgtgaattatcactgaaaggaaaacagctgacaatatttgttgtcaatgaaaaaattcaagcttttgagtgaaaactcaatttttggtgaacttttgcccaccataatgagcttaaaaatacttgaaggcttttctgacaaaaccaatggtgatgattaacaagtgtgattttatggtattatatgatgaaatgcatttacatttggaagatctgtgtaactcaataagccagtattttccaaataaccaatatgtgatgttacaaaaccacacatgggtaaaagatctattcaaaatggaagtgagaccaatggaatttaatgataaaaaaaattcattaacttgattttggattccatataacaactaacctctaagaaactaccatttatcaagttctggcgtagtatcaaagaagaatatctacaattccctgaaaaagctattaaaatactttctgcttttccacttacatatctgtatatggttagatattcttcatatactaaaaccaacaaaacataacagattgaaggtaaaaatagatataaaattcagctatcttctattaagccaaactcattaaatttgcaaaagtaaaacaatgccagtcttttcattaaactttttgttttggaaaatattttttttagtttaaatatttctgttaatatataataagcttatttcctaaattaagaaatatttttaaattttttcaaatttaattttcaatatggcaaatattgatataactcacataaagttctctgggtaacaagtttggggagttaggaaaaaaaagttctatccataattgttaacaatgtaaagggggtcctgaaaccaaaaagtttgagaatcattactctacattaaccttgtgagcaaatcctcttgactgggtgccctttaattgtcaagattctattttcagaatataactaggtaaaaagaacggggggagtaggtaaccagagttagcaatttaggaatccatagcaacttcgaacaccccaaaatgtttgattttgaacacatttatataaacatgtgcagctttggctgactaaaacttgattctttgaagtacgagtttgttttaaatggccgtttcatgataagtacattgtgtagagaacggcaaaatgtgagccatctgaataaacactccaggtacccaattttatttaacagttcaagttcaaaagagcagactaactttaaatgtctgttcctttcatgttacagttaacccttgaacaacacggttagaactgcacaggtccacttatatgcagatttgtttcagccaaatgcaggatgcggaacccacatacacagagggccaactttacatggtcccagcagggccagcttcagaacttgaatatgtgtggattttggcctgttcatgggatctgggaaccaagcccccacatataccaagggacaactgtataaacactgctagtatactctggtaactactggatactaaaggtaaacattacagacagcatctgggtaaagacccttctaaaagtttttcaattatttaggaaaacgcctgcccagaaacacccgtggacatcactgaatgatatccgatgtttcccagtggagatcacagaaaagactgggtcagacacttgacaaacagctagctctgactccagactagtcatgttagggatatcttaatgctttccaaaacaagcaaaaacgtttaccccactagataaatgatcaatttcagatgaatatcttattttaaaaaacacatttttttcacatgccttggcatgaatgcatgtgatatatccaaagtcaaggttccttacttactagttgaaatcgatgtccaaaacttagccattctttctccacaaggacttcaaatcctcggatggttcgatagtatccatccaacatgagcatggcaagggaagtgagctgagctgtgcgatcccaaccatcactgcaatgcactaccacagacgtcttccctgactctaccttgtcagcaatcctaagagcccctgcaagaataagctggaaaacagattttttaatacattgtttttaaacaaggtaaatacttccttcttcaaaatttactaatacagcttatcagggatcattatttcaataacatgaggaaaaacatttgtcccttcctaagaagaattttttttaatggtagaagatatataaattttgcttttaaaactagaaaaacctcataattgctgactcctattaatttgcccaacgaaatagccaaatcaaaagtacctttgggtgctacataaatcatggtgtaagattcttcttagaaaagttctaaagagatctgtttctaagaatcaaatattccatcatctatttaaataaaaataattgatatagcaattgaagcctttttatgatttaaaacaatgcttaaaccaaattgggataagtacctgaaagcaataatactggatctctttaaaatactctatagcatttattgtattgttttgactaaagatttttatgtcacagagcatacagcaagcacagtataaactttagagtgagctacttttctgtaacactatgcatgaaaattcacagaatatgtcaatctgttacttaaaataacttcagctcttatttttttaaatatgcagaaatcctttgcaaaataacttaccttttctgaagtcaatcttgagttaaaactaaacataattagatataaccaaaaaagaaacacaaaagtatggtatcttaaaaaaaaaaaaaaaaaaaaaggacaatacagccctattcttctctgcaatggccatattgtattatacttgaaaaacagtatagttctacatacgcagatgagaatgaaagaaaacagattattaagcttggaagtatgataacctccccttgatcacagctataagcatattctggaaatggggtactatgacgatcttgactatatatcaagagtcatttgtaagcctgaagtgcctagacctcattgtccaatgatcctaattcagtatcttaaataaattccacctataattctagtgcatatacgaagttaagaatcactaacccaaaggcttagttaagattgatcaggaagagttatccaaagtagtaattgttcattcattcattaaataaacatttatggagtcccttactagaaggtagatactgctctaggcacgggccatacagcagggaacaaagttcctgcttactgaagtttacattctatttgggtgaggcccaccagtcacaaataaacaaggaaatatacagtataccagatggcaataagtgaaaacgctccatagaagttatagggaatgctggtagaactcttattttgtaaagaggctgggaaaggtctctctcagaaaggtgatatttgagcagagaccagaagagagtgattgagtaaataaactttctttgtgtgataaggattgggggagaataaagtagtttagcccaactatatgtcttataactctagggaaatttgattctgttatagccagccttttagagaccatgttgaaactgcaaattaaatatctggagttttcagaatcaaacacagcgatttatgttagttccaaatcaagcctaaggctgtatatttacacgtcacataatttaatgaatgggccacatgaacatgctctctgagtagtgtttatactttgtgattttcaagcttctaagcttctcaaagggaaacaatagtaaaaatggtctatttaaaattcttattcagtttggttttctcttcaattctgtctgaacttcagagattttaatgtgagcagaagtatcctccttcttaacgtgaaagactgcatttcccattacctcttaatatttatatatgtggttacataagtctacattttggtgagttatgttactgacagaccatatctgaaaatataactagattaaattagcatgttaggtaaattagcactgacatgtgctctgcgaatgacttagcactcagtgtggctcatgcaaccactccacctcatttccctgatcagaatggttttaacttcacaaatcaactaatatttattgggtacctattcacacggatagtgctgccctagctcctgagaggacaaaaaaatatatgtaggatttatccagtcttggtctccataaattagcaatatacgttggttgacacacaaaagcaaacaaagtacacgctagttcctgattagatggaaagacagggtaaagagttcagagaaaatggaaaaggatgcaatctgggaagaccttatggaagaaatgaaatatgaactggaatctgaaggatggttcgaattcagataggatgggagggggaacaaaagaaatacaacataaccaaatgcacaatataaaaaaccaattcattcaaacattaaaattcactagtagttccaagtatcaaagcatttacccatttttcattgtttagaaaggtaccttcatgttgattgcaattataagtaaaaagctaatataaacaaaggggtagagagagtctttgtttgggatatagtaacacacacccaccttaatatgttctagccaatgagtagattccaagttagacaaccagtgagtttcctcaatgttggggtacacaatctccttaagttttcgtaatgattctctcataacatgaatattgtggatatccaggaaaactagttcagcattttgataggcatcttcactttcataacctccaccctttgcctggaaaaaagcacacatcatggaaaatcataaatgaatgcacatctgtaaacaagtgacataaaatatccaatagcataaaagatgatacatattactggagacaaggaaaactccacaggaaaatgtggatggctcaggacaacttatttagcacaaccactcgctttcttgtgttcttctttacaaaatgaatatatacgtagtctgacttgcccatatggccattattaaaattaaatatgaaacacataggaaggtatttaaacactgtaaagcactaaattttcccagcccatacgccaagtcctacccaaacataagttcttacagatgacttcctttcatatatactgaaattaccagactgtaagtttcatgtgctgagaccacatgtctggttcacctatgcttcttcacctccctgcctcttcacctcattttaatcttcatatctgagaaataaactctttgcaatcaaaatgacctgcttcttttttaaccacataattctctttaaataaaaagacagaacaaggataaaagcacagaatgctatcatcatcaatgttctcaaagacttaaatctacatctacaaaatagaatgagaaaatatttggtgttcaaaataagctatggctagaaagaagaaccttatttttctggacttaatctttttatatttcatgaataaaatattctatctcctacctaactcgtgtaaaattatacttcttagagccctaatagaaacaaattaggaaaatactggagcagtaaattatacaaaattaagtgatcatatgacccacacctttgaaacaacaaaaccaccaactcataaccagcaacaaactactgaaagaacagaagttcagcttcctttctgacactgagagtctgggaaatcgtttggcacaattatagaatttacagtatttcaagggatacctgttaaagattacttctgaagagtgggaataagacaggaactttcaattcaaatttgttgcaacattctagaaagacagcagtggtaacaactatacagaacctgtcaccgaaacacatagaataaaaatgccctggattcaggtagtggcatggttgtacaactttgtgaatatactaaaagcactgaaatgtacacttgaaaagatgagcgcttttcagtaatggtacctgctgctgtagttatgtcttctctctccttccctcctcctatagatttggtcaactgaaccaaaatttcaatttccacaatgctaatatttattctgctggaacaatcagctacagctaactgccaattcttcagtctgaataacttgttcaggtggaggacggtcagaagagggcaccactagtcaccgagaacactacttcgctattcctagagcagtactatacagggacttcagtgagtcataagctcagttagttgtcaactttggagaagtgggaagctaagaataactgaacacctagttattatgtaagtaagcaaaagtttatgcattattttttattaaatgatttttgctcccaaaacaacactgttaactattattattctcatttttaccaataaacaaattgaggtctaaagaggttaaataactaactcaaaatcacaccatcaagttgaagagccaagacaagaacctatatgtttaccactgtagagcctgagctctttttactacactgtggccctgccaaactcagctgattcatgaaaccataattataattactaagagaccatctgaccttgttggcaacagcattaacacttggccgggcatcaaatataaagattttgtgagactgggcattggaatccatgatagcttgaaggtatttttcatcttctttgcttcgctttccactcactccaaccatgggctggctacaccgagtgattgtggcttgactttcaggatgaatccatgataaaaccttaatgaggaaaaaatggtaacacaccttttacatacttctctgtttataattctccaaaacagtactcagtaaagctctgctttctaattggatcccaagcctggccatgaaaggacatctgaggctgctaagaaaaatcatcacctttccttcaagcccattctgggatgtggaaaacttggtctaattctttagtcagatactgattaggaaagtatttgattattgggaaatgttatctcctgaaaaaaatactgtgaaacagggctaagtaaaccccacttaatatattagtaaaactgctcagttctaaaagcctttagaatctatgaattttgtacctaaaattatttaagctcatctttctaagatccagttataaatctgtaaggtgttctttctaggacttaaaaaaaaaaagaacatttatcatcatgactaaagaatatacaataagataaataaatagtgactaatacacacagcaaactttttcagtgaagaatcatgcaattctgtgcagttatctaatacccatatcacactctctggaagcctctttaagtctttcttccagttttaactttactaaataaatcaatctccaatatccccatgaaagacctgctgctgtagctatttatatcctgaatccattctcctactcattaatctcagcattatgttgagtaaaaaagcacttgcaaaggctcatccaaacttcctacttactgggatacggcctcttgatctgaaggatgccactctctttaattcttcatcaggaatatttgctggcacaaccaggag

SEQ ID NO: 10174 - DNA, 611 bp, Homo sapiens
ttcaaatctctctgagttctgttgttacatttctctaaccacagcgggagaaaattttctggttatgttatcagattgggcccactcagataatgaaaagatggttttgatattgaatttgttaatcgtcttttagatgtttcttcatctgtatcttttaaaatacacctacctcatactttgtgtgaagtttaaatgaaatatctttgctttatttgggatgctgtggcatttcctttttttgaaagttgtgtttaatcactaatattgcaacaattctatgtgttaatgattctctaggtaaaagaaatatttttgacatcgtaggctaaacaggcatttgtaaattagttgaggaacattttttgtttcagttgggatatatattgtaagtatcctaaaaatctcagaatgaacctgttttgtaaactggactgattgtacagtaaaataccaagtaggtaatgatatccaaataccagcttaaatcctaacctataatgggtgctgaaaagtgtttactgaaataaaagtaactaaatagtgtgatgtcttttaagaattttagtactctataatcactaacctagaagcctctttattataagata

SEQ ID NO: 10175 - DNA, 473 bp, Homo sapiens
cagctgctaactgtgtgaccttgggaacctaacctctttgtgcctcagtttcctaatctgtaaaattaggctgataacagaatcatagtcttgtaataagggttaaagatataatctatgtacagtgcctagtccaatttctagcacacagaaggtactgcataaatgttagctattattacgtttctgaaagctcacttgggtacacataacatggggcaagaccagagggtggagaccagttagatcgtcactgaggtcccttccagaccagtaaatttctgaataaagctttgaaaactagttgctcacttttaagtagctcacttcctgtcttgtttacattaagagacagcagaataatttttccagataatgcaaatgtgtccagaattagttctaatttgaattaataagattttattatacttttaaatacaaatctctcaatattccccatgaaaatataaaaa

SEQ ID NO: 10176 - DNA, 517 bp, Homo sapiens
ccaacacttgtgggaccccaggacggtgcagggagcaaggttgaggctgcagcagaggctctgggtctgggaatgggtcctgcctggccatgcaagggtggaggtggtgcagttgatggccttggggactgccacttttgctcccacagctgctcctgccattaccactcatgcctctctactgcagctggtgtgatggcagcagctgctctgggtgggtatatacccagaaggatataaatcattctaccataaagactcatgtacatgaattttcattgcagtactattcacaatatcaaagacatggaatcaacctaaatgcccatcagtgacagattggataaagaaaacatggtacatagacactgtggaatactatgcagccataaaaaagaatgagatcacatcttttgcaggaacacggttggagctggaggctgttatccttagcaaactaatgcaggaatagaaaaccaaatactgcatgttctcacttataagtgggaactacatg

SEQ ID NO: 10177 - DNA, 21371 bp, Homo sapiens
  SITE (6392): n equals a,t,g, or c
gtagtcggatagttggcgggtggttgagtagaagcggtcgccatgtccgcggggagcgcgacacatcctggagctggcgggtacggcttcaggggcgagggcatcggagcgagcactggggcgcaggagaggcggagggaccctgagaagctgcgtatagggtggaagggtccttaagtgggaagtaaagggctggacgtttggggagaaggatcttgagcaggcctggggcccttaaagggccggcggggatccgagggaggaggcaaacggggacttttggaagggcgagccaaggggaaggcgtaaactagagcgtgtaggatagagtggagtctttcgatataggtgacagtagaaacgaaagattttggggaagggttgaaagtgggggtttgttaaataagcaataattgtttaaggagaggggagttttagatttggaaggtgattcggaggtgtaaatggaatataatagagggaaaatggggtgctaaggcgtagtaaggaaagaataacatacacgaaagctttggggcctaatgttttcctttttctccatgtaggcgccgcagcaaatgggaccaaccagctccagccccacttctcttcctcccgccagcggccccaggtggggaggtcaccagcagtgggggaagtcctgggggcaccacagctgctccttcaggagccttggatgctgctgctgctgtggctgccaagattaatgccatgctcatggcaaaagggaagctgaaaccaactcagaatgcttctgagaaggtatttgaagttgaagggtctccactaattgcgaatttaatagttgttttgccgggcgcggtggcttacgcctgtaatcccagcactttgggaggccgaggcgggtggatcacaaggtcaggagtttgagaccagcctgaccaacatggtgaaaccccgtctctactgaaaatacaaaaatagtcgggcatggtggcacgcgcctgtaatcagctactcaggaggctgaggcagaactgcttgaacccgggaggcggaggttgcagtgagccgagattgtgccagtgcactctagcctgggcgacccaatgagactccgtctcaaaaaaaaaaaaaaaaagttgtttgtaatcctgtaatcgcataataatttgtgttagtaaaggataaatggatatagtagttgagagatcatttagttttggaatgttccagaacacattttgttacaaatacatatttacgaggcgtttttgattgggctgattacatttatggaccaaataccttgtcttgtccttgttcacttagttcagcttaagctgtatttccatagtcatttaaagcaacataacatgtttttaatatatgtgctttttccctgaagtcagaggagttcaggtaaatcaagtgagccccatagtgtcatctctaattagaacctgtagggttttatttatttatttatttattttgatagagtctcactctgtcaccagcctgaagtgcagtagtggggtgatctcggctcactacaacctctgtctcctgggttcaagtgattctgattctgctgcctcagcctcccgagtagctgggattacaggtgcatgccaccatgcccggctaatttttttttgtgtttttagtagacagggtttcaccatgttgaccaagctcatctctgcctcccaaagtgctgggattacaagtatgagccaccaggcgcagcctattgtttgcaaagattgtgtgagtcagtcatccatttataaggtttatgaggaaaaattaaaagcatcttgacaaagatgtagtgctccttgtatattaagatttttaatactgatgttaatcgtttaagctctttttttttcttaaaataataatctttaggtagttgacctcagcaggatacataaacactggatttagaatcataaaacctaaaaacccagaatccacagtttgaaacccagaatccacagttactggttacatggctttggcataatgaaactcagctttctcgttggtaatatatacctgcattgtgtagtgcagtagtcactagcttcatgtggcaatttaaattaaaattaaggggctgggtgtggtgactcacacctgtagtcccagctcctctgtaattcttcttggattcttggaaggctgaggtggaaagatcacctgagcctaggagcttgaggttgcattgagctgtcattttgccattgcactccagcctgagcagcagagtgacaccttgtctaaataatacaaataattaaatactctcaggctccatatctgtgagaaataaattcctgttgtttaagcaaaaagcaaagcaaaaccaaaatacaatttaaaatttagacctttagtcacattagccacctgccaagtgctcaagagacacatgtggctaatggctaccatattcgactgatagactagaacccttgtcaccaaaagttctcttggacaacattgataagtactattaaaggcggccataaggattcattgagatgataatgtaaatgaatactataaggggttaaataaaggtaaggtgatattgctgagtttgtatttagttttgcctccacatttaaaaaatgtatttaatgcacaaagtaaacaacagtatgttaccttcttgagcagattttctagacataggttggggagataggcccctgtagtcccagctactcaggaggttaaagcgggtgggtggatcacttgaggccaggagttcaagaacagcctgggcaacatggtgaaaccctgtctctacagaaaatacaaaaacaattagctaggtgtggtgcatgcctgtggttccagggtctggcttgattgcccaggcagtgactgtgcagtggcacagtctcttcctcccaggctcagcctcccaagtagctgcgactacagacgcatgccaccatgcccggctaattttttttattttttgaagagatgggtttgccatgttgcccaccctgcttcagcctcccaaagtgctgggattacaggcatgagcctgtttggttccttcgttcattctttctttctttctttctgtctttctgtcttttttttttttttttttggtgatagagtcttgctttgttgcccaggctggagttcagtggcacaatcactgctttctgctgcctcagcctgctgagtagctgagactacagtctcatgccaccgtgcccagctaatgttttgtatttttttagagatgtggttttgccatgttacccaggctggtctgaaactcttgggctcaagcgatccaccctcctcagcctcctaaagtgctaggattacagatgtgagccaccggtcccagcctttttttgtaatttatatatttatttttgagacagagttttgctcttgttgcccaggctggagtgcgatggcgtgatctcggctcattgcaacctctgcctcccggcttcaagcaattctgcctgagcctccggagtagctgggattacaggcacgaaccaccacacctggctaattttgtatgtttactagagacggggtttcaccatgttgaccaggctgatcacaaactccatgtagtttaaattgaaagaaaccggatcaggttttaccatcttactgttttttcattcttctttgttctgctgtaatagagtgaggaattattagttagatacaatttaagggtttttgagagctttacaaggatggagttagttggattttatgttaggattataggagtggcacaaagacaacttcctattgtatgcatgaggtatatgtattgtaggcattgctcctctaccttctattgtgttttactccatgtacagccaactaactgagctatagagtatcataacttggccctttaattttctttttgaaggttgtagcttctagtccctagagcttctgtaattaggtggtcataaaaatgcacatagggccaaggtcacagagaaatcttgattgtggccttcaagcagattgactttattattgactttatttaatgtcattttagtgagatttttgtttgcttgttaattcgtttatgaagaatgaccaactgtgtttacaggcagatgaagggaagggtagggaggtgtgggacttgggaaaggatagttgtacattggatgactaaaaggctttatctcagctgggcacagtggctcacgcctgtaatcccagcactttgggaggccgaggtaggtggatcacctgaggtcaggagttcgagaccagcctggccaacacggtgaaaccccgtctctactaaaaatccgaaaattagctgggcatggtgctgcacacctgtaatcccagctactcaggaggctgaggcaggagaattgcttgaacccaggaggcggaagttgcagtgagctgagatcacgccactgcactccatcctgggcgacagactccatctcaaaaaaatgaaaaaataaataagtaaataaataaaataaaaaaatagactttatctcatcataaaaactttttaatctaatttctcttttttctagcttcaggctcctggcaaaggcctaactagcaataaaagcaaggatgacctggtggtagctgaagtagaaattaatgatgtgcctctcacatgtaggaacttgctgactcgaggacagactcaagacgaggtgaggaggcattgagactctttggggagggcggtgagtggattcagataaagaagacctctaaatagacaggcgtcagatatttattagtgggtttgggtcatagtctctaaagtcaggattgggtttaatttaacttcagaggaagataatggaatggatataaatgaattctctgggttggtttgagtaagaaaccatggaatcaaaatttcagatacaggagagaattctttccttctttacttggttgaatgaatgaatgggaagaaaatctgtctgccattgaaatcaaccaattgccacatttttttaattgaacatttccttttttagatcagccgacttagtggggctgcagtatcaactcgagggaggttcatgacaactgaggaaaaagccaaagtgggaccagggtgcgtattctcttatcttgtttatggaagggttgggtgtatgactcacgttagcctcatgttttttatccttaggtaatacgtgtacacaatatttgattcaaggtttgaggggtatgtgtgtgcacactatagcagaattctggatatcaaacagatacaagatgttgggacctgtttttggacttttatttcacatttaatgtttttattggaggaaacaaattataggaaagtgtaaaagaagatactaaccactaacatttaatgtatatactcttttttcttctttctgttccatatgatctgcagaaataatgtatatactttttttttttttttttgagatggagtcttgctctgtcgcccaggctatagtgcagtggcgtgatctcggctcacttcaaactctgcctcctgggttcatgccattctcctacctcagcctcccgagtagctgggactacaggcacctgccaccacgcctggctaattttttgtatttttagtagagacagagcttcaccgtgttagccaggatggtcttgatctcctgaccttgtgatccacccccctcggcctcccaaagtgctgggattacaggcgtgagccaccacgcccggcattgtatatacttcttaacttttttctgtggaaatagttcccctcacaaatgggctctttttttttttttttttttttgtctttatgatggttatagtttgtgattattcaggtaaagacttaatctgtttcattttattccttccatcattccgtgtttgagtttctcttcactgtcagttgataggtacttagggaatgcaacatttttaacattagcttaaactacacaaaataaggtggcaaaatttaattcctaccccaagccaagaatttatttatttatttatttattagagaaggagtttttgctcttgttgcccaggctggagtgcaatggcgccatctcggctcactgcaacctctgcctcctgggttcaagcaattctctggcctcaccctcccgagtagctgggattacaagcatgcgccaccacacccggctaaattttgtatttttagtagagatggggtttcacgatgttggacaggctggtctcaaaagtcctgacctcgggtggttcccctgcctcggcctcccaaagtgctgggattacaggcatgagccaccgtgcccagccccaagaatgtatttaaactttctatatgtgttgattgctgatttgaactttgtctataaaaagtattnttacctgctactttttattaactatatatggttattgatcactttattataatttaagtcctcttcacatttagaatctaaattatcagttgatgtagaccttaagaggtttctctatatgcatgatcaatctttccccattaattttgtgtgtgtgtgtgtgtgtgtgtgtgtgtgtgtgtgtgtgtggttttttttttttttttttttttttttttggagacagagtcttgttctgttgccccggctggtgtgcaatggcatgatcttgggtcattgcaacctccacctcctgggttcaagtgattcttgtgcctcagcctcctgagtagctgggactacaggcgtgccaccatgcccggctaatttttgtaatttcagtagagatggggttttgccatgttggccaggctggtctcaaactcttggcctcatgtcatccacccacctcagcctcccaaagtgctgggattacagacatgagccacagcacccagcttgccccattgatttggatagacgagaccacatttgtttataacctattagacaaccagcaaaaaggaattctgttcttaaatattgggttatctcaatagactggaaaataatggtagtgaatccataagaacagatttgatctgaactctgtgggccagttgacttttaaaatcaagaagtttatttgttccccagctgttaaagcatgttctgagacattagctagcaaaaacccttctaatgtatatagtcccttttggttatttggaaacttgaaacattacaaattagatctggtgacccatttgactccttttttggttttgaccacattgagatcatccttttttgtttctctttatagggatcgtccattatatcttcatgttcagggccagacacgggaattagtggacagtaagtaatgtttttggctcacgtagcactttttgtgaagagcaaagtacagggctctgtatagcaagttggcaaagtgtccctgatggctgttctaacccttgttcatgaactatacacgaatttgtatgggagtttagagggatggagagccacatatttgggtaacgtataaagcagatttacggtgaataattgaacactggcctgcctgggcactagtcagttcattccattcagttttactgtctgtgtttttctaaggagctgtaaaccggatcaaagaaattatcaccaatggagtggtaaaagctgccacaggaacaagtccaacttttaatggtgcaacagtaactgtctatcaccagccagcacccatcgctcagttgtctccagctgttagccagaagcctcccttccagtcaggggtatgttttggggagggatcgttaatagcattatcatttctataaaaatgatatgtgctggccaggcacagtggctcattcctgtaatcccagcactttgggaggccaaggtgggtggatcatttgaggtcaggaatttggaccagcctgaccaacgtggtgaaaccccgtcacgaacattacccgggcatggtggcaggcacctgtaaccccagctacttgggaggctgaggcaggagaattgcttgaagccgggaggtggaggttgcagggagctgagaccatgccactgcactccagcctgggccacagagcaagactccatctcaaaaaaaaaaaaaaaaaaaaaagtgccaagtaatacatacaaagaaaaaaaaatcgtgaaattccaaattccaatcccgaaagttacctgccataggtattctgtttgtgtgttatccagctctccacggtataatgaacacctgatcacacatttcttcatattgatatattctagaaaggagattgatagagcagaaggtatacatgttgtacattttgaagttagtggttttaatttgtatttgtaaacttgatgacaactggaggactaagaaggctgagtctgatgaagtaagactttgctgatacattcctcctagaaaaaagggttggagagagcagccttcactgaagagtatcacagggctgactgtactacccaacactctaccccagttttacaggagactgtctttgctataatttcttattgacttatttcaaagattgaggatttaattatatattctgtttaatctgaagtattctgttcttcctacagatgcattatgttcaagataaattatttgtgggtctagaacatgctgtacccacttttaatgtcaaggagaaggtggaaggtccaggctgctcctatttgcagcacattcagattgaaacaggtgccaaagtcttcctgcggggcaaaggttcaggctgcattgagccagcatctggccgagaagcttttgaacctatgtatatttacatcaggtatggatggatagggcaggggacatgtgaattcttgtcaacttgttggtacagtcaggagtgattcagaaggagcaagagaaaactgggtgtaattaatagtaatgagggatttagataaatgctaggagtaattactttataattagttaaagaaattgtagaattggggcacggtggctcatgcctgtaatcccaacacttctggaggccaaggcgtaggaccacttgagcccaggagtttgaggccagcctgggcaacatagcaaaaccccatctctccaaaaaaattttaaaaattaggcgggcacggtggctcacacctgtaatcccagcactttgggaggccgaggcgggtggatcacgaggtcaggagatcgagaccatcctggctaacaaggtgaaaccccgtctctactaaaaataaaacaaaaaaaattagccgggtgtggtggcaggcgcctgtagtcccagctactcaggaggctgaggcaggagaatggcgtgaacccgggaggtggagcttgcagtgagctgagattgcgccactgcactccagcctgggtgacagagcgagactccatctcaaaaaaaaaaaaaaattagccaggtgttatggtgtacaccttaatcccagctgctcagtaggctgaggcaggaggatggcttgagcccaggagattaaggctgcaggtagctgtgtttgcaccactgcactccagactgggtgactgagtgagaccctgtcttaaaaaaaaaaccaggtgcggtggctcacacctgtaatcccagcactttgggaggccgaggcaggcggatcacttgaggtcaggagttcgagactaccctggccaacatggtgaaaccctgactctcctaaaagtataaaaattagccaggtgtggtggcaggcacctataatcccagctattcagcaggctgaggtaggagaattgcttgaaccctggaggcggaggttgcagtgagctgagactgctccattgcactccagcctgggcaacagagcaagactccatctcaaaaaaaaaaaaaaaaagagaaattattgaattaggagacggaattatctctttagtattcaagtcctttggttttgtacaagtctgtacaaaagtgaatcttggcctgtaatcccagcactttcagggccgaggcggatgaatcaggtcaggagattgagaccatcctggctaatacagtgaaatcccgtttctactaaaaataaaacaaaaaaattagccaggcatggtggcaggcgcctgtagtgccagcaactcgggggctgaggcaggagaatgacgtgaacccaggaggtggagcttgcagtgagctgagatcgcgccactgcactccagcctgggcaacagagcaagattctgtcgcctcctgcctcagcgtcccaagtagctgggactataggcacccgccaacatgcccggctaattttttgtatttttagtagagatggggtttcaccgtgttagccaggatggtctcgatctcctgacctcgtgatccgcctgtctcggtctcccaaagtgctgggattacaggcgtgaaccaccacgcccggccaaaaaaaagcaaatcttaaagtgagctgtgataagtctgaaataattttcatttaaacctatgtcaatattaatacgttttatagtaattttatgaactttaaacatttttatatcgagaagtaccattactcagagaaagactaataaaatatttgtggtaatgatagtggttatatcttaaaagacttatgttttgtgtttctgttttgtgattttcagaggcctagatttgagctacagtgaatgtattaatgtagatatgtaaaatagcatggaaaatgaaagcagaattctgcatcttttatttatttttctctcctttgaattcctggttatttctttgcagtcaccccaaaccagaaggcctggctgctgccaagaagctttgtgagaatcttttgcaaacagtgagttgtatttgtctgatactcattcagaagagcaattgccattttggagtatgtcttagctgtttctttcacctgtttagtttcctagtactgctataacaagttatggcagttgggtggcttaaaataacacaaatttattctatcacagtccaggaagcagagtctgaaatcaaggtgctggcagaattggttccttctggagtctttgagagagaaatcatcccatgcctttcctctctcctagcacctggtcattgtgttggttttctttggcttgtattagcataactccagtctgaagtaagggtagaactataataatttaaaaccagttagacatgtttgggggatgattgctcatttgattatgcattctttttattctataaacaaccaaaagttaaaccttaggactgtcttttttttttttttctgtcgcccaggctggagtgcagtggcgggatctcggctcactgcaagctccgcctcccgggttcacgccattctcctgcctcagcctcccaagtagctgggactacaggcgcccgccactacgcccggctacttttttgtatttttagtagagacggggtttcaccgttttagccgggatggtctcgatctcctgacctcgtgatccgcctgcctcggcctcccaaagtgctgggattacaggcgtgagccaccgcgcccggccaggactgtctttatagcacttagaggaaatcaggttttgcactgaatatgttcaaccttgtgttctctggtgccttattgggtagctcatggttggtttttttgtttgtttttttacttttgtacatagcacctgatttaccaacccttgtaccggataattttcttgactatttcccatctttgttggtacttgaggttatggacttaataatatataggaaggaagtatgaggaaaatacgaaacccttactaaatgtgagctccttgaggaaaagtcacccagtaaatgtgaatgaattgaggtctcaccagttatactaacaacttggaaatttcctagttacttaatttctgtggctttctaaatgattctgtaccccagaattgagtatggtttaggggattcaggattattctcctaattcccaaaattggcttaataatttatagatttgccttattaaaatgttgaggtgggttggacacggtggctcatgcctgtaatcccagccctttgggaggccaaggcgggcagataatgaggtcaggagttcgagaccagcctggccaacatcgtgaaacccccgtctctactaaaaatacaaaaactagctgggtgcggtggcacgcgcctgtagtcccagctacttgggaggctgaagcaggagaatcgcttaaaccgtgaaggtggaggttgcagtgagctgagaccatgccattgcattgtaccctgggtgacagagtgagactgtctcaaaaaaaaaaaaaaaaaaaagatttgcagtgatacaagatcgcgccactgcactccagcctgggtgacagagcaagactgtctcaaaaaaaaaaaaaaatgtgggttaaacaagtttaaatttgattggaacattggtagatatattttaattcctaatggctttggtcctagaattatgtaatcagacccttgtaaatgcacagcttcggctgtcccatgttaatttgtttccccctctctttcaggttcatgctgaatactctagatttgtgaatcagattaatactgctgtacctttaccaggtgtgtacatcttgaagtgtttaaaaaatattttgctagtgatagttatgtgtaactatgatacttgaggctagactgtgccagggcactattaatgttccctttaatttagggtaatttggaaagccattcatgcctcagtatttttcttccctagatattaagtttaatattcagctaaattgtctcattctgctgcagctgattaaacactttttttcttccccctcaggctatacacaaccctctgctataagtagtgtccctcctcaaccaccatattatccatccaatggctatcagtctggttaccctgttgttccccctcctcagcagccagttcaacctccctacggagtaccaagcatagtgccaccagctgtttcattagcacctggagtcttgccggcattacctactggagtcccacctgtgccaacacaatacccgataacacaagtgcagcctccagctagcactggacaggtaggatgtcaggatatgcaacaacatattactgaatttaggaaaaactggggaaagaggggaagtagtggtattccagaaataaatcatgtgatgtggaatgtctttttcctgctgtcttctgtgttcctaccaccaacctacctgaatattttggattagtgtgtatgtgtgtatgtcatcctgaagtttatattttcacaagtcttgcacaccaaatagctgtttaaagtggggatggtgggcacacttgctataaagggtcagatggcaaatattttaggctttaagggccatacattctctgtcacaactatcacactcggtggttgtagtgcagaagcagcccgtggataatacctcaatgaataagcatagctgttgtactccagtagaactttatttacaaaacaggtggcaggccacagtcatagtttgccatacccttggccattgtttgcctaaccttacctttgcagtgttaacaaagtcctcaaggagaatggggctaccttcaccacacctctcagtaattggaactgagttagcatttcaaatcttagaaggaaacataatctcagcatctggggaggccgaggcaggattgctttagcacagtttgagaccagcctaggcaacatagtgagactccatctctacaaaaaaaattaactggacatggtggcacatacctgtatttcagctacttaagaggctgagatggaagggtcccttgagcctaggaggtcatggatgcagtgaaccaagatggtgccagtgcactccagcctcagtgacagagtgagactgtctcaaaaaaaattttaaaaagcaacattatgtaagagatatataaacttttcaaatgtaaggattataaatgctggtatgtttcttttataacttaagaaatgtatacttaaaaaaattttttttttgagacagagtctcgctctgttgcccaggctggagtgcagtggcgcatctcagctcactgcaagctccgcctcccaggttcacgccattctcctgcctcagcctcccaagtagctgggactacaggcacccaccaccacgcctggctaatttttttgtatttttagtagagacggggtttcactgttagccaggatgatctcgatctcctgacctcatgatccaactgcctctgcctccccaagtcctgggattacaggtgtgagccaccgcacctggccacaatttcttaaatcatgaaagtagaattttaggaaaagagtagatgtctggataataatctggatggattatatatactggtcttggaggcaggggagagacttaatgagagcatggtaatggatttatggtgggtccttctctgtgggcctctcatagtgtacccatgccatagcaaatggcagcctcgaaccattgcccagtccccttacctgtgggctgtgagcactgaagggggttgcacagtgtgtaacaaaaaagctatgaactaaattttatttgtggtctctagtcaaatttattttattttatttatttattttatttttgtttattattattttttgagacagaatctcattctgtcacccaggctagagtgcagtggcaccatcttggctcactgcaagctccgcctcccaggttcacgcgattctcctgcctcagcctcccgagtagctgggactacaagcgcctgccaccatgcctggctaattgttttgtatttttagtggagatggggtttcaccttgttagccaggatggtcttgatctcctaacctcgtgatccgcccacctcagactcccaaagtactgggattacaggcgtgagccaccgcgcccggcctaatgtttgtatttttaatagagatggggtttcaccattttggccaggctggtcacaaactcctgacctcaggtgatccgcagcctcggacttccaaaatgctaggattatggtgcaaggattacaggcataagccaccgtgcccagccaaaattattttaatttttatatttagacagctctgtaggtctctacttttgaaggtcagtcctttgtaattgggaagcaatacagcagagtggttaaaagcagggagttaaggcagccgcagtggctcatgtagctgtaatcccagcactttgggaggttggggcgggtggatcacttgaggtcaggagttcaagaccagcctggtcaacatggtgaaaccctgtctctgctaaaaatacaaaaattagctgggcgcggtggcaggcatctgtaatcccagctacttgggaggctgaggcaggagaattgcttgaacccaggagtcagaggttgcagtgagccgagattgcatcactgcactccagcctgggtgacaagcaaaactcaaaaaaaaaaaaaaaaaaaaactgggagttagaattagattgacagggttgatcttgctttcccatttttgagctgtgtgatattgggatgtaacttgccctgtctagggtttggttttccttagatgtaaaatgggcacagtgataaaaatctcagaggtttgcaaggattaagtaagatgatccaatctgtcagtaaacgttagctgtgttattaatacagtcagccaccttacaacgttttagtcagtgatagactgcacatatgatgcttgtcctgtaaaattatagtagcatatttttactgtaccttttctacatttagatacacaaatacttaccattgtgttacagcattcagtacagtaacatgctatacaggattgtagcctagaagaataggccatatcgtatagcctaggtgtgtagtaggctattttcatctaagtttgtataagtacacatttgttaaatgacaaaattgccttgcagtgcatttctcaaaacatattcccactcagcgtagtggctcacacctgtaatcccagcactttgggaagctgagacagatggatcacaagtacaaaaaaaaattagttgtgcatggtggcacgtgcctgtagtccctcggcaggctgaggcaagagaatcgcttgaacctggtaggcagaggttgtagtgagccgagttggcaccattgcactccagcctgggagacagagcaagactgagactctgtctcaaaaacaagacaaaacaaaacacgtattaccattgctaagcaatgcatggctgtatagagttttctcttcagacctgcctattcctctgtaatatatactgtcttctgataccccttattcctttttggaacaacatcttcaaacattagacttaatcttgacatagtagcttagtgataactaagggagtggaagatgaaattgcttcttccacaagcattagcagcatttataaataacagaaagcttattacagaaagctaatcacatcgactgtcagtggttggagttctgtttgttaatggtcatgtttactcctagtagcccaaatgcataacagagttttcttaaaagttcaaagcactgtatataggttgtcaatttcatgtttccctaggatgaaggtgagaaggcttaggtgataatgttaccaaattatacatgaaggaaactaaggacctgaagatgcaaaattcatatgatacttattgatccttaaagtatattgtaatcattgtttacttattccttgggcattctcacactttttttcttccttggtttgttttggtcccagagtccgatgggtggtccttttattcctgctgctcctgtcaaaactgccttgcctgctggcccccagccccagccccagccccagcccccactcccaagtcagccccaggcacagaagagacgattcacagaggagctaccagatgaacgggaatctggactgcttggataccaggttaaataaaataccctgttttcctatcttcaccttattcttctactatattctccctttaaaaaagataaattcacatcattctcccagtactaggatttctgctttctggaattcattttggttaggttttttatcctattcaacagactcttgaaagcctctgagagttcttactttcttatacatctcactcaaagctcttgatctaccagtatgtggtttgtatttaaaaccttggctttcagtggtgctctctcttttaccctccacctaaaaaagagagtgatatctccctccagtctccccacccctcaagactgctagaaaaggagtgattctgtacatgtaattgtaaagttagccactaaagttaaaaagattcttaatttgtagttttggtgcaattttatcagaagtacctttccattttgccagaatccttgaatcattctttaaaccaaagcatttttttatagtttctagctaggtttatagaaactagtggagctatgggcagtcagttaaaaacaggccatagatagcataatgaattataacacccctgtccaagtcctatagagaaaaaaaaaaatccctacttttgactacagttacacagcagatcccaaagagctttgtagtagtttaacgtactacaacttatcagaaagatgaggcacttgacagttacattaaggagctaaagtcaatacggcagttgtagatttgctaatgccactgtatttttctgctcatagcatggacccattcatatgactaatttaggtacaggcttctccagtcagaatgagattgaaggtgcaggatcgaagccagcaagttcctcaggcaaagagagagagagggacaggtaagttggaataattatgcaaatgtattcagatgttatttgtttgcaccattagtgagagtaatgatcattgctatgagcttaagtattctgaaactgaaatgaaatctttgaatcaaatatgcttctgtttgttgtaattgatgcaatgaagtaaaatatgataggccttttacagatttagaagcagttatattcggttttgaataatttattacttgttcagacatctttcttgacttccattgtctgcatcttggccattttcctaagggtagacagtaacagaaatgttacataattcagctatttttgctactttagagtcattagaatatcatggatggaagtacatgaatgtgggagttcagcctgccacacagtgcttgaattttcctttcttatattagtatattaaccttcataagaaaggagctgatatctttctataacagttcattcgatttttgtcatggcaattgctgtgtagacaggccttatacttttataaaggggctgggggaaggtggaaggggttgaaattaatggttaaaatgaatttgaaggattgtctgcagacataattgcacttctaatccactggataagttaagaaaatttaaattgtctgaaagaaagtttcattttgtttttcaataggcagttgatgcctccaccagcctttccagtgactggaataaaaacagagtccgatgaaaggaatgggtctgggaccttaacagggagccatggtgagtgtgatatagctgggggaacaggggagtggctaagactggtctaaagctattagttttctcagccgggcgcagtggctcacgcctgtaatcccagcactttgggaggccgaggtgggcagatcacctaaggtcaggagttcaagaccagcttggccaacatagtgaaatcccatctctactaaaaatacaaaaactagcgggcatggtggtgggcgcctgtaattccagctactcagggggttgaggcaggagaatcgcttcaacctgggaggcagaggttgcagtgagccaagatcagaccactgccctccagcctgggcaatagagcaagactccatctcataaataaataaatacataaataaagctattaattttctaacctgatgttcattcaggtgtttaatccaacctctataatctgttggccagtgaaaatacttttgggctgggcacggtggctcacgcctgtaatcccagcactttgggaggccaaggtgggcggataacctgaggtcaggagtttgagaccagcgtggctaacatggtgaaaccccgtctctactaaaaatagaaaaattaagctgggcatggtggtgcatgcctgtaattccagcggcttggaaggctgaggcaggagaatcacttgaacttgggaggtggaggttgcagtgagccaagatcacaccactgcattccagcctgggcactagagtgagactctgtctcaaaaaaaaagaaagagaaagagaaaatagtttctaaaaaattgtatacagacaaccttttatttccaacaaacgtgtgccgagagagagagagagaaaatagttttaaaaaaattgtatacagacaaccttttgtttccaaccaacgtgtatctagaaaagagttagtcgacttattttatacatagcatcagtgaatagtaatgagtggtaggtcatttcaaaatcctgttgcctatattatgtgaataccaggaggtcatctgatacggacttaataaaggttgattttgctttatattgggagctgagccacacctccccttataactctattggtcagtaatggtcagtttgtggctgttaggaaaatgttgccttttagcattccagaactctaaatcctgtagaggtacatgggatattttattctttgcctgtactcataaaaatgaacagaagaaaatacgtttttttcttttcttaacttcttttcttttaactctttaaaaggtgaaatatcagccctcaagagactcacttgctaactttcctttttttctttttttttctttttttgtgtttcttttttctttctctgttttcttacatggttctggtggattcacatttgctgatgctggtgctgtttttcgtgtgatcttcaacgtttttgggtgaccattgaccctgtgacctcaaaatggtgtccaactaaccacttaaaattaacatcttttttttaattaacgaatttatggtatttttttttttcccttggcggggatggggttggggttgttttttctctattctagattatccagccaagaagatgaaaactacagagaagggatttggcttggtggcttatgctgcagattcatctgatgaagaggaggaacatggaggtcataaaaatgcaagtagttttccacagggctggagtttgggataccaatatccttcatcacaaccacgagctaaacaacagatgccattctggatggctccctaggaaacagtggaacagagttttgaccctcagtgactcttcttagcaataatgcatgcatttgatttaacaagactctggggcctgtgctgggaaccatctggacctttgcagaagttagagattcagtgcccccctttcttaaaggggttccttaacaaccacaaaaatccttatttctgcagtggcatagaatctgttaaaatttaattagaatcacaaatttatctcagaagctttttaacagttggtgaaatgtgcttgtccaacaaagcatcctaacagggtcgttcccatacacatttgacctggtcagccttttccaggtgaatagccccagttctgacataaagaaagttttatttgtattttactactgtttggtcaattttgatatataactggttacaaacagagccttactatttattagtggggaaatgattttaagaccgtccttttcagtatttaattctgacagatctgcatccctgttttgttttggattatttctgttttggaaaatgctgtctcatttaaaactgttggatatagctggatcctggataggaaaatgaaattattttttcattgtgttttttaattggggtgatccaaagctggcaccttcaggcacattggtctcatagccattactgtttttattgcccttctaagatcctgtcttcagctgggtcagagaaaacttcttgactaaaactggtcagaactcatcacagaaatgaaatacagtggtctctctctcccagaactggttgcagctaaaacagagagatctgactgctggctataggattttggacttaatgactgaaattgcaaattgtcctttttcttggcattacagattttgccaaaataactttttgtatcaaatattgatgtgtgaaagtgaaggagctagtctgctgaaccaggaatagtttgagatattgaactgtcatttttgcacatttgaatactttgcaggctggctttgtataaacttatcctctggtttcctatatgttgtaaatatttagaccataatttcattataaataaatctataaatattctg

SEQ ID NO: 10178 - DNA, 945 bp, Homo sapiens
cgggcgccggtggcgccatcttactcggttgcgggaggggtcacaggtcagtgccggagcctccgcgagtgaaggaagacgaagtgcgtgacccgaccggctgtggtgttccagtccccactgaccagtaggagcagcagggcgtcggcttgtgaggtagaggggtggggagtctggcggcggagcagcagctgggggtggggagggggttcggaggagaatggggagggggcggaacctctgggtaccgcagacgtgagagaacccctgcggcctaaggggccgcatccctttcttcccaaaactttctccttgtccctactgtgccgagacgtaaatttatttgtatctttttatttttctctttggaaaaagtaaaacctgtgatgtgtcatgtgactgaactgtctaggagggagggtgaagatgggggggtttcttagggccacccgaaagggtgcagtggtgagcaagagggacaggccagagtaagagggacaggccagaatatgtatggaaaggtaaggcactggcttgagggctgtcgccgtggtgtctccatcctggattaagcatttcctcctccttttctaggtggcttttcctcggggcaaccgaggaaggccccaagaggacaatggattctggaactcgcccagttggtagctgctgtagcagccccgctgggctctcacgggagtacaaactagtgatgctgggtgctggtggtgtagggaagagtggtaggtaacattttccatttgacaggaagcatggatgaaaagtacttaaatgaccagatgggatacttgctatcttgcaatgttaatacttaaaattctctctgtgggtcacctttgtgaggatttgacttttatttcttcttttgaagccatgaccatgcagttcatcagccaccgattcccagaagatcatgatcccacc

SEQ ID NO: 10179 - DNA, 439 bp, Homo sapiens
tcaaccgttaagtacacagatgccagaacagggtgctccataacctatgcttgatcgcctctccagtactcaaccggctttttagcgtcccattcttaaacgctccagcaagatgagcagcttatcttcttcgacctttgcttaatatacaactctatcatacatatttgcctgcgtacctgccttgccacattgagagtaccagaatggcagggcctgcggcttattcatctttttatttttatattccctgcttggtgcacagaaatgaagcaaacaaacagagaaattctccaaatgatctttgcaacgaatccttttccttttcctaagtaacagaaacgtgaaacgggcaaaagccgcgggaaggctgtctccccagacagaaactaggactcaacacaaacgtagcggaatttgaggagaaacctgtttaatc

SEQ ID NO: 10180 - DNA, 2796 bp, Homo sapiens
  SITE (59): n equals a,t,g, or c
  SITE (941): n equals a,t,g, or c
acccgggctgggcgggggagaggaatgggcggggcagggatgtcgccagagtgcggggntccggtgcggacttcgagcacgagccctaaagacgctcagcactcgtcgcttctcctagcagaccctgcccggcttggcgatggagtttccggacctcggcgctcactgttcggagccgagctgtcagcgcttgggtgagggcggagcgcgcgagcgcggggcccagcggacagggactttgaaccgcaagttgcaagcgaaggctgggctcccagactgcaagtgccatcgggcggggcttgaagctaggcgggcctagtcagcggcagaggtggcctggccaaggagataatgggcttgggaaggggcggtgtgtcgaaaatagggtggcgttttccttcccgagtggaagacttgagtgagagagaaggacatgcgagtcccgctggacctgcaatccgaccaactctttgcagattttctgccgcttaagtgtgatgcctgctcaggcatcttctgcgcagaccatgtgcctacgcccagcatcactgtggatctgcttaccaaaaggtgagggggcgatcctcagggtgaaagcaggcagatggagaatgcgtgcagaatcccccaaatctgtgtctcacgtttcttctcccttttgtccttctgaggctgtcagtgctgggaaacactgtttttttgcgtgtttgtggtgggtcatatccaagttctttcaggaccagagatttgttggactggagtgggccacagactgacccttgctccttgactacaggatatccaggtacctgtgtgccctctctgtaatgtgcctgtgcctgtggccagaggggagccccctgaccgtgctgtgggagagcacattgacagagactgtcgctctgatccagcacagcaaaaacgtaaggtaaacattgtanggggtcagccacaacccagctgggactacggatgcctggaaacccaaacagctaatcagagtctcagcagagacaaccttctcacttcacctcagatcttcaccaataagtgtgaacgcgctggctgccggcacgagaaatgatgaaactgacctgtgaacgctgtagccgaaacttctgcatcaagcaccggcatccactggaccatgattgctctggggaggggcaccaaccagccgggcagggtaatggcagccaagtcctccacttgcttttgggaagcattcttttggaactgactcaagctctgttgttataaattggggagcttcaaccctaccctgtcggctaggggagtcttttagcttccttttcaagtgcatgtttttccagaactcccctcctgacttcctgggtaaggctagttcttggagacatgccaaaaatctctcttccctacagacttgctgccatctccagagcacaagctgtggcttctacaagcactgtccccagcccaagtcaaaccatgccttcctgtacctctcccagcaggtaggcctgcccgtttccctgctccccctttttccccttcacacctctgacctccacctcttcaatgtctgtcgtagagccacaacccgatctccgtcctggacagcccctccagtgattgctttgcagaatggcctggtgagttgggcagaggttggatggacagaaacaaacacacagagagtgaagtccaaggacgctggtcttctttctccctttgtagagtgaggatgaagctctgcagcgggccctggaaatgtccctggcagaaaccaaaccccaggttccaaggtaccttaccctcttgtgaaagagagcgcaagctgtgggcaagggcttggtctggaggcaggtaggtgggaccactctgacacaatgcaagataatcgctggcaacttggtctcaaaattaagatgaactatatgatctttgacaagttatttaacccatggagccttcatttcctctataaaacggggacaatactaatacccaccttgtagtgttgctatgaagattgagataatcctcagcagtgctcagcaccatgaggcccaacacacacagatcagatgttcaaatttcagatcttaccatcatccaacttaaactgtttctccctcccagttgtcaggaggaagaagacctagctttagacaagcactgtcagccagtgaggcagaataccagcggcagggtatgaggctgggctgaagatatatgctgcagtggaagggaggaagaagtcagggatgggggttcttcctagtggtgcagagttttggaatggtggttatcgtctggttttcagtatgactccagcccatgctgagctctgaaatgagggctgtccctcatttccttgacgttgcactgtgtcttcccctccttcccctctctttgctctaggcccagagccgcagctcgaagccgtccaactgcagcctgtgctagggccctgggcttggggagggaggttcacctgaggaggactgtggccctcacacctctagggtacacagggagaggaggcccggagcaccctggagggcagagacaagcgggagtgatgtggaggtcgccctgggagcctctggaaggccttgctagtgctccagctgcatggaagagagcggctagcaactgttccctggttgggccctcagtggatgctggccaggccctactcttagccccttcatcatgtcatctcccttatgctggagctgccccgatgtggagtgggcaggaaggggcctggaaaaaataaaggatcttggcagttgataaaacgtacaa

SEQ ID NO: 10181 - DNA, 894 bp, Homo sapiens
tcctcgcacagtccacatttttatttccccaaaagatgtttttcggaaaggtccctttcccttaccatagctagcaccataccccaagaccaggatgaaataagccagggaaaggagacacatcttattcccttctgggttagtctttgagagggaagtggccaaacttttgtcaccgttccatggtctgaggcttagtgtcttcagaggtttcttcctgtccctgctgcagctgccacatgtcagcatacaccccacctcgggacaacagagcctcgtgtctggggtgaggagaaaagtgtgagtcctaaccattagttttaccccgagggtccttgccaccagcccacagagaggacgggatgggaagggaggtcccctccagaagcccctgggacttcatgccccctttcctggagcccccaattcagaagacctgtccttttgatctatgtgtctcttaccgtcccctctccacgatgcagccatccttgatgacgaggatctggtcagcattgaccacagttgagagcctgagaagtcaaagatcagtcgcctactaccccacccaaagcgggccacatcaccagccgccccaggcctgtagtcctgtacctgtgtgccactacgatggtggtgcggttggcacagactttggccagagaagcctggatggccctctcattagatgtatccagcgctgacgttgcctatagagagggtccaggtaaaactgctcctgccactcaaaaccctcaatggaaggaggcaggctgctggctgaggcctcaagaatacacaagagccttgtttgggcttgagaactggaaagtgtgttttgtgagatttgaattcatggtatctgttctaggtggggacagtgcccaggaggaa

SEQ ID NO: 10182 - DNA, 147 bp, Homo sapiens; identical to SEQ ID NO: 9166

SEQ ID NO: 10183 - DNA, 3445 bp, Homo sapiens
aggactcagtggtctttgaggatgtggctgtggacttcaccctggaggagtgggctttgctggattctgctcagagggacctctacagagatgtgatgctggagacctttcagaacctggcctcagtaggtaaggatgacatcattccttccttcacgtagttattgagagaacaagtatttcttacacatcagacctgttccaaggcttggaatgtggaaagggaataaattggtaaataagacagacatagtcacagctgtcatagagctagaatgtaatgtttttccatgagaatgagaatctgtatttcagctttttatttttgtagagaaagctcccttcatgtcgtcattgtggatatagctttgataggcctagtgaaatttgtttgtgcaagccagtgaaaatttgatttttttttttttttttgagatggagtctcactctgtcgcccaggctggagtgcagtggtgtgatctcgactcactgcaacctctgcctcccgagttcaagcaattatctgcctcaggcgcccaagtagctgggattacaggcgagcgccaccatccctggccaatttttgtatttttagtagagacggggtttcaccatgtcagccaggctgctcttgaactcctgacgttgtgatccacccgcctcagcctcccaaagtgctgggattacaggcatgagccaccgcgcctggccgtgaatttttttttttaataatttttctatgcttactaatactgtgttgattgagttgcttacctttttgaccattttgtgtttaatgaagtcctgagatagctaaactcctcagtgtcgttttccgctaacaagtgccttcttatatgatttgtttactttttggtttcagatgatgaaactcaatttaaggccagtgggtcagtttctcagcaggatatttatggagagaaaatacccaaggaatctaaaatagccacgttcaccagaaatgtttcctgggcctctgttttaggaaaaatttgggacagtcttagcatcgaagatcaaaccacaaaccaggggagaaatctcaggtgagttgcactcacaagagaacatagtatttcaggagagaatcttagtctgtcattaaactttaaaaaagcaagcaaacagaaaactcatccaagcctagctccaatttgtttaatccacagaatttttacaaaaaaatatttctttaaatgtgacatagacagtgagtgacattagaaacataattcagatggaaaccattatcaagaaaccctaggccaggtacggtggctcacacctgtaatcctggcactttggaaggctgaagtgggcagatcacttgaggacaggagttcgagaccagcctggccaacatggtgaaaccctgtctctactaaaaatacaaacattagcagggcatggtgccgcaggcctgtaatcccagctactcgggaggctgaggcagaattgcatgaacccaggaggcagaggttgcagtgagctaagactgcaccactgcactccagcctgggtaacagagtaagactctgtctcaaaaaaaaaaaaagaaagaaagagaaagaaaccctatacataagaaacactgttttaataatggcagtggtcaaaccatcttccagggcattcagtttatttcattttcagacagttcccatggggtgaaaaacctatgctttcactgaaaatggttaagatgcagtcctaatcctaataaatactaacaaatcattattaatcaaaccaataacatgcttctcatttttagtagaaatcatgggttggagagactctgtgaaagtaatgatcaatgtggagaagccctcagccagattccacatcttaatctgtacaagaaaattccacctggagtaaaacagtatgaatacaacacgtacggaaaagtcttcatgcatcgccgcacatccctcaagagtcccatcacagttcacactggacacaaaccatatcagtgccaggaatgtgggcaggcctacagttgtcgttcacacctaagaatgcatgtgagaacccacaatggagagagaccctatgtgtgtaaattatgtgggaaaacctttcctcgtacttcctccctcaatcggcatgtaaggattcacactgctgagaaaacctacgaatgtaagcaatgtgggaaagcctttattgacttctcaagtcttactagtcatctcagaagtcacaccggagagaagccatataagtgtaaggaatgtgggaaagctttcagttattcctcaacgtttcgaagacacacaataacacacactggcgagaagccatataaatgtaaggaatgtgcggaagcctttagttattcctcaacttttcgaagacatatgatttcacacactggagagaagccacataaatgtaaagaatgtggggaggccttcagttattcttcggcttttcgaagacacatgataacacacactggagagaaaccctacgaatgcaaacaatgtgggaaaaccttcatttatctccagtcctttcgaagacatgaaaggattcacactggagagaaaccctacgaatgcaaacagtgtgggaagaccttcatttatccccagtcctttcgaagacatgaaaggactcatggtggagagaaaccctatgaatgcaaccagtgcgggaaagcattcagtcacccctcctcctttcgaggacacatgagggtgcacactggagagaaaccctatgagtgcaagcaatgtgggaaaactttcaattggcccatatctttacgaaaacatatgagaacacatactagagagaaaccctatgaatgtaagcagtgtgggaaagccttcagcttgtctgcttgctttcgagaacatgtgagaatgcaccctgaagacaaatcctatgaatgcaagctatgtgggaaagctttctattgccacatatccttacaaaaacatatgagaagacataccgcagagaaactctataaatgcaagcagtgtgggaaagctttcagttggcctgaacttttgcaacaacatgtgagaacgcacactgtagagaagccctatgaatgtaaggaatgtgggaaggtcttcaaatggccatcatctttaccaatacatatgagactgcacactggagagaaaccttatcaatgtaagcattgtgggaaagcattcaattgttcctcatccttaaggcgacatgtgagaatacacactacagaaaaacagtataagtgtaatgtaggacatcctcctgcaaatgaattcatgtgcagtgcttcagaaaagtcacaccaggagagagatctgatcaaagttgtaaatatggtgttgcctttatgagttccttatcctgaaagtggacactcaaggagtgtgtctgtagttcatttgcaaataaacatttagttgaaaaataa

SEQ ID NO: 10184 - DNA, 3446 bp, Homo sapiens
aggactcagtggtctttgaggatgtggctgtggacttcaccctggaggagtgggctttgctggattctgctcagagggacctctacagagatgtgatgctggagacctttcagaacctggcctcagtaggtaaggatgacatcattccttccttcacgtagttattgagagaacaagtatttcttacacatcagacctgttccaaggcttggaatgtggaaagggaataaattggtaaataagacagacatagtcacagctgtcatagagctagaatgtaatgtttttccatgagaatgagaatctgtatttcagctttttatttttgtagagaaagctcccttcatgtcgtcattgtggatatagctttgataggcctagtgaaatttgtttgtgcaagccagtgaaaatttgattttttttttttttttttgagatggagtctcactctgtcgcccaggctggagtgcagtggtgtgatctcgactcactgcaacctctgcctcccgagttcaagcaattatctgcctcaggcgcccaagtagctgggattacaggcgagcgccaccatccctggccaatttttgtatttttagtagagacggggtttcaccatgtcagccaggctgctcttgaactcctgacgttgtgatccacccgcctcagcctcccaaagtgctgggattacaggcatgagccaccgcgcctggccgtgaatttttttttttaataatttttctatgcttactaatactgtgttgattgagttgcttacctttttgaccattttgtgtttaatgaagtcctgagatagctaaactcctcagtgtcgttttccgctaacaagtgccttcttatatgatttgtttactttttggtttcagatgatgaaactcaatttaaggccagtgggtcagtttctcagcaggatatttatggagagaaaatacccaaggaatctaaaatagccacgttcaccagaaatgtttcctgggcctctgttttaggaaaaatttgggacagtcttagcatcgaagatcaaaccacaaaccaggggagaaatctcaggtgagttgcactcacaagagaacatagtatttcaggagagaatcttagtctgtcattaaactttaaaaaagcaagcaaacagaaaactcatccaagcctagctccaatttgtttaatccacagaatttttacaaaaaaatatttctttaaatgtgacatagacagtgagtgacattagaaacataattcagatggaaaccattatcaagaaaccctaggccaggtacggtggctcacacctgtaatcctggcactttggaaggctgaagtgggcagatcacttgaggacaggagttcgagaccagcctggccaacatggtgaaaccctgtctctactaaaaatacaaacattagcagggcatggtgccgcaggcctgtaatcccagctactcgggaggctgaggcagaattgcatgaacccaggaggcagaggttgcagtgagctaagactgcaccactgcactccagcctgggtaacagagtaagactctgtctcaaaaaaaaaaaaagaaagaaagagaaagaaaccctatacataagaaacactgttttaataatggcagtggtcaaaccatcttccagggcattcagtttatttcattttcagacagttcccatggggtgaaaaacctatgctttcactgaaaatggttaagatgcagtcctaatcctaataaatactaacaaatcattattaatcaaaccaataacatgcttctcatttttagtagaaatcatgggttggagagactctgtgaaagtaatgatcaatgtggagaagccctcagccagattccacatcttaatctgtacaagaaaattccacctggagtaaaacagtatgaatacaacacgtacggaaaagtcttcatgcatcgccgcacatccctcaagagtcccatcacagttcacactggacacaaaccatatcagtgccaggaatgtgggcaggcctacagttgtcgttcacacctaagaatgcatgtgagaacccacaatggagagagaccctatgtgtgtaaattatgtgggaaaacctttcctcgtacttcctccctcaatcggcatgtaaggattcacactgctgagaaaacctacgaatgtaagcaatgtgggaaagcctttattgacttctcaagtcttactagtcatctcagaagtcacaccggagagaagccatataagtgtaaggaatgtgggaaagctttcagttattcctcaacgtttcgaagacacacaataacacacactggcgagaagccatataaatgtaaggaatgtgcggaagcctttagttattcctcaacttttcgaagacatatgatttcacacactggagagaagccacataaatgtaaagaatgtggggaggccttcagttattcttcggcttttcgaagacacatgataacacacactggagagaaaccctacgaatgcaaacaatgtgggaaaaccttcatttatctccagtcctttcgaagacatgaaaggattcacactggagagaaaccctacgaatgcaaacagtgtgggaagaccttcatttatccccagtcctttcgaagacatgaaaggactcatggtggagagaaaccctatgaatgcaaccagtgcgggaaagcattcagtcacccctcctcctttcgaggacacatgagggtgcacactggagagaaaccctatgagtgcaagcaatgtgggaaaactttcaattggcccatatctttacgaaaacatatgagaacacatactagagagaaaccctatgaatgtaagcagtgtgggaaagccttcagcttgtctgcttgctttcgagaacatgtgagaatgcaccctgaagacaaatcctatgaatgcaagctatgtgggaaagctttctattgccacatatccttacaaaaacatatgagaagacataccgcagagaaactctataaatgcaagcagtgtgggaaagctttcagttggcctgaacttttgcaacaacatgtgagaacgcacactgtagagaagccctatgaatgtaaggaatgtgggaaggtcttcaaatggccatcatctttaccaatacatatgagactgcacactggagagaaaccttatcaatgtaagcattgtgggaaagcattcaattgttcctcatccttaaggcgacatgtgagaatacacactacagaaaaacagtataagtgtaatgtaggacatcctcctgcaaatgaattcatgtgcagtgcttcagaaaagtcacaccaggagagagatctgatcaaagttgtaaatatggtgttgcctttatgagttccttatcctgaaagtggacactcaaggagtgtgtctgtagttcatttgcaaataaacatttagttgaaaaataa

SEQ ID NO: 10185 - DNA, 10677 bp, Homo sapiens
aattaatggaactcgcctatcagactttactagaggcaacaaccagtagtgatcaatggtacgaattctgggttgtgtgaaaatggcaatgacttggttaaatgcatatctaactagatgtttatcaggaaaattagctggaattctttgggttttcatatcctagaagttaatgctttttctggaaacaaaacaaaacaaaacaaaaacccagtgcatcacacagatttatgtctatctctgacttttatttgcaatagcatagatgtttgagcaaggtgtaggaagtaggtgcacttgtatggatggacaaatggatttttttgacattaaaaattgttaatcactttttaacaaaaagttcttcaattgttgttgaatttttactttttatttgaattgaatgatattatatgagaaaacacatgcaaagaacttagaatcctacctggaaaatgattaatactcaaatgtttattattgtgttggcagtgggtaatagttatatcttctattccagcttgctcaggctctttagcttaacattctttttaccttttgaaacccagtccctaattcatttatattttaaatgtttatatttgaagcaataacaatttgttaggcagccaaaggtagaaggaaaagaatggaacatgccaaagatctggcttcactctttcaagatgacttctaatctatattgcattcacgttaccttaaattctactccattatcttatatggaatctgtttttgttcaataagcttcttccctactcctagactaaattgagaagaaaatggcagagcatggaccaagctgattgcagagcaggtttataaaagcttctttagtttgaatctgcatttagcaatttcattcttcctatcctcatagagaaaacagtttcagttagggtttggcccaatcaaattgcatctttagatggactttccaagttcaatttttatcgtgagataacctctttattttattctgctctaggaagaacatgtctcccaagatactttcctagctttaatgaatcattacattcacatgtccattcagagttaattgtaagaaggaagaaatgaatataggagtgactgttggcaaaatgaatataggactgtttcttcacatggcactctcctgaaatatatcagaccagaagttagagatgagggcaatatttcttaaattttttgggaacacaaaacaccaaacagtatttgtatactgactatctatggacattctttccactaaaagtaatagtttttaacaggacaaacaaaaccacagctacaatgcaacaaccccctttttcattatcaaactcaaacagcagctcctgcagcgaaaatgaaataatttaataaggtattataataatcaaatagtaacagggtttttgggtatgacttattttcctaaatatttatgaaatccctgtaagcttttaaggtacgtagcttaagatattcttatgtagaggtaagttacacaaaccttatgtttgccttttaaaagtgcattttaataataatctgtaggtgttttaaggctagatttaaagggcaaaaaatcttgagggctagattctatcctagaaatgttgattcacctccttgcattgaggtaagaaggagaaaaggtgaaagctgaaagtcagactgattctaaaagaaccaagcgagtgcttttattgataccttgccctttgcagagtgtgtcagtgagtaggtgacatttgcttgaggcttagctccatttgttactgaagggatactctgggtactggcagaacagaaattgataaatagaaaagaggctttgggttgaatgcggctcttcttacaatcattaatgcatccaggtgtttggaattgtagtctggttagtaaatactggttgagactatatttccatctagattaatggtgttttccagcaaccaaggcaggtgttctgtgcaactgtagttttagcttatgactctcactgaagatgcacttagtttaaatttttttcttgtttttagtgtattcttaggcatttctgttaagtctatgttttctttttagtgctgttcaacttttctactcagtgaggaatatcttccatttgttccatgatgttgtaccaacatatcacaagtaagtaccactgtatctcatttctatataataattgtatgtctaagatgtggaagttaagttaaaacaaataattttatattcccactaaagatattttgtttactaacattcacactaaaatgcagtaaatcattttaaaacgcatatttaaaggatttggtcatttattactaaattaattagggtattataatcttgcagtgtagttcatgatgcacattttaaaactcaaaagaactaccttgttttgctgctaagcattttcagaactgcctttacttaactttcagcctctagttcagttttctttatttgaattaaaatgtttagatgtttttcataaatatctttgataacatgtcaacaaagctattccttagccaagaactctgaatttcagagacaaaaatctgccaggcacagtggctcacacttgtaatcccagcaccttggaaggcagaggtgggaggattgtttgaggccagaagtttgagattagtttgagcaacatagtgagaccctcgcctctaattaaaacaaagaaacaaaaaaccaaaaaaaaaaacaaaagctgtttactatttaaagtattttttagttcagatttttgaatattgggatgtttttaactaggctcacctgttgtttttattataaaagcttattgtgaaccttattagttttatttgtattctctttactgtggtttaacattcttatttcattttttacttagtcaagcaaaagaaaagagaaaacatatttgcattagctgacagccttgtccttggggatttaaagacaggagtggagttagatttgcctgtctttctccttcgtataacctcggaactttagtgtgcatcagaatcacgtggaagtcttgttaaaacacagattgcttgatccatgcccaaggtttctgattcagtaggtctggaatggggcttggatttttagcaaatttccaggtgatgctgatgttgcctgtcatgggaccacattttgagaaccactgtccttagataacggttctcagctttggcagtatttttatatcgtttcatttcatttcaatttcattccattcatttaatttcatattttgagacagagtctaactctgttgcctaggctggagtgcagtggtgcaatcatggctcattgcagcctcgacctactgggctcaggtgatcttcccatcttagcctcccaagtagctgggaccacaggcacacaccaccacacctgtctaacatatttttgtaatgatagggtctgtatatgttgcccaggctggtcttgaactccttggctcaagtgatcctcctgccttggtctctcaaaatgatggtattacagttgtgagccactgcaccggccagactttgggcagtattttagaataacttatggagctttaaaaatatacatatttactctcttcctagggcatttgatttatgtctgatgtaaggcccaggtgtgtttttttctttttttttaagccccacaggtgattctgatgtgtagctggaaaagaggactatcttagttatcttagtttgttggcttctgacttgtatatcctagttttatattgagttagcaaactagaaactgttaattgaatgactgttagtgggtagatagcagaaatataagacaaaatttcttcccaagctgggtagataagactaatacgtgtagaagaattaaagtagtgattttcaatcctggatgaaaattaaaatcacctgggaagattttaaaacatataaatgctgtgatttcactcttagagcttgtgatttaatttgtttggggtaaagtctaaacatctgtggttttttaaaattcccaggtgactctaatctagtcagtttttgaaaactagtgaattagaaaataattgaacacttcattatatgactgaagtaggaatttggagaaaggtgaagtaaacctgtatttccatagatgtatccgtgtaaaatttcaaggacattattatgcatagctctgctaggttttcagtgcaaaaagttgactcaggcaaacatcttgattcccttaatctttctttattgttaatcaccaggatagttttataggataaaatcccattcaggcagaacagcctccctctgggagtgggagtgatgagattgtatcttgttatgtatagcatttagaaactagacagttattaaagcctagaaatacattagagaagttgtgactttcatcaaccccagcttcagtaacaggtggttgctttgtttttctacccctccttctggcctagggagaaccttcaaaaacttccccagttggctgctattcatcacaacaactgtatgtacattgctcaccacttgctgaccctcgggcatcagttcagattgcgtcttgcccccattctttgtgatggcactgctacttttgtggatcttgtacctggcttcaggagacttggtaactgatactttcaatgtaggaaagcatatggattatgcagcttgtcaacatagtatctttatagtttttgaatgagaaaattagaaattaggtggtggtcctgagctgtatcagaaagtgggagggcatttaatttgcaagtgtttccagttatataattttataaggtgagtgtagtctttgtgggagacttttttacttttttgtaacatgatttcatggtacgttagagttccaaactgcagtcctagtgtgcattgaatttgccaggtcaggattcacataataggatttataatgtgacaattttgtttgtattgttggtaagagctcactaatgtcagtgctagttcttttgcaaaaccccaagacagctcccccatcttacatctcccttagttttacttgggattactaaaagtcaaaagaaatgaaatgtggagtaaatcaatatgttgatcatagcagagaatctatgtgtttcacttagcttttcaattcttgatttttccctagttggtatagatacatcagaataataagtagttcctttttctatagtaatttttcttagctgactcgggctctaagcaaactactggaaaatattatctggagggtggggtttgaggaacgggctaatgtattcaaagtgattgtttctagtagctttagggcagctttatgatattatctagcaattatttttatataggcagaacagatacatggtttatgcatctcttgtctatcctggttttgcagtgtgtaattgagcagcttttaaaattttttattctgtttttccatcatagggacagaatgctttttggcccaaatgcgggcacagaaaggtgaacttctggaaagattatcaagtgctaggaacttttcaaatatggacgatgaagagaattattctgcagcaagtaaagcagtccggcaggtaggaggctcttgctagcactgaaatttgtattctatccttagatgcctttttttttgtttgcttttttaaagcagaaaacaatatgtaacaagtattcagttgattccctgcacccccacctttggaaaatctagataccttttacaatcatgtttaagaactttttcttcccctctcccaccaagacaacacgaaactatcttttcattgactcaataattgcaacttgttacctagaaagtctgttgtggcaagtagttgattcctgaacttagatttgggaatttgaaatattggcttttatcttaatgctcccctttcttaagtgatttatcttttttgctgcagttttcctatcctcaggttgatgagtctgcttttcatctaccagggatatcactatggttaaatgttcaagaagcatatgtccttagttactttacctcattttggcataatgccactttcccaatgaactcacaaatgataaatgtaaatctggaaaatacgagtcacagtaatctttcttccacgtaaatagctgtattcttctacaggtactgcaccaactaaagagacttggaattgtgtggcaggatgtcctgccagtgaatatatattgcaaggctatggggactttactcaatacagcaatttctgaggtcattggcaaaattactgccctagaggtaagggccattagatgctacactagccttgagatgcaattcatgtcccagattgtgactttgctaagaaagtgatgttgaagaaattgttcatgtttcatgtctaactcatgctgtttttttttttttcagttttgttttatatctgttttgctagaaactgtttaatctcttttatatgaaagtaggattgaactatttctcagcctaccatctagattataaatgaggaagttagaaactgggtagtggtcctgagatgcgttgtatagtgtaaagtcatttaatttgcaagtaaactcaataatttgatttagtaaagtgaatgcagtcttgtgcaggttccatttttccaacacactgttgcagtttaaattttacatgtgattcttcaggaaaattgtctggacttggccagctgatgcctctaaatcatagattgactaaatccctatttgtaatcacatcccctgctttgcaacaagctgtgcgacattctattggagaaacaggctctttcatgcaggcaaactaaattactgacaatctgttgaaacatattttgtgtcattcttatatagaagtattgtcagagaactgatgtagtgtctagtaagttgttccaaattggttggaaaacatgttgtagctgacccacctggacagcatgcatcaaagatctgctgccctttccccacttctgagctggcccaattctattctattgtgtttcctctgtgcaaaaccaggacatatctactgaagatggtgataggttatattccttatgcaaaacagtgatggatgaaggaccccaagtatttgcacctttatctgaagaaagcaagaacaagaaatatcaagaagaggttccagtctatgtgccaaaatggatgccattcaaggaattgatgatgatgctacaagccagcttgcaagaaattggggatcggtatgtataacccttctatagaggcatataactctccatagctacaagagagtaatagtgcccttgatagcagggcttttccctgtttcctgatgttagtcatgcaagactttcatattgagtagcagtagctggggccttttcatgatctatcataatgcagatctcattaccactttcccatatttgatagcataaagacttctcatccatattattttggtcttgagtatgtggtttggcatgctgtacaagtgatctggcaactgtaagaattatagccttctgacatctggatggaaattgttgctcactttaaggagcagtggatgcttttttttttttgagacatggtcttactctgtcacccaggttggagtgcagtggctcaatcattcctcactgcagcctcaaactcgtgggctcaagggatcctcccacctcagcctcctgagtagctgggattacaggtgcctaccaccacacctggctaatttattttattttattattttatttattatttatttgttttgttttgttttagagacgaggtttctctgtgttgtccaggctggtctcaaactcctggcctcccaaagtgctaggattacaggcatgagccactgcagccagcctggatgcattttcagaattactttgatatattaacagagaagtgacttttacctgtctgaaatattgagcatcagactactgtttgattgacctgcagtctttctgcagggagtgcagtagttttagaggttaagcaccatatacctagaagggattcatcttttctcaaacgtagtggatgatgttttctctcaacaccatcagttaatgttgctgtgcccagtgagtgtatgctatatcatatcatagtgtgcagaggccgttgcacaaagcagaatagatgtgggtcagttacacattcatggatgattttatattgtcttggtagattattggtcagtatgtataccttgcataaaggactctctgtagaggccttaaggtcatctccatccctataggtacttgtctatctgctttagcttggtttactacagatgtctggttatattagaccagtcatcctagatgtgtctgagttgtttgctgcaaatattagtcatttgtacaatgtcaatgagatctctgcttgaaaaaaaatcacatcagaatacctccaatcacatttactacaaagtttagatttattcatttattatttacaagtccttagcaggtaacaaagacacctttaagtaataggctccagagggcagcagataagaatttttctttctgttgttaaagggctttcttgcagtctaagaatgatcattaattccttgttataagaaaaattataacactagtacaactcaacttctttttactgcctaggaaatttttttcccccagagatttgtgtaaatataaggctaaagttgtaaaatatacatatgaaggaatacagtagatatactctgtatttataatgtaaagaaaaagaataaatttcatgtacctattacccaacttaagaaaaataataccagtattttgaagacccatgaatccccttctccaaatgctctccatgaggggtaaccattatcttgacttttatgttatttatttccttacctttctttatagttctaccccatttacatgtatcctaaataacataaagtttagacttgcctttttttgaacttggtataagtagaatcatctgtaacttgcttcttttgttcaatattattattatgtttttgaaatctattcctttttttttttgagacagagtctcactctgtcgcccaggctggagtgcagtggtgtgatattggctcactgcaacctctgcctcccacgctccagcaagtcttctgcctcagcctcccgagtagctgggattaaaggtgcccatcaccacatccgcctaatttttgtattttcagtagagatggggttttgccatgttggctaggctggtcttgaactcctgacctcatgtgatctgccttcctcggcctcccaaagtgttgggattacaggtgtgagccaccactcctggcctgaaatccattcttgatggtatgtgtagctgcagttcattttcaccatcgcatcattccattgtacaaatatttcatagtttatttgtcctgtttagtctcattttcaccagtatttggaattatcagactggaaagtttcagctgatctaattggcatgcaatgataggttattgtcattttaatttgcatttccctaaattctaatgatgttgagcatcttttcattggtcattcatgtttcttctattatgtaatgcctgttcatatttttttgcccgttattctaataggttgtttgtggtttcactattgattcatgggacttctttatatatttttgtactagtccttcatcagttaaaattggttgcctgtggttactttgtaatacagttataaagcctaaggcatgagagtatggtcatcattattagttcaaagaggccttggtatagaataagggagaatagtctcatattcctcacttggtctcttcatctggctgtgctgataaccagttgtagtgggtgagcaaagaggtcagacacattgaggggcagttctataaagaagaggaaagatgcccaggatttgttttatttccatttcaagcaaataagcatttggatcaaacaggcaatttttaagtcttgcttatacttcagagacctaataggaaatggaactctatctttcgttttgcaggtgggcagatggaaaaggacccctggcagctgcgttctcttccagtgaagtaaaagctttaattcgtgccttgtttcagaacacagaaagaagagcagctgcccttgctaaaattaaatagctccatcttcttaagaaagctatgtcttgaatatgtggattcttcccttggcataattactcccttaaagacttctttgaatcgcccattggttttggtgaaccagtacatcttggaagtttgactttacagaagaacgtcttacctcctggcctgtacgaggctttgtttaagaactgtttattaagataaattgtcaagtaaagcacctcaattcattgactttctagccatcttcctttgattagctaacaaactgtcaggcagcattatttcatgctgcttccagagccctctgggagctatatacattgtaaatgcaggccctagctttggaacgaggaattgggagattccaggagtcagggtagagaatttctgagcaaatcggagatattttaggggtgtggaggaggggaagggaggaatgggccaccatatttggccttacaggaattaaggagacttcctgtaatatttctttccaataaatattgctttttacaattaa

SEQ ID NO: 10186 - DNA, 10675 bp, Homo sapiens
aattaatggaactcgcctatcagactttactagaggcaacaaccagtagtgatcaatggtacgaattctgggttgtgtgaaaatggcaatgacttggttaaatgcatatctaactagatgtttatcaggaaaattagctggaattctttgggttttcatatcctagaagttaatgctttttctggaaacaaaacaaaacaaaacaaaaacccagtgcatcacacagatttatgtctatctctgacttttatttgcaatagcatagatgtttgagcaaggtgtaggaagtaggtgcacttgtatggatggacaaatggatttttttgacattaaaaattgttaatcactttttaacaaaaagttcttcaattgttgttgaatttttactttttatttgaattgaatgatattatatgagaaaacacatgcaaagaacttagaatcctacctggaaaatgattaatactcaaatgtttattattgtgttggcagtgggtaatagttatatcttctattccagcttgctcaggctctttagcttaacattctttttaccttttgaaacccagtccctaattcatttatattttaaatgtttatatttgaagcaataacaatttgttaggcagccaaaggtagaaggaaaagaatggaacatgccaaagatctggcttcactctttcaagatgacttctaatctatattgcattcacgttaccttaaattctactccattatcttatatggaatctgtttttgttcaataagcttcttccctactcctagactaaattgagaagaaaatggcagagcatggaccaagctgattgcagagcaggtttataaaagcttctttagtttgaatctgcatttagcaatttcattcttcctatcctcatagagaaaacagtttcagttagggtttggcccaatcaaattgcatctttagatggactttccaagttcaatttttatcgtgagataacctctttattttattctgctctaggaagaacatgtctcccaagatactttcctagctttaatgaatcattacattcacatgtccattcagagttaattgtaagaaggaagaaatgaatataggagtgactgttggcaaaatgaatataggactgtttcttcacatggcactctcctgaaatatatcagaccagaagttagagatgagggcaatatttcttaaattttttgggaacacaaaacaccaaacagtatttgtatactgactatctatggacattctttccactaaaagtaatagtttttaacaggacaaacaaaaccacagctacaatgcaacaaccccctttttcattatcaaactcaaacagcagctcctgcagcgaaaatgaaataatttaataaggtattataataatcaaatagtaacagggtttttgggtatgacttattttcctaaatatttatgaaatccctgtaagcttttaaggtacgtagcttaagatattcttatgtagaggtaagttacacaaaccttatgtttgccttttaaaagtgcattttaataataatctgtaggtgttttaaggctagatttaaagggcaaaaaatcttgagggctagattctatcctagaaatgttgattcacctccttgcattgaggtaagaaggagaaaaggtgaaagctgaaagtcagactgattctaaaagaaccaagcgagtgcttttattgataccttgccctttgcagagtgtgtcagtgagtaggtgacatttgcttgaggcttagctccatttgttactgaagggatactctgggtactggcagaacagaaattgataaatagaaaagaggctttgggttgaatgcggctcttcttacaatcattaatgcatccaggtgtttggaattgtagtctggttagtaaatactggttgagactatatttccatctagattaatggtgttttccagcaaccaaggcaggtgttctgtgcaactgtagttttagcttatgactctcactgaagatgcacttagtttaaatttttttcttgtttttagtgtattcttaggcatttctgttaagtctatgttttctttttagtgctgttcaacttttctactcagtgaggaatatcttccatttgttccatgatgttgtaccaacatatcacaagtaagtaccactgtatctcatttctatataataattgtatgtctaagatgtggaagttaagttaaaacaaataattttatattcccactaaagatattttgtttactaacattcacactaaaatgcagtaaatcattttaaaacgcatatttaaaggatttggtcatttattactaaattaattagggtattataatcttgcagtgtagttcatgatgcacattttaaaactcaaaagaactaccttgttttgctgctaagcattttcagaactgcctttacttaactttcagcctctagttcagttttctttatttgaattaaaatgtttagatgtttttcataaatatctttgataacatgtcaacaaagctattccttagccaagaactctgaatttcagagacaaaaatctgccaggcacagtggctcacacttgtaatcccagcaccttggaaggcagaggtgggaggattgtttgaggccagaagtttgagattagtttgagcaacatagtgagaccctcgcctctaattaaaacaaagaaacaaaaaaccaaaaaaaaaaacaaaagctgtttactatttaaagtattttttagttcagatttttgaatattgggatgtttttaactaggctcacctgttgtttttattataaaagcttattgtgaaccttattagttttatttgtattctctttactgtggtttaacattcttatttcattttttacttagtcaagcaaaagaaaagagaaaacatatttgcattagctgacagccttgtccttggggatttaaagacaggagtggagttagatttgcctgtctttctccttcgtataacctcggaactttagtgtgcatcagaatcacgtggaagtcttgttaaaacacagattgcttgatccatgcccaaggtttctgattcagtaggtctggaatggggcttggatttttagcaaatttccaggtgatgctgatgttgcctgtcatgggaccacattttgagaaccactgtccttagataacggttctcagctttggcagtatttttatatcgtttcatttcatttcaatttcattccattcatttaatttcatattttgagacagagtctaactctgttgcctaggctggagtgcagtggtgcaatcatggctcattgcagcctcgacctactgggctcaggtgatcttcccatcttagcctcccaagtagctgggaccacaggcacacaccaccacacctgtctaacatatttttgtaatgatagggtctgtatatgttgcccaggctggtcttgaactccttggctcaagtgatcctcctgccttggtctctcaaaatgatggtattacagttgtgagccactgcaccggccagactttgggcagtattttagaataacttatggagctttaaaaatatacatatttactctcttcctagggcatttgatttatgtctgatgtaaggcccaggtgtgtttttttctttttttttaagccccacaggtgattctgatgtgtagctggaaaagaggactatcttagttatcttagtttgttggcttctgacttgtatatcctagttttatattgagttagcaaactagaaactgttaattgaatgactgttagtgggtagatagcagaaatataagacaaaatttcttcccaagctgggtagataagactaatacgtgtagaagaattaaagtagtgattttcaatcctggatgaaaattaaaatcacctgggaagattttaaaacatataaatgctgtgatttcactcttagagcttgtgatttaatttgtttggggtaaagtctaaacatctgtggttttttaaaattcccaggtgactctaatctagtcagtttttgaaaactagtgaattagaaaataattgaacacttcattatatgactgaagtaggaatttggagaaaggtgaagtaaacctgtatttccatagatgtatccgtgtaaaatttcaaggacattattatgcatagctctgctaggttttcagtgcaaaaagttgactcaggcaaacatcttgattcccttaatctttctttattgttaatcaccaggatagttttataggataaaatcccattcaggcagaacagcctccctctgggagtgggagtgatgagattgtatcttgttatgtatagcatttagaaactagacagttattaaagcctagaaatacattagagaagttgtgactttcatcaaccccagcttcagtaacaggtggttgctttgtttttctacccctccttctggcctagggagaaccttcaaaaacttccccagttggctgctattcatcacaacaactgtatgtacattgctcaccacttgctgaccctcgggcatcagttcagattgcgtcttgcccccattctttgtgatggcactgctacttttgtggatcttgtacctggcttcaggagacttggtaactgatactttcaatgtaggaaagcatatggattatgcagcttgtcaacatagtatctttatagtttttgaatgagaaaattagaaattaggtggtggtcctgagctgtatcagaaagtgggagggcatttaatttgcaagtgtttccagttatataattttataaggtgagtgtagtctttgtgggagacttttttacttttttgtaacatgatttcatggtacgttagagttccaaactgcagtcctagtgtgcattgaatttgccaggtcaggattcacataataggatttataatgtgacaattttgtttgtattgttggtaagagctcactaatgtcagtgctagttcttttgcaaaaccccaagacagctcccccatcttacatctcccttagttttacttgggattactaaaagtcaaaagaaatgaaatgtggagtaaatcaatatgttgatcatagcagagaatctatgtgtttcacttagcttttcaattcttgatttttccctagttggtatagatacatcagaataataagtagttcctttttctatagtaatttttcttagctgactcgggctctaagcaaactactggaaaatattatctggagggtggggtttgaggaacgggctaatgtattcaaagtgattgtttctagtagctttagggcagctttatgatattatctagcaattatttttatataggcagaacagatacatggtttatgcatctcttgtctatcctggttttgcagtgtgtaattgagcagcttttaaaattttttattctgtttttccatcatagggacagaatgctttttggcccaaatgcgggcacagaaaggtgaacttctggaaagattatcaagtgctaggaacttttcaaatatggacgatgaagagaattattctgcagcaagtaaagcagtccggcaggtaggaggctcttgctagcactgaaatttgtattctatccttagatgcctttttttttgtttgcttttttaaagcagaaaacaatatgtaacaagtattcagttgattccctgcacccccacctttggaaaatctagataccttttacaatcatgtttaagaactttttcttcccctctcccaccaagacaacacgaaactatcttttcattgactcaataattgcaacttgttacctagaaagtctgttgtggcaagtagttgattcctgaacttagatttgggaatttgaaatattggcttttatcttaatgctcccctttcttaagtgatttatcttttttgctgcagttttcctatcctcaggttgatgagtctgcttttcatctaccagggatatcactatggttaaatgttcaagaagcatatgtccttagttactttacctcattttggcataatgccactttcccaatgaactcacaaatgataaatgtaaatctggaaaatacgagtcacagtaatctttcttccacgtaaatagctgtattcttctacaggtactgcaccaactaaagagacttggaattgtgtggcaggatgtcctgccagtgaatatatattgcaaggctatggggactttactcaatacagcaatttctgaggtcattggcaaaattactgccctagaggtaagggccattagatgctacactagccttgagatgcaattcatgtcccagattgtgactttgctaagaaagtgatgttgaagaaattgttcatgtttcatgtctaactcatgctgtttttttttttttcagttttgttttatatctgttttgctagaaactgtttaatctcttttatatgaaagtaggattgaactatttctcagcctaccatctagattataaatgaggaagttagaaactgggtagtggtcctgagatgcgttgtatagtgtaaagtcatttaatttgcaagtaaactcaataatttgatttagtaaagtgaatgcagtcttgtgcaggttccatttttccaacacactgttgcagtttaaattttacatgtgattcttcaggaaaattgtctggacttggccagctgatgcctctaaatcatagattgactaaatccctatttgtaatcacatcccctgctttgcaacaagctgtgcgacattctattggagaaacaggctctttcatgcaggcaaactaaattactgacaatctgttgaaacatattttgtgtcattcttatatagaagtattgtcagagaactgatgtagtgtctagtaagttgttccaaattggttggaaaacatgttgtagctgacccacctggacagcatgcatcaaagatctgctgccctttccccacttctgagctggcccaattctattctattgtgtttcctctgtgcaaaaccaggacatatctactgaagatggtgataggttatattccttatgcaaaacagtgatggatgaaggaccccaagtatttgcacctttatctgaagaaagcaagaacaagaaatatcaagaagaggttccagtctatgtgccaaaatggatgccattcaaggaattgatgatgatgctacaagccagcttgcaagaaattggggatcggtatgtataacccttctatagaggcatataactctccatagctacaagagagtaatagtgcccttgatagcagggcttttccctgtttcctgatgttagtcatgcaagactttcatattgagtagcagtagctggggccttttcatgatctatcataatgcagatctcattaccactttcccatatttgatagcataaagacttctcatccatattattttggtcttgagtatgtggtttggcatgctgtacaagtgatctggcaactgtaagaattatagccttctgacatctggatggaaattgttgctcactttaaggagcagtggatgcttttttttttttgagacatggtcttactctgtcacccaggttggagtgcagtggctcaatcattcctcactgcagcctcaaactcgtgggctcaagggatcctcccacctcagcctcctgagtagctgggattacaggtgcctaccaccacacctggctaatttattttattttattattttatttattatttatttgttttgttttgttttagagacgaggtttctctgtgttgtccaggctggtctcaaactcctggcctcccaaagtgctaggattacaggcatgagccactgcagccagcctggatgcattttcagaattactttgatatattaacagagaagtgacttttacctgtctgaaatattgagcatcagactactgtttgattgacctgcagtctttctgcagggagtgcagtagttttagaggttaagcaccatatacctagaagggattcatcttttctcaaacgtagtggatgatgttttctctcaacaccatcagttaatgttgctgtgcccagtgagtgtatgctatatcatatcatagtgtgcagaggccgttgcacaaagcagaatagatgtgggtcagttacacattcatggatgattttatattgtcttggtagattattggtcagtatgtataccttgcataaaggactctctgtagaggccttaaggtcatctccatccctataggtacttgtctatctgctttagcttggtttactacagatgtctggttatattagaccagtcatcctagatgtgtctgagttgtttgctgcaaatattagtcatttgtacaatgtcaatgagatctctgcttgaaaaaaaatcacatcagaatacctccaatcacatttactacaaagtttagatttattcatttattatttacaagtccttagcaggtaacaaagacacctttaagtaataggctccagagggcagcagataagaatttttctttctgttgttaaagggctttcttgcagtctaagaatgatcattaattccttgttataagaaaaattataacactagtacaactcaacttctttttactgcctaggaaatttttttcccccagagatttgtgtaaatataaggctaaagttgtaaaatatacatatgaaggaatacagtagatatactctgtatttataatgtaaagaaaaagaataaatttcatgtacctattacccaacttaagaaaaataataccagtattttgaagacccatgaatccccttctccaaatgctctccatgaggggtaaccattatcttgacttttatgttatttatttccttacctttctttatagttctaccccatttacatgtatcctaaataacataaagtttagacttgcctttttttgaacttggtataagtagaatcatctgtaacttgcttcttttgttcaatattattattatgtttttgaaatctattcctttttttttttgagacagagtctcactctgtcgcccaggctggagtgcagtggtgtgatattggctcactgcaacctctgcctcccacgctccagcaagtcttctgcctcagcctcccgagtagctgggattaaaggtgcccatcaccacatccgcctaatttttgtattttcagtagagatggggttttgccatgttggctaggctggtcttgaactcctgacctcatgtgatctgccttcctcggcctcccaaagtgttgggattacaggtgtgagccaccactcctggcctgaaatccattcttgatggtatgtgtagctgcagttcattttcaccatcgcatcattccattgtacaaatatttcatagtttatttgtcctgtttagtctcattttcaccagtatttggaattatcagactggaaagtttcagctgatctaattggcatgcaatgataggttattgtcattttaatttgcatttccctaaattctaatgatgttgagcatcttttcattggtcattcatgtttcttctattatgtaatgcctgttcatatttttttgcccgttattctaataggttgtttgtggtttcactattgattcatgggacttctttatatatttttgtactagtccttcatcagttaaaattggttgcctgtggttactttgtaatacagttataaagcctaaggcatgagagtatggtcatcattattagttcaaagaggccttggtatagaataagggagaatagtctcatattcctcacttggtctcttcatctggctgtgctgataaccagttgtagtgggtgagcaaagaggtcagacacattgaggggcagttctataaagaagaggaaagatgcccaggatttgttttatttccatttcaagcaaataagcatttggatcaaacaggcaatttttaagtcttgcttatacttcagagacctaataggaaatggaactctatctttcgttttgcaggtgggcagatggaaaaggaccctggcagctgcgttctcttccagtgaagtaaaagctttaattcgtgccttgtttcagacacagaaagaagagcagctgcccttgctaaaattaaatagctccatcttcttaagaaagctatgtcttgaatatgtggattcttcccttggcataattactcccttaaagacttctttgaatcgcccattggttttggtgaaccagtacatcttggaagtttgactttacagaagaacgtcttacctcctggcctgtacgaggctttgtttaagaactgtttattaagataaattgtcaagtaaagcacctcaattcattgactttctagccatcttcctttgattagctaacaaactgtcaggcagcattatttcatgctgcttccagagccctctgggagctatatacattgtaaatgcaggccctagctttggaacgaggaattgggagattccaggagtcagggtagagaatttctgagcaaatcggagatattttaggggtgtggaggaggggaagggaggaatgggccaccatatttggccttacaggaattaaggagacttcctgtaatatttctttccaataaatattgctttttacaattaa

SEQ ID NO: 10187 - DNA, 15244 bp, Homo sapiens
aaaaaattcagatttgccacttgacactgacctggaaaatgaaaaaacatctactgtcccattggctgagatgcttggagacatgatctgggaggacttgtctgagtgcctcatcaaaaactgtttggtttattcgattccaacaaatagcagcaaattacagcaatatgaagaggtaaagagccgagacagcacagaaggttttaagacactgttgtttcttattgctgtcttttgtttttccttggagatagtttgttctttagttatacctttaagtaaattattaataaggaatagagacaaattccatataacttcatttttctcctggcttcctacctctttaactgcagaagtttgtttccttactaaatatattttctttatgttcatttatacttatatcagctataatagctattgtgtgacattttactttttgcttctttttagtgtttccttgaatgctaaaataagtatatttgttttaaagatctttctatttttactaagtagagtcagacatttctactgaagatattctttctaatgaatttaaggctggaaatatgtatatttttatacctagtaattgatggtccattctaaaatgaccagcttggtcctcatttttttatacattggatttgaaattctaatattgtaatggaatatatgtatatgattcttttcttttttttcttttgtatctcagatcatacagtccactgaagaatttgaaaatgccctaaaggaaatgagatttttaaaaggagatactacagatttgctgaaatacgctcgtaacatcaattctcattttgcaaacaaaaagtgccaggatgtgattgtggcagccagaaatctaatgacctcagaaattcataacactgtgaaggtaccagtgttatattgcattgtatatgaaacattgtatatgagaaagcaactcattttgagatgcatatagtaaagtggaagagaggatgacggttgttgagctgagtcaagttatcaatcttttttacattggttttgtctcctttaaagtggtcctaatctccacctcttccattgggtattgtgaagtgcagatacgataatgcacatgaaagccttgtataaattgaaaaagtctacatacgtgtaatggattattattgttgaagtgagacagtagattattctcatctttatttctgaaggttttaggacacaactttgtgacaggtacacttgggctacattatgtccagaaattatatcctcttatgaaagtgttgacttcatctaatagagagactagttttaaagttaaaataataaaaaggtaaataaaaagataggatataaataattacctgtaaaggcagtggacctttgaccttttttttttcatatcttacatgtatgaaataatgtatataccttgaattgggctgtggtttcttttaacataaatgtcaattgattatgtcactcttctgcagaaagtccagtgtcttcccatcttatttagagaagacccagtagccttacagtggactgcaaggccttatctgatctgcctcctattgcctctctgactctattatctattgcattcatccttcactatgctgcaggcatcctggacttatttctgttccttgaatgtgctaggcctactttgtttcagaatctctgaaccacttgttacctctgcatggaatattcttaccgcagatcacatgatttgctttttaaaaagtactttctgatcacttaaaaaaaattataacctcccctatttcctgtaccccttccttggtgtatttttctttttattatatcatcaaccaacattttatatgaattgtttgttgtttctccctctagaaagtaagctccatgagggtagagttttgttgttgtttttttttttttttttgactgttttgtttactgttatatctccagcactaagaaaatacctggtacatacatactactactatgtactcagtgctcatgtgcttactgattacctttggtaaatgaattcatatatatctcacaactccttgatgtaaacagcattactgctgaattgctctgtgactctgggcttaatcttctcaccttgttgaacctcattttcctcttctgtactgtgagaggattgaactagataatctgagtttcctacttaagtaattttgagagtttgtaaaactgcattttttctgagtactcaaatcctaatgtagcttcctctaggtcaggacatctcagcagtggcagtgttaacatttgggaccggctaattcttcgctgtgggggactgtcctatgggatatttagcagcatccctgacctctgttccctagattctagtagcacctcttccagctgtgacaagcaaaaatatctcagacattgccaaatgccccctttaagacagagttttccctgattgagaaccactgctttagattccagctggttctttctcttggcatttaggccctggaattagattttctaaacttcccaactttgaaaaaagctcctcttcccttttctaaaaaacgttttcaacttaattgcttttcatggtctgtttctcaattctctttattcccctatgtgtactcactgttttcccaaaagatctatagttgtgttttttgttgttgtttggtttttacattttgtcttaagagacatcttactaggtctaacattcttccgtcttagtttcctttgcccctcctcatgaagtcaccttttcgaatcttatgtatccaggcccactatttttcagacaaagattagcattttaaataaactctgtaagtaaattttttcatcatcattctaatcttagccataatttttgactacccagtccctgatatttgtgttctcatttaaacttcataacagctctctaaagtagatattattataccattttacagattagacagccaagtccactgacttaaatagttttattagactttgaaccttttctgccagaaaatctctgtcgaagtccagtatgtgcaaagttgttattcttgcagtgggagtagggagcctgctgcctctacatgctttatctttttttttttttttaatccctgaagcatctttgaggaacaaggttcaaaagccattattagtatattatttattttacagtgagaaaattgagatccagagaggttaaatgactttgttaaaagttagggtgaaaaatattactgttttcacattcacagcctactgttctttcatttagtcccaacaaaagaaattttctattgaagcttttttttttaataaggggaggatatgctagtttgaatgagaatgagttatttcttagactaagccaacacatgtgcctggtacaaaataatttgttcaagaatctagacagtggaaccccaaattatgctgctctgtaatactaatagtctagtatgagacagatgatttttgaaggtctttttatttagctgaaatcttaggccagttgcacagctttgctatttcagccaagattaagaatgcttggggccgggtgcgtttgctcatgcctataatccatgcactttgggaagtcgaggagggagaatgacttgagcccaggtgttcgagacccgcctgggccatatagcaagaccttttctctactaaaaataaaagtaaattagctgggtgtggtgggtgcctgtagtcccagctacatgggaggttgaggctacagtgagctatgattgtgccactgcactccagcctgggtgacagagcaagaccctgtctcaaaaagagtgcttagaagaatgtcacagtaaaggggattaagggaattgtttatcacttatgacatgctttcatctaggattcagcagtcattaaaatattgtcatatttattgaaatcttttaattactctgtagagccgtagctgtatcatgaaagcaagcagtatcttattcttcaccgtgtgcttatatttgttttttttgagacggagtcttgctctgtcgcccaggctggagtgcagtggcatgatctcagctcactacaagctccgctcactgcaagctccgcctcccgggtttgcgccattctcctgcctcagcctcccgagtagctgggactacaggcgcacgctgccacgcccggccaattttttgtatttttagtagagacggggtttcaccgtgttagccaggatggtctcgatctcctgacctcgtgatctgcccgcctcggcctcccaaagtgctgggattacaggcgtgagccgccatgcccggccgtgtgcttatatttgaattattctgaaaacaatatattttctgtatttttgtgtttgaatcttagattattcctgattctaagataaatgtgccagagttacccactcctgatgaggataacaaactggaagtacagaaagtatccaatactcagtaccacgaagtgatgaatttagagcctgaaaatacattggaccaacattccttttccttgcccacatgccgtatcagtgagtctgtgaagaaattaatggaactcgcctatcagactttactagaggcaacaaccagtagtgatcaatggtacgaattctgggttgtgtgaaaatggcaatgacttggttaaatgcatatctaactagatgtttatcaggaaaattagctggaattctttgggttttcatatcctagaagttaatgctttttctggaaacaaaacaaaacaaaacaaaaacccagtgcatcacacagatttatgtctatctctgacttttatttgcaatagcatagatgtttgagcaaggtgtaggaagtaggtgcacttgtatggatggacaaatggatttttttgacattaaaaattgttaatcactttttaacaaaaagttcttcaattgttgttgaatttttactttttatttgaattgaatgatattatatgagaaaacacatgcaaagaacttagaatcctacctggaaaatgattaatactcaaatgtttattattgtgttggcagtgggtaatagttatatcttctattccagcttgctcaggctctttagcttaacattctttttaccttttgaaacccagtccctaattcatttatattttaaatgtttatatttgaagcaataacaatttgttaggcagccaaaggtagaaggaaaagaatggaacatgccaaagatctggcttcactctttcaagatgacttctaatctatattgcattcacgttaccttaaattctactccattatcttatatggaatctgtttttgttcaataagcttcttccctactcctagactaaattgagaagaaaatggcagagcatggaccaagctgattgcagagcaggtttataaaagcttctttagtttgaatctgcatttagcaatttcattcttcctatcctcatagagaaaacagtttcagttagggtttggcccaatcaaattgcatctttagatggactttccaagttcaatttttatcgtgagataacctctttattttattctgctctaggaagaacatgtctcccaagatactttcctagctttaatgaatcattacattcacatgtccattcagagttaattgtaagaaggaagaaatgaatataggagtgactgttggcaaaatgaatataggactgtttcttcacatggcactctcctgaaatatatcagaccagaagttagagatgagggcaatatttcttaaattttttgggaacacaaaacaccaaacagtatttgtatactgactatctatggacattctttccactaaaagtaatagtttttaacaggacaaacaaaaccacagctacaatgcaacaaccccctttttcattatcaaactcaaacagcagctcctgcagcgaaaatgaaataatttaataaggtattataataatcaaatagtaacagggtttttgggtatgacttattttcctaaatatttatgaaatccctgtaagcttttaaggtacgtagcttaagatattcttatgtagaggtaagttacacaaaccttatgtttgccttttaaaagtgcattttaataataatctgtaggtgttttaaggctagatttaaagggcaaaaaatcttgagggctagattctatcctagaaatgttgattcacctccttgcattgaggtaagaaggagaaaaggtgaaagctgaaagtcagactgattctaaaagaaccaagcgagtgcttttattgataccttgccctttgcagagtgtgtcagtgagtaggtgacatttgcttgaggcttagctccatttgttactgaagggatactctgggtactggcagaacagaaattgataaatagaaaagaggctttgggttgaatgcggctcttcttacaatcattaatgcatccaggtgtttggaattgtagtctggttagtaaatactggttgagactatatttccatctagattaatggtgttttccagcaaccaaggcaggtgttctgtgcaactgtagttttagcttatgactctcactgaagatgcacttagtttaaatttttttcttgtttttagtgtattcttaggcatttctgttaagtctatgttttctttttagtgctgttcaacttttctactcagtgaggaatatcttccatttgttccatgatgttgtaccaacatatcacaagtaagtaccactgtatctcatttctatataataattgtatgtctaagatgtggaagttaagttaaaacaaataattttatattcccactaaagatattttgtttactaacattcacactaaaatgcagtaaatcattttaaaacgcatatttaaaggatttggtcatttattactaaattaattagggtattataatcttgcagtgtagttcatgatgcacattttaaaactcaaaagaactaccttgttttgctgctaagcattttcagaactgcctttacttaactttcagcctctagttcagttttctttatttgaattaaaatgtttagatgtttttcataaatatctttgataacatgtcaacaaagctattccttagccaagaactctgaatttcagagacaaaaatctgccaggcacagtggctcacacttgtaatcccagcaccttggaaggcagaggtgggaggattgtttgaggccagaagtttgagattagtttgagcaacatagtgagaccctcgcctctaattaaaacaaagaaacaaaaaaccaaaaaaaaaaacaaaagctgtttactatttaaagtattttttagttcagatttttgaatattgggatgtttttaactaggctcacctgttgtttttattataaaagcttattgtgaaccttattagttttatttgtattctctttactgtggtttaacattcttatttcattttttacttagtcaagcaaaagaaaagagaaaacatatttgcattagctgacagccttgtccttggggatttaaagacaggagtggagttagatttgcctgtctttctccttcgtataacctcggaactttagtgtgcatcagaatcacgtggaagtcttgttaaaacacagattgcttgatccatgcccaaggtttctgattcagtaggtctggaatggggcttggatttttagcaaatttccaggtgatgctgatgttgcctgtcatgggaccacattttgagaaccactgtccttagataacggttctcagctttggcagtatttttatatcgtttcatttcatttcaatttcattccattcatttaatttcatattttgagacagagtctaactctgttgcctaggctggagtgcagtggtgcaatcatggctcattgcagcctcgacctactgggctcaggtgatcttcccatcttagcctcccaagtagctgggaccacaggcacacaccaccacacctgtctaacatatttttgtaatgatagggtctgtatatgttgcccaggctggtcttgaactccttggctcaagtgatcctcctgccttggtctctcaaaatgatggtattacagttgtgagccactgcaccggccagactttgggcagtattttagaataacttatggagctttaaaaatatacatatttactctcttcctagggcatttgatttatgtctgatgtaaggcccaggtgtgtttttttctttttttttaagccccacaggtgattctgatgtgtagctggaaaagaggactatcttagttatcttagtttgttggcttctgacttgtatatcctagttttatattgagttagcaaactagaaactgttaattgaatgactgttagtgggtagatagcagaaatataagacaaaatttcttcccaagctgggtagataagactaatacgtgtagaagaattaaagtagtgattttcaatcctggatgaaaattaaaatcacctgggaagattttaaaacatataaatgctgtgatttcactcttagagcttgtgatttaatttgtttggggtaaagtctaaacatctgtggttttttaaaattcccaggtgactctaatctagtcagtttttgaaaactagtgaattagaaaataattgaacacttcattatatgactgaagtaggaatttggagaaaggtgaagtaaacctgtatttccatagatgtatccgtgtaaaatttcaaggacattattatgcatagctctgctaggttttcagtgcaaaaagttgactcaggcaaacatcttgattcccttaatctttctttattgttaatcaccaggatagttttataggataaaatcccattcaggcagaacagcctccctctgggagtgggagtgatgagattgtatcttgttatgtatagcatttagaaactagacagttattaaagcctagaaatacattagagaagttgtgactttcatcaaccccagcttcagtaacaggtggttgctttgtttttctacccctccttctggcctagggagaaccttcaaaaacttccccagttggctgctattcatcacaacaactgtatgtacattgctcaccacttgctgaccctcgggcatcagttcagattgcgtcttgcccccattctttgtgatggcactgctacttttgtggatcttgtacctggcttcaggagacttggtaactgatactttcaatgtaggaaagcatatggattatgcagcttgtcaacatagtatctttatagtttttgaatgagaaaattagaaattaggtggtggtcctgagctgtatcagaaagtgggagggcatttaatttgcaagtgtttccagttatataattttataaggtgagtgtagtctttgtgggagacttttttacttttttgtaacatgatttcatggtacgttagagttccaaactgcagtcctagtgtgcattgaatttgccaggtcaggattcacataataggatttataatgtgacaattttgtttgtattgttggtaagagctcactaatgtcagtgctagttcttttgcaaaaccccaagacagctcccccatcttacatctcccttagttttacttgggattactaaaagtcaaaagaaatgaaatgtggagtaaatcaatatgttgatcatagcagagaatctatgtgtttcacttagcttttcaattcttgatttttccctagttggtatagatacatcagaataataagtagttcctttttctatagtaatttttcttagctgactcgggctctaagcaaactactggaaaatattatctggagggtggggtttgaggaacgggctaatgtattcaaagtgattgtttctagtagctttagggcagctttatgatattatctagcaattatttttatataggcagaacagatacatggtttatgcatctcttgtctatcctggttttgcagtgtgtaattgagcagcttttaaaattttttattctgtttttccatcatagggacagaatgctttttggcccaaatgcgggcacagaaaggtgaacttctggaaagattatcaagtgctaggaacttttcaaatatggacgatgaagagaattattctgcagcaagtaaagcagtccggcaggtaggaggctcttgctagcactgaaatttgtattctatccttagatgcctttttttttgtttgcttttttaaagcagaaaacaatatgtaacaagtattcagttgattccctgcacccccacctttggaaaatctagataccttttacaatcatgtttaagaactttttcttcccctctcccaccaagacaacacgaaactatcttttcattgactcaataattgcaacttgttacctagaaagtctgttgtggcaagtagttgattcctgaacttagatttgggaatttgaaatattggcttttatcttaatgctcccctttcttaagtgatttatcttttttgctgcagttttcctatcctcaggttgatgagtctgcttttcatctaccagggatatcactatggttaaatgttcaagaagcatatgtccttagttactttacctcattttggcataatgccactttcccaatgaactcacaaatgataaatgtaaatctggaaaatacgagtcacagtaatctttcttccacgtaaatagctgtattcttctacaggtactgcaccaactaaagagacttggaattgtgtggcaggatgtcctgccagtgaatatatattgcaaggctatggggactttactcaatacagcaatttctgaggtcattggcaaaattactgccctagaggtaagggccattagatgctacactagccttgagatgcaattcatgtcccagattgtgactttgctaagaaagtgatgttgaagaaattgttcatgtttcatgtctaactcatgctgtttttttttttttcagttttgttttatatctgttttgctagaaactgtttaatctcttttatatgaaagtaggattgaactatttctcagcctaccatctagattataaatgaggaagttagaaactgggtagtggtcctgagatgcgttgtatagtgtaaagtcatttaatttgcaagtaaactcaataatttgatttagtaaagtgaatgcagtcttgtgcaggttccatttttccaacacactgttgcagtttaaattttacatgtgattcttcaggaaaattgtctggacttggccagctgatgcctctaaatcatagattgactaaatccctatttgtaatcacatcccctgctttgcaacaagctgtgcgacattctattggagaaacaggctctttcatgcaggcaaactaaattactgacaatctgttgaaacatattttgtgtcattcttatatagaagtattgtcagagaactgatgtagtgtctagtaagttgttccaaattggttggaaaacatgttgtagctgacccacctggacagcatgcatcaaagatctgctgccctttccccacttctgagctggcccaattctattctattgtgtttcctctgtgcaaaaccaggacatatctactgaagatggtgataggttatattccttatgcaaaacagtgatggatgaaggaccccaagtatttgcacctttatctgaagaaagcaagaacaagaaatatcaagaagaggttccagtctatgtgccaaaatggatgccattcaaggaattgatgatgatgctacaagccagcttgcaagaaattggggatcggtatgtataacccttctatagaggcatataactctccatagctacaagagagtaatagtgcccttgatagcagggcttttccctgtttcctgatgttagtcatgcaagactttcatattgagtagcagtagctggggccttttcatgatctatcataatgcagatctcattaccactttcccatatttgatagcataaagacttctcatccatattattttggtcttgagtatgtggtttggcatgctgtacaagtgatctggcaactgtaagaattatagccttctgacatctggatggaaattgttgctcactttaaggagcagtggatgcttttttttttttgagacatggtcttactctgtcacccaggttggagtgcagtggctcaatcattcctcactgcagcctcaaactcgtgggctcaagggatcctcccacctcagcctcctgagtagctgggattacaggtgcctaccaccacacctggctaatttattttattttattattttatttattatttatttgttttgttttgttttagagacgaggtttctctgtgttgtccaggctggtctcaaactcctggcctcccaaagtgctaggattacaggcatgagccactgcagccagcctggatgcattttcagaattactttgatatattaacagagaagtgacttttacctgtctgaaatattgagcatcagactactgtttgattgacctgcagtctttctgcagggagtgcagtagttttagaggttaagcaccatatacctagaagggattcatcttttctcaaacgtagtggatgatgttttctctcaacaccatcagttaatgttgctgtgcccagtgagtgtatgctatatcatatcatagtgtgcagaggccgttgcacaaagcagaatagatgtgggtcagttacacattcatggatgattttatattgtcttggtagattattggtcagtatgtataccttgcataaaggactctctgtagaggccttaaggtcatctccatccctataggtacttgtctatctgctttagcttggtttactacagatgtctggttatattagaccagtcatcctagatgtgtctgagttgtttgctgcaaatattagtcatttgtacaatgtcaatgagatctctgcttgaaaaaaaatcacatcagaatacctccaatcacatttactacaaagtttagatttattcatttattatttacaagtccttagcaggtaacaaagacacctttaagtaataggctccagagggcagcagataagaatttttctttctgttgttaaagggctttcttgcagtctaagaatgatcattaattccttgttataagaaaaattataacactagtacaactcaacttctttttactgcctaggaaatttttttcccccagagatttgtgtaaatataaggctaaagttgtaaaatatacatatgaaggaatacagtagatatactctgtatttataatgtaaagaaaaagaataaatttcatgtacctattacccaacttaagaaaaataataccagtattttgaagacccatgaatccccttctccaaatgctctccatgaggggtaaccattatcttgacttttatgttatttatttccttacctttctttatagttctaccccatttacatgtatcctaaataacataaagtttagacttgcctttttttgaacttggtataagtagaatcatctgtaacttgcttcttttgttcaatattattattatgtttttgaaatctattcctttttttttttgagacagagtctcactctgtcgcccaggctggagtgcagtggtgtgatattggctcactgcaacctctgcctcccacgctccagcaagtcttctgcctcagcctcccgagtagctgggattaaaggtgcccatcaccacatccgcctaatttttgtattttcagtagagatggggttttgccatgttggctaggctggtcttgaactcctgacctcatgtgatctgccttcctcggcctcccaaagtgttgggattacaggtgtgagccaccactcctggcctgaaatccattcttgatggtatgtgtagctgcagttcattttcaccatcgcatcattccattgtacaaatatttcatagtttatttgtcctgtttagtctcattttcaccagtatttggaattatcagactggaaagtttcagctgatctaattggcatgcaatgataggttattgtcattttaatttgcatttccctaaattctaatgatgttgagcatcttttcattggtcattcatgtttcttctattatgtaatgcctgttcatatttttttgcccgttattctaataggttgtttgtggtttcactattgattcatgggacttctttatatatttttgtactagtccttcatcagttaaaattggttgcctgtggttactttgtaatacagttataaagcctaaggcatgagagtatggtcatcattattagttcaaagaggccttggtatagaataagggagaatagtctcatattcctcacttggtctcttcatctggctgtgctgataaccagttgtagtgggtgagcaaagaggtcagacacattgaggggcagttctataaagaagaggaaagatgcccaggatttgttttatttccatttcaagcaaataagcatttggatcaaacaggcaatttttaagtcttgcttatacttcagagacctaataggaaatggaactctatctttcgttttgcaggtgggcagatggaaaaggacccctggcagctgcgttctcttccagtgaagtaaaagctttaattcgtgccttgtttcagaacacagaaagaagagcagctgcccttgctaaaattaaatagctccatcttcttaagaaagctatgtcttgaatatgtggattcttcccttggcataattactcccttaaagacttctttgaatcgcccattggttttggtgaaccagtacatcttggaagtttgactttacagaagaacgtcttacctcctggcctgtacgaggctttgtttaagaactgtttattaagataaattgtcaagtaaagcacctcaattcattgactttctagccatcttcctttgattagctaacaaactgtcaggcagcattatttcatgctgcttccagagccctctgggagctatatacattgtaaatgcaggccctagctttggaacgaggaattgggagattccaggagtcagggtagagaatttctgagcaaatcggagatattttaggggtgtggaggaggggaagggaggaatgggccaccatatttggccttacaggaattaaggagacttcctgtaatatttctttccaataaatattgctttttacaattaa

SEQ ID NO: 10188 - DNA, 357 bp, Homo sapiens
tggaggaatatattatgttaaggttattctgaacctgtctaggactctggattgtatctcttcatactgaaatacaatttcttattctgaaaagaggataaggggtatgacctttaggtccttttgaggtaggtgctgtctgaagaaagttgctaatacaaacctggccaacatagtgaaaccccatctctagtgaaaatacaaaaattagctgggcatggtggtgggcacctgtagtcccagctactcgggaggctcaggcagaggaattgcttgaacccgggaggtggaggttgcagtgagcggagattgcaccactgcactccagcctgggcaacggaataagaccctgtctcc

SEQ ID NO: 10189 - DNA, 197 bp, Homo sapiens
cgccattctcctgcctcagcctcccgagtagctgggactacaggcgcacgctgccacgcccggccaattttttgtatttttagtagagacggggtttcaccgtgttagccaggatggtctcgatctcctgacctcgtgatctgcccgcctcggcctcccaaagtgctgggattacaggcgtgagccgccatgcccgg

SEQ ID NO: 10190 - DNA, 357 bp, Homo sapiens; identical to SEQ ID NO: 10188

SEQ ID NO: 10191 - DNA, 231 bp, Homo sapiens
ctccgctcactgcaagctccgcctcccgggtttgcgccattctcctgcctcagcctcccgagtagctgggactacaggcgcacgctgccacgcccggccaattttttgtatttttagtagagacggggtttcaccgtgttagccaggatggtctcgatctcctgacctcgtgatctgcccgcctcggcctcccaaagtgctgggattacaggcgtgagccgccatgcccgg

SEQ ID NO: 10192 - DNA, 1146 bp, Homo sapiens
caggaaatgacctgattcctttctaatacttgctccacggggtctggtcagtcttcacagcaccaggcagacaaagggcctggaagtagaggcaggaggtcccagatctaccgacctgccaagtcacagcctctctgggctgctggagaatctgtaagcaagaccgaattgtaaaagtaaagcacagcacagctttgagacccagaagccgttgctgtgaacttactgtttttgagctgcattctggagaattgcagctccaagtttattttacccattatgtatcaaagaagaccccatatagttaatgttgccatccgcccttggacccgggtctcatgtttagaccctggcatgggctgctgcctggcagtcgtctcgtgccctgggggcttgttagacttgtgggagctcccaatccgtgtgcacactgatgtgtgacagcttgactgtagagggcccagctgtgccctccccacagggcagagggccgacccagagcccacactctctggacctcactcctgtactctccaccctgggatttcctgctcaaagggaccaagcctgcttccaggacctgtattggcctcttcccccaagccatggtgccccaaccccaagggatggccaaagagtgactgggggagttggcaaggggctgttgcgggtgtggggtggagcttggacgtgagggcttgaaggtccttgcttgtgtgcacgagactcctcacattgcaggatggagttgtggggagggtggaaagagaagagtacagacactgtcggctacaagcgttctcttttacttgtcctgggtcctaaaattgtcagagtggcctatgcgattttataaaataatttttctaggtctgtgggaatctacaattccactgttaaggtgagagagggataattagaaagttttcttagaggaggggcattggagctgggttttgacagatgcgtaggagttcagtagtagaaacagagggaattaaaactatgtaaacaaaaatatggcagaagggaagtgaggtatttgtgggaaaagatgtgctttttgctacagtctccacagtttgggatcagatcacgagggtcttgaattccagatggggggtttggtgggagggagccctcgag

SEQ ID NO: 10193 - DNA, 436 bp, Homo sapiens
ctggcatgtgaccttcctctgagaactctcaactggtaagagaaaaacacctcaagtgagcatgtgtacaattttagtaaacacactgtgcatacggcccctcccaaatgctggcaggccactgtgcatgtgaacagcctgccccaagggaaaatcaagggaggagagatgcaaccgccaggaagcatgacaacgtgtaaacaaggtcagaggtcaaaggtcagacagcccacttggattcctcaagtcacccgcttggttctcttccaagtgtactttacttccttttgttcctgctctaaaacatttttgtttgttttttaagagatagatctcgctatgttgaccatgctggtctctggtctcgtactcctggcctcaagcgatggtcccatctcagcctcccaaagtgctgggattacagggatgagccacc

SEQ ID NO: 10194 - DNA, 4167 bp, Homo sapiens
  SITE (268): n equals a,t,g, or c
  SITE (269): n equals a,t,g, or c
  SITE (270): n equals a,t,g, or c
  SITE (271): n equals a,t,g, or c
  SITE (272): n equals a,t,g, or c
  SITE (273): n equals a,t,g, or c
  SITE (274): n equals a,t,g, or c
  SITE (275): n equals a,t,g, or c
  SITE (276): n equals a,t,g, or c
  SITE (277): n equals a,t,g, or c
  SITE (278): n equals a,t,g, or c
  SITE (279): n equals a,t,g, or c
  SITE (280): n equals a,t,g, or c
  SITE (281): n equals a,t,g, or c
  SITE (282): n equals a,t,g, or c
  SITE (283): n equals a,t,g, or c
  SITE (284): n equals a,t,g, or c
  SITE (285): n equals a,t,g, or c
  SITE (286): n equals a,t,g, or c
  SITE (287): n equals a,t,g, or c
  SITE (288): n equals a,t,g, or c
  SITE (289): n equals a,t,g, or c
  SITE (290): n equals a,t,g, or c
  SITE (291): n equals a,t,g, or c
  SITE (292): n equals a,t,g, or c
  SITE (293): n equals a,t,g, or c
  SITE (294): n equals a,t,g, or c
  SITE (295): n equals a,t,g, or c
  SITE (296): n equals a,t,g, or c
  SITE (297): n equals a,t,g, or c
  SITE (298): n equals a,t,g, or c
  SITE (299): n equals a,t,g, or c
  SITE (300): n equals a,t,g, or c
  SITE (301): n equals a,t,g, or c
  SITE (302): n equals a,t,g, or c
  SITE (303): n equals a,t,g, or c
  SITE (304): n equals a,t,g, or c
  SITE (305): n equals a,t,g, or c
  SITE (306): n equals a,t,g, or c
  SITE (307): n equals a,t,g, or c
  SITE (308): n equals a,t,g, or c
  SITE (309): n equals a,t,g, or c
  SITE (310): n equals a,t,g, or c
  SITE (311): n equals a,t,g, or c
  SITE (312): n equals a,t,g, or c
  SITE (313): n equals a,t,g, or c
  SITE (314): n equals a,t,g, or c
  SITE (315): n equals a,t,g, or c
  SITE (316): n equals a,t,g, or c
  SITE (317): n equals a,t,g, or c
  SITE (318): n equals a,t,g, or c
  SITE (319): n equals a,t,g, or c
  SITE (320): n equals a,t,g, or c
  SITE (321): n equals a,t,g, or c
  SITE (322): n equals a,t,g, or c
  SITE (323): n equals a,t,g, or c
  SITE (324): n equals a,t,g, or c
  SITE (325): n equals a,t,g, or c
  SITE (326): n equals a,t,g, or c
  SITE (327): n equals a,t,g, or c
  SITE (328): n equals a,t,g, or c
  SITE (329): n equals a,t,g, or c
  SITE (330): n equals a,t,g, or c
  SITE (331): n equals a,t,g, or c
  SITE (332): n equals a,t,g, or c
  SITE (333): n equals a,t,g, or c
  SITE (334): n equals a,t,g, or c
  SITE (335): n equals a,t,g, or c
  SITE (336): n equals a,t,g, or c
  SITE (337): n equals a,t,g, or c
  SITE (338): n equals a,t,g, or c
  SITE (339): n equals a,t,g, or c
  SITE (340): n equals a,t,g, or c
  SITE (341): n equals a,t,g, or c
  SITE (342): n equals a,t,g, or c
  SITE (343): n equals a,t,g, or c
  SITE (344): n equals a,t,g, or c
  SITE (345): n equals a,t,g, or c
  SITE (346): n equals a,t,g, or c
  SITE (347): n equals a,t,g, or c
  SITE (348): n equals a,t,g, or c
  SITE (349): n equals a,t,g, or c
  SITE (350): n equals a,t,g, or c
  SITE (351): n equals a,t,g, or c
  SITE (352): n equals a,t,g, or c
  SITE (353): n equals a,t,g, or c
  SITE (354): n equals a,t,g, or c
  SITE (355): n equals a,t,g, or c
  SITE (356): n equals a,t,g, or c
  SITE (357): n equals a,t,g, or c
  SITE (358): n equals a,t,g, or c
  SITE (359): n equals a,t,g, or c
  SITE (360): n equals a,t,g, or c
  SITE (361): n equals a,t,g, or c
  SITE (362): n equals a,t,g, or c
  SITE (363): n equals a,t,g, or c
  SITE (364): n equals a,t,g, or c
  SITE (365): n equals a,t,g, or c
  SITE (366): n equals a,t,g, or c
  SITE (367): n equals a,t,g, or c
  SITE (368): n equals a,t,g, or c
  SITE (369): n equals a,t,g, or c
  SITE (370): n equals a,t,g, or c
  SITE (371): n equals a,t,g, or c
  SITE (372): n equals a,t,g, or c
  SITE (373): n equals a,t,g, or c
  SITE (374): n equals a,t,g, or c
  SITE (375): n equals a,t,g, or c
  SITE (376): n equals a,t,g, or c
  SITE (377): n equals a,t,g, or c
  SITE (378): n equals a,t,g, or c
  SITE (379): n equals a,t,g, or c
  SITE (380): n equals a,t,g, or c
  SITE (381): n equals a,t,g, or c
  SITE (382): n equals a,t,g, or c
  SITE (383): n equals a,t,g, or c
  SITE (384): n equals a,t,g, or c
  SITE (385): n equals a,t,g, or c
  SITE (386): n equals a,t,g, or c
  SITE (387): n equals a,t,g, or c
  SITE (388): n equals a,t,g, or c
  SITE (389): n equals a,t,g, or c
  SITE (390): n equals a,t,g, or c
  SITE (391): n equals a,t,g, or c
  SITE (392): n equals a,t,g, or c
  SITE (393): n equals a,t,g, or c
  SITE (394): n equals a,t,g, or c
  SITE (395): n equals a,t,g, or c
  SITE (396): n equals a,t,g, or c
  SITE (397): n equals a,t,g, or c
  SITE (398): n equals a,t,g, or c
  SITE (399): n equals a,t,g, or c
  SITE (400): n equals a,t,g, or c
  SITE (401): n equals a,t,g, or c
  SITE (402): n equals a,t,g, or c
  SITE (403): n equals a,t,g, or c
  SITE (404): n equals a,t,g, or c
  SITE (405): n equals a,t,g, or c
  SITE (406): n equals a,t,g, or c
  SITE (407): n equals a,t,g, or c
  SITE (408): n equals a,t,g, or c
  SITE (409): n equals a,t,g, or c
  SITE (410): n equals a,t,g, or c
  SITE (411): n equals a,t,g, or c
  SITE (412): n equals a,t,g, or c
  SITE (413): n equals a,t,g, or c
  SITE (414): n equals a,t,g, or c
  SITE (415): n equals a,t,g, or c
  SITE (416): n equals a,t,g, or c
  SITE (417): n equals a,t,g, or c
  SITE (418): n equals a,t,g, or c
  SITE (419): n equals a,t,g, or c
  SITE (420): n equals a,t,g, or c
  SITE (421): n equals a,t,g, or c
  SITE (422): n equals a,t,g, or c
  SITE (423): n equals a,t,g, or c
  SITE (424): n equals a,t,g, or c
  SITE (425): n equals a,t,g, or c
  SITE (426): n equals a,t,g, or c
  SITE (427): n equals a,t,g, or c
  SITE (428): n equals a,t,g, or c
  SITE (429): n equals a,t,g, or c
  SITE (430): n equals a,t,g, or c
  SITE (431): n equals a,t,g, or c
  SITE (432): n equals a,t,g, or c
  SITE (433): n equals a,t,g, or c
  SITE (434): n equals a,t,g, or c
  SITE (435): n equals a,t,g, or c
  SITE (436): n equals a,t,g, or c
  SITE (437): n equals a,t,g, or c
  SITE (438): n equals a,t,g, or c
  SITE (439): n equals a,t,g, or c
  SITE (440): n equals a,t,g, or c
  SITE (441): n equals a,t,g, or c
  SITE (442): n equals a,t,g, or c
  SITE (443): n equals a,t,g, or c
  SITE (444): n equals a,t,g, or c
  SITE (445): n equals a,t,g, or c
  SITE (446): n equals a,t,g, or c
  SITE (447): n equals a,t,g, or c
  SITE (448): n equals a,t,g, or c
  SITE (449): n equals a,t,g, or c
  SITE (450): n equals a,t,g, or c
  SITE (451): n equals a,t,g, or c
  SITE (452): n equals a,t,g, or c
  SITE (453): n equals a,t,g, or c
  SITE (454): n equals a,t,g, or c
  SITE (455): n equals a,t,g, or c
  SITE (456): n equals a,t,g, or c
  SITE (457): n equals a,t,g, or c
  SITE (458): n equals a,t,g, or c
  SITE (459): n equals a,t,g, or c
  SITE (460): n equals a,t,g, or c
  SITE (461): n equals a,t,g, or c
  SITE (462): n equals a,t,g, or c
  SITE (463): n equals a,t,g, or c
  SITE (464): n equals a,t,g, or c
  SITE (465): n equals a,t,g, or c
  SITE (466): n equals a,t,g, or c
  SITE (467): n equals a,t,g, or c
  SITE (468): n equals a,t,g, or c
  SITE (469): n equals a,t,g, or c
  SITE (470): n equals a,t,g, or c
  SITE (471): n equals a,t,g, or c
  SITE (472): n equals a,t,g, or c
  SITE (473): n equals a,t,g, or c
  SITE (474): n equals a,t,g, or c
  SITE (475): n equals a,t,g, or c
  SITE (476): n equals a,t,g, or c
  SITE (477): n equals a,t,g, or c
  SITE (478): n equals a,t,g, or c
  SITE (479): n equals a,t,g, or c
  SITE (480): n equals a,t,g, or c
  SITE (481): n equals a,t,g, or c
  SITE (482): n equals a,t,g, or c
  SITE (483): n equals a,t,g, or c
  SITE (484): n equals a,t,g, or c
  SITE (485): n equals a,t,g, or c
  SITE (486): n equals a,t,g, or c
  SITE (487): n equals a,t,g, or c
  SITE (488): n equals a,t,g, or c
  SITE (489): n equals a,t,g, or c
  SITE (490): n equals a,t,g, or c
  SITE (491): n equals a,t,g, or c
  SITE (492): n equals a,t,g, or c
  SITE (493): n equals a,t,g, or c
  SITE (494): n equals a,t,g, or c
  SITE (495): n equals a,t,g, or c
  SITE (496): n equals a,t,g, or c
  SITE (497): n equals a,t,g, or c
  SITE (498): n equals a,t,g, or c
  SITE (499): n equals a,t,g, or c
  SITE (500): n equals a,t,g, or c
  SITE (501): n equals a,t,g, or c
  SITE (502): n equals a,t,g, or c
  SITE (503): n equals a,t,g, or c
  SITE (504): n equals a,t,g, or c
  SITE (505): n equals a,t,g, or c
  SITE (506): n equals a,t,g, or c
  SITE (507): n equals a,t,g, or c
  SITE (508): n equals a,t,g, or c
  SITE (509): n equals a,t,g, or c
  SITE (510): n equals a,t,g, or c
  SITE (511): n equals a,t,g, or c
  SITE (512): n equals a,t,g, or c
  SITE (513): n equals a,t,g, or c
  SITE (514): n equals a,t,g, or c
  SITE (515): n equals a,t,g, or c
  SITE (516): n equals a,t,g, or c
  SITE (517): n equals a,t,g, or c
  SITE (518): n equals a,t,g, or c
  SITE (519): n equals a,t,g, or c
  SITE (520): n equals a,t,g, or c
  SITE (521): n equals a,t,g, or c
  SITE (522): n equals a,t,g, or c
  SITE (523): n equals a,t,g, or c
  SITE (524): n equals a,t,g, or c
  SITE (525): n equals a,t,g, or c
  SITE (526): n equals a,t,g, or c
  SITE (527): n equals a,t,g, or c
  SITE (528): n equals a,t,g, or c
  SITE (529): n equals a,t,g, or c
  SITE (530): n equals a,t,g, or c
  SITE (531): n equals a,t,g, or c
  SITE (532): n equals a,t,g, or c
  SITE (533): n equals a,t,g, or c
  SITE (534): n equals a,t,g, or c
  SITE (535): n equals a,t,g, or c
  SITE (536): n equals a,t,g, or c
  SITE (537): n equals a,t,g, or c
  SITE (538): n equals a,t,g, or c
  SITE (539): n equals a,t,g, or c
  SITE (540): n equals a,t,g, or c
  SITE (541): n equals a,t,g, or c
  SITE (542): n equals a,t,g, or c
  SITE (543): n equals a,t,g, or c
  SITE (544): n equals a,t,g, or c
  SITE (545): n equals a,t,g, or c
  SITE (546): n equals a,t,g, or c
  SITE (547): n equals a,t,g, or c
  SITE (548): n equals a,t,g, or c
  SITE (549): n equals a,t,g, or c
  SITE (550): n equals a,t,g, or c
  SITE (551): n equals a,t,g, or c
  SITE (552): n equals a,t,g, or c
  SITE (553): n equals a,t,g, or c
  SITE (554): n equals a,t,g, or c
  SITE (555): n equals a,t,g, or c
  SITE (556): n equals a,t,g, or c
  SITE (557): n equals a,t,g, or c
  SITE (558): n equals a,t,g, or c
  SITE (559): n equals a,t,g, or c
  SITE (560): n equals a,t,g, or c
  SITE (561): n equals a,t,g, or c
  SITE (562): n equals a,t,g, or c
  SITE (563): n equals a,t,g, or c
  SITE (564): n equals a,t,g, or c
  SITE (565): n equals a,t,g, or c
  SITE (566): n equals a,t,g, or c
  SITE (567): n equals a,t,g, or c
  SITE (568): n equals a,t,g, or c
  SITE (569): n equals a,t,g, or c
  SITE (570): n equals a,t,g, or c
  SITE (571): n equals a,t,g, or c
  SITE (572): n equals a,t,g, or c
  SITE (573): n equals a,t,g, or c
  SITE (574): n equals a,t,g, or c
  SITE (575): n equals a,t,g, or c
  SITE (576): n equals a,t,g, or c
  SITE (577): n equals a,t,g, or c
  SITE (578): n equals a,t,g, or c
  SITE (579): n equals a,t,g, or c
  SITE (580): n equals a,t,g, or c
  SITE (581): n equals a,t,g, or c
  SITE (582): n equals a,t,g, or c
  SITE (583): n equals a,t,g, or c
  SITE (584): n equals a,t,g, or c
  SITE (585): n equals a,t,g, or c
  SITE (586): n equals a,t,g, or c
  SITE (587): n equals a,t,g, or c
  SITE (588): n equals a,t,g, or c
  SITE (589): n equals a,t,g, or c
  SITE (590): n equals a,t,g, or c
  SITE (591): n equals a,t,g, or c
  SITE (592): n equals a,t,g, or c
  SITE (593): n equals a,t,g, or c
  SITE (594): n equals a,t,g, or c
  SITE (595): n equals a,t,g, or c
  SITE (596): n equals a,t,g, or c
  SITE (597): n equals a,t,g, or c
  SITE (598): n equals a,t,g, or c
  SITE (599): n equals a,t,g, or c
  SITE (600): n equals a,t,g, or c
  SITE (601): n equals a,t,g, or c
  SITE (602): n equals a,t,g, or c
  SITE (603): n equals a,t,g, or c
  SITE (604): n equals a,t,g, or c
  SITE (605): n equals a,t,g, or c
  SITE (606): n equals a,t,g, or c
  SITE (607): n equals a,t,g, or c
  SITE (608): n equals a,t,g, or c
  SITE (609): n equals a,t,g, or c
  SITE (610): n equals a,t,g, or c
  SITE (611): n equals a,t,g, or c
  SITE (612): n equals a,t,g, or c
  SITE (613): n equals a,t,g, or c
  SITE (614): n equals a,t,g, or c
  SITE (615): n equals a,t,g, or c
  SITE (616): n equals a,t,g, or c
  SITE (617): n equals a,t,g, or c
  SITE (618): n equals a,t,g, or c
  SITE (619): n equals a,t,g, or c
  SITE (620): n equals a,t,g, or c
  SITE (621): n equals a,t,g, or c
  SITE (622): n equals a,t,g, or c
  SITE (623): n equals a,t,g, or c
  SITE (624): n equals a,t,g, or c
  SITE (625): n equals a,t,g, or c
  SITE (626): n equals a,t,g, or c
  SITE (627): n equals a,t,g, or c
  SITE (628): n equals a,t,g, or c
  SITE (629): n equals a,t,g, or c
  SITE (630): n equals a,t,g, or c
  SITE (631): n equals a,t,g, or c
  SITE (632): n equals a,t,g, or c
  SITE (633): n equals a,t,g, or c
  SITE (634): n equals a,t,g, or c
  SITE (635): n equals a,t,g, or c
  SITE (636): n equals a,t,g, or c
  SITE (637): n equals a,t,g, or c
  SITE (638): n equals a,t,g, or c
  SITE (639): n equals a,t,g, or c
  SITE (640): n equals a,t,g, or c
  SITE (641): n equals a,t,g, or c
  SITE (642): n equals a,t,g, or c
  SITE (643): n equals a,t,g, or c
  SITE (644): n equals a,t,g, or c
  SITE (645): n equals a,t,g, or c
  SITE (646): n equals a,t,g, or c
  SITE (647): n equals a,t,g, or c
  SITE (648): n equals a,t,g, or c
  SITE (649): n equals a,t,g, or c
  SITE (650): n equals a,t,g, or c
  SITE (651): n equals a,t,g, or c
  SITE (652): n equals a,t,g, or c
  SITE (653): n equals a,t,g, or c
  SITE (654): n equals a,t,g, or c
  SITE (655): n equals a,t,g, or c
  SITE (656): n equals a,t,g, or c
  SITE (657): n equals a,t,g, or c
  SITE (658): n equals a,t,g, or c
  SITE (659): n equals a,t,g, or c
  SITE (660): n equals a,t,g, or c
  SITE (661): n equals a,t,g, or c
  SITE (662): n equals a,t,g, or c
  SITE (663): n equals a,t,g, or c
  SITE (664): n equals a,t,g, or c
  SITE (665): n equals a,t,g, or c
  SITE (666): n equals a,t,g, or c
  SITE (667): n equals a,t,g, or c
  SITE (668): n equals a,t,g, or c
  SITE (669): n equals a,t,g, or c
  SITE (670): n equals a,t,g, or c
  SITE (671): n equals a,t,g, or c
  SITE (672): n equals a,t,g, or c
  SITE (673): n equals a,t,g, or c
  SITE (674): n equals a,t,g, or c
  SITE (675): n equals a,t,g, or c
  SITE (676): n equals a,t,g, or c
  SITE (677): n equals a,t,g, or c
  SITE (678): n equals a,t,g, or c
  SITE (679): n equals a,t,g, or c
  SITE (680): n equals a,t,g, or c
  SITE (681): n equals a,t,g, or c
  SITE (682): n equals a,t,g, or c
  SITE (683): n equals a,t,g, or c
  SITE (684): n equals a,t,g, or c
  SITE (685): n equals a,t,g, or c
  SITE (686): n equals a,t,g, or c
  SITE (687): n equals a,t,g, or c
  SITE (688): n equals a,t,g, or c
  SITE (689): n equals a,t,g, or c
  SITE (690): n equals a,t,g, or c
  SITE (691): n equals a,t,g, or c
  SITE (692): n equals a,t,g, or c
  SITE (693): n equals a,t,g, or c
  SITE (694): n equals a,t,g, or c
  SITE (695): n equals a,t,g, or c
  SITE (696): n equals a,t,g, or c
  SITE (697): n equals a,t,g, or c
  SITE (698): n equals a,t,g, or c
  SITE (699): n equals a,t,g, or c
  SITE (700): n equals a,t,g, or c
  SITE (701): n equals a,t,g, or c
  SITE (702): n equals a,t,g, or c
  SITE (703): n equals a,t,g, or c
  SITE (704): n equals a,t,g, or c
  SITE (705): n equals a,t,g, or c
  SITE (706): n equals a,t,g, or c
  SITE (707): n equals a,t,g, or c
  SITE (708): n equals a,t,g, or c
  SITE (709): n equals a,t,g, or c
  SITE (710): n equals a,t,g, or c
  SITE (711): n equals a,t,g, or c
  SITE (712): n equals a,t,g, or c
  SITE (713): n equals a,t,g, or c
  SITE (714): n equals a,t,g, or c
  SITE (715): n equals a,t,g, or c
  SITE (716): n equals a,t,g, or c
  SITE (717): n equals a,t,g, or c
  SITE (718): n equals a,t,g, or c
  SITE (719): n equals a,t,g, or c
  SITE (720): n equals a,t,g, or c
  SITE (721): n equals a,t,g, or c
  SITE (722): n equals a,t,g, or c
  SITE (723): n equals a,t,g, or c
  SITE (724): n equals a,t,g, or c
  SITE (725): n equals a,t,g, or c
  SITE (726): n equals a,t,g, or c
  SITE (727): n equals a,t,g, or c
  SITE (728): n equals a,t,g, or c
  SITE (729): n equals a,t,g, or c
  SITE (730): n equals a,t,g, or c
  SITE (731): n equals a,t,g, or c
  SITE (732): n equals a,t,g, or c
  SITE (733): n equals a,t,g, or c
  SITE (734): n equals a,t,g, or c
  SITE (735): n equals a,t,g, or c
  SITE (736): n equals a,t,g, or c
  SITE (737): n equals a,t,g, or c
  SITE (738): n equals a,t,g, or c
  SITE (739): n equals a,t,g, or c
  SITE (740): n equals a,t,g, or c
  SITE (741): n equals a,t,g, or c
  SITE (742): n equals a,t,g, or c
  SITE (743): n equals a,t,g, or c
  SITE (744): n equals a,t,g, or c
  SITE (745): n equals a,t,g, or c
  SITE (746): n equals a,t,g, or c
  SITE (747): n equals a,t,g, or c
  SITE (748): n equals a,t,g, or c
  SITE (749): n equals a,t,g, or c
  SITE (750): n equals a,t,g, or c
  SITE (751): n equals a,t,g, or c
  SITE (752): n equals a,t,g, or c
  SITE (753): n equals a,t,g, or c
  SITE (754): n equals a,t,g, or c
  SITE (755): n equals a,t,g, or c
  SITE (756): n equals a,t,g, or c
  SITE (757): n equals a,t,g, or c
  SITE (758): n equals a,t,g, or c
  SITE (759): n equals a,t,g, or c
  SITE (760): n equals a,t,g, or c
  SITE (761): n equals a,t,g, or c
  SITE (762): n equals a,t,g, or c
  SITE (763): n equals a,t,g, or c
  SITE (764): n equals a,t,g, or c
  SITE (765): n equals a,t,g, or c
  SITE (766): n equals a,t,g, or c
  SITE (767): n equals a,t,g, or c
  SITE (768): n equals a,t,g, or c
  SITE (769): n equals a,t,g, or c
  SITE (770): n equals a,t,g, or c
  SITE (771): n equals a,t,g, or c
  SITE (772): n equals a,t,g, or c
  SITE (773): n equals a,t,g, or c
  SITE (774): n equals a,t,g, or c
  SITE (775): n equals a,t,g, or c
  SITE (776): n equals a,t,g, or c
  SITE (777): n equals a,t,g, or c
  SITE (778): n equals a,t,g, or c
  SITE (779): n equals a,t,g, or c
  SITE (780): n equals a,t,g, or c
  SITE (781): n equals a,t,g, or c
  SITE (782): n equals a,t,g, or c
  SITE (783): n equals a,t,g, or c
  SITE (784): n equals a,t,g, or c
  SITE (785): n equals a,t,g, or c
  SITE (786): n equals a,t,g, or c
  SITE (787): n equals a,t,g, or c
  SITE (788): n equals a,t,g, or c
  SITE (789): n equals a,t,g, or c
  SITE (790): n equals a,t,g, or c
  SITE (791): n equals a,t,g, or c
  SITE (792): n equals a,t,g, or c
  SITE (793): n equals a,t,g, or c
  SITE (794): n equals a,t,g, or c
  SITE (795): n equals a,t,g, or c
  SITE (796): n equals a,t,g, or c
  SITE (797): n equals a,t,g, or c
  SITE (798): n equals a,t,g, or c
  SITE (799): n equals a,t,g, or c
  SITE (800): n equals a,t,g, or c
  SITE (801): n equals a,t,g, or c
  SITE (802): n equals a,t,g, or c
  SITE (803): n equals a,t,g, or c
  SITE (804): n equals a,t,g, or c
  SITE (805): n equals a,t,g, or c
  SITE (806): n equals a,t,g, or c
  SITE (807): n equals a,t,g, or c
  SITE (808): n equals a,t,g, or c
  SITE (809): n equals a,t,g, or c
  SITE (810): n equals a,t,g, or c
  SITE (811): n equals a,t,g, or c
  SITE (812): n equals a,t,g, or c
  SITE (813): n equals a,t,g, or c
  SITE (814): n equals a,t,g, or c
  SITE (815): n equals a,t,g, or c
  SITE (816): n equals a,t,g, or c
  SITE (817): n equals a,t,g, or c
  SITE (818): n equals a,t,g, or c
  SITE (819): n equals a,t,g, or c
  SITE (820): n equals a,t,g, or c
  SITE (821): n equals a,t,g, or c
  SITE (822): n equals a,t,g, or c
  SITE (823): n equals a,t,g, or c
  SITE (824): n equals a,t,g, or c
  SITE (825): n equals a,t,g, or c
  SITE (826): n equals a,t,g, or c
  SITE (827): n equals a,t,g, or c
  SITE (828): n equals a,t,g, or c
  SITE (829): n equals a,t,g, or c
  SITE (830): n equals a,t,g, or c
  SITE (831): n equals a,t,g, or c
  SITE (832): n equals a,t,g, or c
  SITE (833): n equals a,t,g, or c
  SITE (834): n equals a,t,g, or c
  SITE (835): n equals a,t,g, or c
  SITE (836): n equals a,t,g, or c
  SITE (837): n equals a,t,g, or c
  SITE (838): n equals a,t,g, or c
  SITE (839): n equals a,t,g, or c
  SITE (840): n equals a,t,g, or c
  SITE (841): n equals a,t,g, or c
  SITE (842): n equals a,t,g, or c
  SITE (843): n equals a,t,g, or c
  SITE (844): n equals a,t,g, or c
  SITE (845): n equals a,t,g, or c
  SITE (846): n equals a,t,g, or c
  SITE (847): n equals a,t,g, or c
  SITE (848): n equals a,t,g, or c
  SITE (849): n equals a,t,g, or c
  SITE (850): n equals a,t,g, or c
  SITE (851): n equals a,t,g, or c
  SITE (852): n equals a,t,g, or c
  SITE (853): n equals a,t,g, or c
  SITE (854): n equals a,t,g, or c
  SITE (855): n equals a,t,g, or c
  SITE (856): n equals a,t,g, or c
  SITE (857): n equals a,t,g, or c
  SITE (858): n equals a,t,g, or c
  SITE (859): n equals a,t,g, or c
  SITE (860): n equals a,t,g, or c
  SITE (861): n equals a,t,g, or c
  SITE (862): n equals a,t,g, or c
  SITE (863): n equals a,t,g, or c
  SITE (864): n equals a,t,g, or c
  SITE (865): n equals a,t,g, or c
  SITE (866): n equals a,t,g, or c
  SITE (867): n equals a,t,g, or c
  SITE (868): n equals a,t,g, or c
  SITE (869): n equals a,t,g, or c
  SITE (870): n equals a,t,g, or c
  SITE (871): n equals a,t,g, or c
  SITE (872): n equals a,t,g, or c
  SITE (873): n equals a,t,g, or c
  SITE (874): n equals a,t,g, or c
  SITE (875): n equals a,t,g, or c
  SITE (876): n equals a,t,g, or c
  SITE (877): n equals a,t,g, or c
  SITE (878): n equals a,t,g, or c
  SITE (879): n equals a,t,g, or c
  SITE (880): n equals a,t,g, or c
  SITE (881): n equals a,t,g, or c
  SITE (882): n equals a,t,g, or c
  SITE (883): n equals a,t,g, or c
  SITE (884): n equals a,t,g, or c
  SITE (885): n equals a,t,g, or c
  SITE (886): n equals a,t,g, or c
  SITE (887): n equals a,t,g, or c
  SITE (888): n equals a,t,g, or c
  SITE (889): n equals a,t,g, or c
  SITE (890): n equals a,t,g, or c
  SITE (891): n equals a,t,g, or c
  SITE (892): n equals a,t,g, or c
  SITE (893): n equals a,t,g, or c
  SITE (894): n equals a,t,g, or c
  SITE (895): n equals a,t,g, or c
  SITE (896): n equals a,t,g, or c
  SITE (897): n equals a,t,g, or c
  SITE (898): n equals a,t,g, or c
  SITE (899): n equals a,t,g, or c
  SITE (900): n equals a,t,g, or c
  SITE (901): n equals a,t,g, or c
  SITE (902): n equals a,t,g, or c
  SITE (903): n equals a,t,g, or c
  SITE (904): n equals a,t,g, or c
  SITE (905): n equals a,t,g, or c
  SITE (906): n equals a,t,g, or c
  SITE (907): n equals a,t,g, or c
  SITE (908): n equals a,t,g, or c
  SITE (909): n equals a,t,g, or c
  SITE (910): n equals a,t,g, or c
  SITE (911): n equals a,t,g, or c
  SITE (912): n equals a,t,g, or c
  SITE (913): n equals a,t,g, or c
  SITE (914): n equals a,t,g, or c
  SITE (915): n equals a,t,g, or c
  SITE (916): n equals a,t,g, or c
  SITE (917): n equals a,t,g, or c
  SITE (918): n equals a,t,g, or c
  SITE (919): n equals a,t,g, or c
  SITE (920): n equals a,t,g, or c
  SITE (921): n equals a,t,g, or c
  SITE (922): n equals a,t,g, or c
  SITE (923): n equals a,t,g, or c
  SITE (924): n equals a,t,g, or c
  SITE (925): n equals a,t,g, or c
  SITE (926): n equals a,t,g, or c
  SITE (927): n equals a,t,g, or c
  SITE (928): n equals a,t,g, or c
  SITE (929): n equals a,t,g, or c
  SITE (930): n equals a,t,g, or c
  SITE (931): n equals a,t,g, or c
  SITE (932): n equals a,t,g, or c
  SITE (933): n equals a,t,g, or c
  SITE (934): n equals a,t,g, or c
  SITE (935): n equals a,t,g, or c
  SITE (936): n equals a,t,g, or c
  SITE (937): n equals a,t,g, or c
  SITE (938): n equals a,t,g, or c
  SITE (939): n equals a,t,g, or c
  SITE (940): n equals a,t,g, or c
  SITE (941): n equals a,t,g, or c
  SITE (942): n equals a,t,g, or c
  SITE (943): n equals a,t,g, or c
  SITE (944): n equals a,t,g, or c
  SITE (945): n equals a,t,g, or c
  SITE (946): n equals a,t,g, or c
  SITE (947): n equals a,t,g, or c
  SITE (948): n equals a,t,g, or c
  SITE (949): n equals a,t,g, or c
  SITE (950): n equals a,t,g, or c
  SITE (951): n equals a,t,g, or c
  SITE (952): n equals a,t,g, or c
  SITE (953): n equals a,t,g, or c
  SITE (954): n equals a,t,g, or c
  SITE (955): n equals a,t,g, or c
  SITE (956): n equals a,t,g, or c
  SITE (957): n equals a,t,g, or c
  SITE (958): n equals a,t,g, or c
  SITE (959): n equals a,t,g, or c
  SITE (960): n equals a,t,g, or c
  SITE (961): n equals a,t,g, or c
  SITE (962): n equals a,t,g, or c
  SITE (963): n equals a,t,g, or c
  SITE (964): n equals a,t,g, or c
  SITE (965): n equals a,t,g, or c
  SITE (966): n equals a,t,g, or c
  SITE (967): n equals a,t,g, or c
  SITE (968): n equals a,t,g, or c
  SITE (969): n equals a,t,g, or c
  SITE (970): n equals a,t,g, or c
  SITE (971): n equals a,t,g, or c
  SITE (972): n equals a,t,g, or c
  SITE (973): n equals a,t,g, or c
  SITE (974): n equals a,t,g, or c
  SITE (975): n equals a,t,g, or c
  SITE (976): n equals a,t,g, or c
  SITE (977): n equals a,t,g, or c
  SITE (978): n equals a,t,g, or c
  SITE (979): n equals a,t,g, or c
  SITE (980): n equals a,t,g, or c
  SITE (981): n equals a,t,g, or c
  SITE (982): n equals a,t,g, or c
  SITE (983): n equals a,t,g, or c
  SITE (984): n equals a,t,g, or c
  SITE (985): n equals a,t,g, or c
  SITE (986): n equals a,t,g, or c
  SITE (987): n equals a,t,g, or c
  SITE (988): n equals a,t,g, or c
  SITE (989): n equals a,t,g, or c
  SITE (990): n equals a,t,g, or c
  SITE (991): n equals a,t,g, or c
  SITE (992): n equals a,t,g, or c
  SITE (993): n equals a,t,g, or c
  SITE (994): n equals a,t,g, or c
  SITE (995): n equals a,t,g, or c
  SITE (996): n equals a,t,g, or c
  SITE (997): n equals a,t,g, or c
  SITE (998): n equals a,t,g, or c
  SITE (999): n equals a,t,g, or c
  SITE (1000): n equals a,t,g, or c
  SITE (1001): n equals a,t,g, or c
  SITE (1002): n equals a,t,g, or c
  SITE (1003): n equals a,t,g, or c
  SITE (1004): n equals a,t,g, or c
  SITE (1005): n equals a,t,g, or c
  SITE (1006): n equals a,t,g, or c
  SITE (1007): n equals a,t,g, or c
  SITE (1008): n equals a,t,g, or c
  SITE (1009): n equals a,t,g, or c
  SITE (1010): n equals a,t,g, or c
  SITE (1011): n equals a,t,g, or c
  SITE (1012): n equals a,t,g, or c
  SITE (1013): n equals a,t,g, or c
  SITE (1014): n equals a,t,g, or c
  SITE (1015): n equals a,t,g, or c
  SITE (1016): n equals a,t,g, or c
  SITE (1017): n equals a,t,g, or c
  SITE (1018): n equals a,t,g, or c
  SITE (1019): n equals a,t,g, or c
  SITE (1020): n equals a,t,g, or c
  SITE (1021): n equals a,t,g, or c
  SITE (1022): n equals a,t,g, or c
  SITE (1023): n equals a,t,g, or c
  SITE (1024): n equals a,t,g, or c
  SITE (1025): n equals a,t,g, or c
  SITE (1026): n equals a,t,g, or c
  SITE (1027): n equals a,t,g, or c
  SITE (1028): n equals a,t,g, or c
  SITE (1029): n equals a,t,g, or c
  SITE (1030): n equals a,t,g, or c
  SITE (1031): n equals a,t,g, or c
  SITE (1032): n equals a,t,g, or c
  SITE (1033): n equals a,t,g, or c
  SITE (1034): n equals a,t,g, or c
  SITE (1035): n equals a,t,g, or c
  SITE (1036): n equals a,t,g, or c
  SITE (1037): n equals a,t,g, or c
  SITE (1038): n equals a,t,g, or c
  SITE (1039): n equals a,t,g, or c
  SITE (1040): n equals a,t,g, or c
  SITE (1041): n equals a,t,g, or c
  SITE (1042): n equals a,t,g, or c
  SITE (1043): n equals a,t,g, or c
  SITE (1044): n equals a,t,g, or c
  SITE (1045): n equals a,t,g, or c
  SITE (1046): n equals a,t,g, or c
  SITE (1047): n equals a,t,g, or c
  SITE (1048): n equals a,t,g, or c
  SITE (1049): n equals a,t,g, or c
  SITE (1050): n equals a,t,g, or c
  SITE (1051): n equals a,t,g, or c
  SITE (1052): n equals a,t,g, or c
  SITE (1053): n equals a,t,g, or c
  SITE (1054): n equals a,t,g, or c
  SITE (1055): n equals a,t,g, or c
  SITE (1056): n equals a,t,g, or c
  SITE (1057): n equals a,t,g, or c
  SITE (1058): n equals a,t,g, or c
  SITE (1059): n equals a,t,g, or c
  SITE (1060): n equals a,t,g, or c
  SITE (1061): n equals a,t,g, or c
  SITE (1062): n equals a,t,g, or c
  SITE (1063): n equals a,t,g, or c
  SITE (1064): n equals a,t,g, or c
  SITE (1065): n equals a,t,g, or c
  SITE (1066): n equals a,t,g, or c
  SITE (1067): n equals a,t,g, or c
  SITE (1068): n equals a,t,g, or c
  SITE (1069): n equals a,t,g, or c
  SITE (1070): n equals a,t,g, or c
  SITE (1071): n equals a,t,g, or c
  SITE (1072): n equals a,t,g, or c
  SITE (1073): n equals a,t,g, or c
  SITE (1074): n equals a,t,g, or c
  SITE (1075): n equals a,t,g, or c
  SITE (1076): n equals a,t,g, or c
  SITE (1077): n equals a,t,g, or c
  SITE (1078): n equals a,t,g, or c
  SITE (1079): n equals a,t,g, or c
  SITE (1080): n equals a,t,g, or c
  SITE (1081): n equals a,t,g, or c
  SITE (1082): n equals a,t,g, or c
  SITE (1083): n equals a,t,g, or c
  SITE (1084): n equals a,t,g, or c
  SITE (1085): n equals a,t,g, or c
  SITE (1086): n equals a,t,g, or c
  SITE (1087): n equals a,t,g, or c
  SITE (1088): n equals a,t,g, or c
  SITE (1089): n equals a,t,g, or c
  SITE (1090): n equals a,t,g, or c
  SITE (1091): n equals a,t,g, or c
  SITE (1092): n equals a,t,g, or c
  SITE (1093): n equals a,t,g, or c
  SITE (1094): n equals a,t,g, or c
  SITE (1095): n equals a,t,g, or c
  SITE (1096): n equals a,t,g, or c
  SITE (1097): n equals a,t,g, or c
  SITE (1098): n equals a,t,g, or c
  SITE (1099): n equals a,t,g, or c
  SITE (1100): n equals a,t,g, or c
  SITE (1101): n equals a,t,g, or c
  SITE (1102): n equals a,t,g, or c
  SITE (1103): n equals a,t,g, or c
  SITE (1104): n equals a,t,g, or c
  SITE (1105): n equals a,t,g, or c
  SITE (1106): n equals a,t,g, or c
  SITE (1107): n equals a,t,g, or c
  SITE (1108): n equals a,t,g, or c
  SITE (1109): n equals a,t,g, or c
  SITE (1110): n equals a,t,g, or c
  SITE (1111): n equals a,t,g, or c
  SITE (1112): n equals a,t,g, or c
  SITE (1113): n equals a,t,g, or c
  SITE (1114): n equals a,t,g, or c
  SITE (1115): n equals a,t,g, or c
  SITE (1116): n equals a,t,g, or c
  SITE (1117): n equals a,t,g, or c
  SITE (1118): n equals a,t,g, or c
  SITE (1119): n equals a,t,g, or c
  SITE (1120): n equals a,t,g, or c
  SITE (1121): n equals a,t,g, or c
  SITE (1122): n equals a,t,g, or c
  SITE (1123): n equals a,t,g, or c
  SITE (1124): n equals a,t,g, or c
  SITE (1125): n equals a,t,g, or c
  SITE (1126): n equals a,t,g, or c
  SITE (1127): n equals a,t,g, or c
  SITE (1128): n equals a,t,g, or c
  SITE (1129): n equals a,t,g, or c
  SITE (1130): n equals a,t,g, or c
  SITE (1131): n equals a,t,g, or c
  SITE (1132): n equals a,t,g, or c
  SITE (1133): n equals a,t,g, or c
  SITE (1134): n equals a,t,g, or c
  SITE (1135): n equals a,t,g, or c
  SITE (1136): n equals a,t,g, or c
  SITE (1137): n equals a,t,g, or c
  SITE (1138): n equals a,t,g, or c
  SITE (1139): n equals a,t,g, or c
  SITE (1140): n equals a,t,g, or c
  SITE (1141): n equals a,t,g, or c
  SITE (1142): n equals a,t,g, or c
  SITE (1143): n equals a,t,g, or c
  SITE (1144): n equals a,t,g, or c
  SITE (1145): n equals a,t,g, or c
  SITE (1146): n equals a,t,g, or c
  SITE (1147): n equals a,t,g, or c
  SITE (1148): n equals a,t,g, or c
  SITE (1149): n equals a,t,g, or c
  SITE (1150): n equals a,t,g, or c
  SITE (1151): n equals a,t,g, or c
  SITE (1152): n equals a,t,g, or c
  SITE (1153): n equals a,t,g, or c
  SITE (1154): n equals a,t,g, or c
  SITE (1155): n equals a,t,g, or c
  SITE (1156): n equals a,t,g, or c
  SITE (1157): n equals a,t,g, or c
  SITE (1158): n equals a,t,g, or c
  SITE (1159): n equals a,t,g, or c
  SITE (1160): n equals a,t,g, or c
  SITE (1161): n equals a,t,g, or c
  SITE (1162): n equals a,t,g, or c
  SITE (1163): n equals a,t,g, or c
  SITE (1164): n equals a,t,g, or c
  SITE (1165): n equals a,t,g, or c
  SITE (1166): n equals a,t,g, or c
  SITE (1167): n equals a,t,g, or c
  SITE (1168): n equals a,t,g, or c
  SITE (1169): n equals a,t,g, or c
  SITE (1170): n equals a,t,g, or c
  SITE (1171): n equals a,t,g, or c
  SITE (1172): n equals a,t,g, or c
  SITE (1173): n equals a,t,g, or c
  SITE (1174): n equals a,t,g, or c
  SITE (1175): n equals a,t,g, or c
  SITE (1176): n equals a,t,g, or c
  SITE (1177): n equals a,t,g, or c
  SITE (1178): n equals a,t,g, or c
  SITE (1179): n equals a,t,g, or c
  SITE (1180): n equals a,t,g, or c
  SITE (1181): n equals a,t,g, or c
  SITE (1182): n equals a,t,g, or c
  SITE (1183): n equals a,t,g, or c
  SITE (1184): n equals a,t,g, or c
  SITE (1185): n equals a,t,g, or c
  SITE (1186): n equals a,t,g, or c
  SITE (1187): n equals a,t,g, or c
  SITE (1188): n equals a,t,g, or c
  SITE (1189): n equals a,t,g, or c
  SITE (1190): n equals a,t,g, or c
  SITE (1191): n equals a,t,g, or c
  SITE (1192): n equals a,t,g, or c
  SITE (1193): n equals a,t,g, or c
  SITE (1194): n equals a,t,g, or c
  SITE (1195): n equals a,t,g, or c
  SITE (1196): n equals a,t,g, or c
  SITE (1197): n equals a,t,g, or c
  SITE (1198): n equals a,t,g, or c
  SITE (1199): n equals a,t,g, or c
  SITE (1200): n equals a,t,g, or c
  SITE (1201): n equals a,t,g, or c
  SITE (1202): n equals a,t,g, or c
  SITE (1203): n equals a,t,g, or c
  SITE (1204): n equals a,t,g, or c
  SITE (1205): n equals a,t,g, or c
  SITE (1206): n equals a,t,g, or c
  SITE (1207): n equals a,t,g, or c
  SITE (1208): n equals a,t,g, or c
  SITE (1209): n equals a,t,g, or c
  SITE (1210): n equals a,t,g, or c
  SITE (1211): n equals a,t,g, or c
  SITE (1212): n equals a,t,g, or c
  SITE (1213): n equals a,t,g, or c
  SITE (1214): n equals a,t,g, or c
  SITE (1215): n equals a,t,g, or c
  SITE (1216): n equals a,t,g, or c
  SITE (1217): n equals a,t,g, or c
  SITE (1218): n equals a,t,g, or c
  SITE (1219): n equals a,t,g, or c
  SITE (1220): n equals a,t,g, or c
  SITE (1221): n equals a,t,g, or c
  SITE (1222): n equals a,t,g, or c
  SITE (1223): n equals a,t,g, or c
  SITE (1224): n equals a,t,g, or c
  SITE (1225): n equals a,t,g, or c
  SITE (1226): n equals a,t,g, or c
  SITE (1227): n equals a,t,g, or c
  SITE (1228): n equals a,t,g, or c
  SITE (1229): n equals a,t,g, or c
  SITE (1230): n equals a,t,g, or c
  SITE (1231): n equals a,t,g, or c
  SITE (1232): n equals a,t,g, or c
  SITE (1233): n equals a,t,g, or c
  SITE (1234): n equals a,t,g, or c
  SITE (1235): n equals a,t,g, or c
  SITE (1236): n equals a,t,g, or c
  SITE (1237): n equals a,t,g, or c
  SITE (1238): n equals a,t,g, or c
  SITE (1239): n equals a,t,g, or c
  SITE (1240): n equals a,t,g, or c
  SITE (1241): n equals a,t,g, or c
  SITE (1242): n equals a,t,g, or c
  SITE (1243): n equals a,t,g, or c
  SITE (1244): n equals a,t,g, or c
  SITE (1245): n equals a,t,g, or c
  SITE (1246): n equals a,t,g, or c
  SITE (1247): n equals a,t,g, or c
  SITE (1248): n equals a,t,g, or c
  SITE (1249): n equals a,t,g, or c
  SITE (1250): n equals a,t,g, or c
  SITE (1251): n equals a,t,g, or c
  SITE (1252): n equals a,t,g, or c
  SITE (1253): n equals a,t,g, or c
  SITE (1254): n equals a,t,g, or c
  SITE (1255): n equals a,t,g, or c
  SITE (1256): n equals a,t,g, or c
  SITE (1257): n equals a,t,g, or c
  SITE (1258): n equals a,t,g, or c
  SITE (1259): n equals a,t,g, or c
  SITE (1260): n equals a,t,g, or c
  SITE (1261): n equals a,t,g, or c
  SITE (1262): n equals a,t,g, or c
  SITE (1263): n equals a,t,g, or c
  SITE (1264): n equals a,t,g, or c
  SITE (1265): n equals a,t,g, or c
  SITE (1266): n equals a,t,g, or c
  SITE (1267): n equals a,t,g, or c
ttttttttttttttttttttcttttctttttttttttttttttttttcttttttttttttttttttttttttttttcttttttttttttctttttttttttttttttttttctcttctttttttttttttttttttttttctttttttttttcttctttctttttctctcttttttttttcttttttcttttttcttttttttttttttttttcttttttttttcttctttttttttttttctttttttttttttttttttttttccnnnnnnnnnnnnnnnnnnnnnnnnnnnnnnnnnnnnnnnnnnnnnnnnnnnnnnnnnnnnnnnnnnnnnnnnnnnnnnnnnnnnnnnnnnnnnnnnnnnnnnnnnnnnnnnnnnnnnnnnnnnnnnnnnnnnnnnnnnnnnnnnnnnnnnnnnnnnnnnnnnnnnnnnnnnnnnnnnnnnnnnnnnnnnnnnnnnnnnnnnnnnnnnnnnnnnnnnnnnnnnnnnnnnnnnnnnnnnnnnnnnnnnnnnnnnnnnnnnnnnnnnnnnnnnnnnnnnnnnnnnnnnnnnnnnnnnnnnnnnnnnnnnnnnnnnnnnnnnnnnnnnnnnnnnnnnnnnnnnnnnnnnnnnnnnnnnnnnnnnnnnnnnnnnnnnnnnnnnnnnnnnnnnnnnnnnnnnnnnnnnnnnnnnnnnnnnnnnnnnnnnnnnnnnnnnnnnnnnnnnnnnnnnnnnnnnnnnnnnnnnnnnnnnnnnnnnnnnnnnnnnnnnnnnnnnnnnnnnnnnnnnnnnnnnnnnnnnnnnnnnnnnnnnnnnnnnnnnnnnnnnnnnnnnnnnnnnnnnnnnnnnnnnnnnnnnnnnnnnnnnnnnnnnnnnnnnnnnnnnnnnnnnnnnnnnnnnnnnnnnnnnnnnnnnnnnnnnnnnnnnnnnnnnnnnnnnnnnnnnnnnnnnnnnnnnnnnnnnnnnnnnnnnnnnnnnnnnnnnnnnnnnnnnnnnnnnnnnnnnnnnnnnnnnnnnnnnnnnnnnnnnnnnnnnnnnnnnnnnnnnnnnnnnnnnnnnnnnnnnnnnnnnnnnnnnnnnnnnnnnnnnnnnnnnnnnnnnnnnnnnnnnnnnnnnnnnnnnnnnnnnnnnnnnnnnnnnnnnnnnnnnnnnnnnnnnnnnnnnnnnnnnnnnnnnnnnnnnnnnnnnnnnnnnnnnnnnnnnnnnnnnnnnnnnnnnnnnnnnnnnnnnnnnnnnnnnnnnnnnnnnnnnnnnnnnnnnnnnnnnnnnnnnnnnnnnnnnnnnntcactacaacctccacctcccagccgcctgccttggcctcccaaagtgccgagattgcagcctctgcccggccgccaccccgtctgggaagtgaggagtgtctctgcctggccgcccatcgtctgggatgtgaggagcccctctgcccggccgcccagtctgggaagtgaggagcgtctccgcccggccgccatcccatctaggaagtgaggagcgcctcttcccagccgccatcacatctaggaagtgaggagcgtctctgcccggccgcccatcgtctgagatgtggggagcgcctctgccccaccgccccatctgggatgtgaggagcgcctctgcccggccgagaccccgtctgggaggtgaggagcgtctctgcccggccgccccgtctgagaagtgaggagaccctctgcctggcaaccaccccgtctgagaagtgaggagcccctccgcccggcagctgccccgtctgagaagtgaggagcctctccgcccagcagccaccccatctgggaagtgaggagcatctccgcccggcagccaccccatccgggagggaggtgagggggggtcagccccccgcccggccagctgccccatccgggagggaggtggggggtcagccccccgcccggccagccgtgccatccgggagggaggtgggggggtcagccccctgcccggccagccgcccggtccgggaggtgaggggcgcctctgcccggccgcccctactgggaagtgaggagcccctctgcccggccagccgccccgtccgggagggaggtgggggggtcagccctccgcccggccagccgccccgtctgggaggtgaggggcgcctctgcccggccgcccctactgggaagtgaggagcccctctgcccggccagccgccccgtccgggagggaggtgggggggtcggccccccgcccggccagccgccccgtccgggagggaggtgggggtgtcggccccccgcccggccagccgccccgtccgggagggaggtggggggggtcagcccccctgcccggccagccgccccgtccgggaggtgaggggcgcctctgcccggccacccctactgggaagtgaggagcccctctgcccggccagccgccccgtccgcgagggaggtgggggggtcagccccccgcccggccagccgccccgtccgggagggaggtggggggggtcagcccccctgcccggccagccgccccgtccgggagggaggtggggggggtcagcccccctgcccggccagccgccccgtccgggaggtgaggggcgcctctgcccggccgcccctactgggaagtgaggagcccctctgcccggccagctgccccgtccgcgagggaggtgggggggtcagccccccgcccggccagccgccccgtccgggagggaggtggggggggtcagcccccctgcccggccagccgccccgtccgggaggtgaggggcgcctctgcccggccgcccctactgggaagtgaggagcccctctgcccggccagccgccccgtccgcgagggaggtgggggggtcagccccccgcccggccagccgccccgtccgggagggaggtggggggggtcagcccccctgcccggccagccgccccgtccgggaggtgaggggcgcctctgcccggccgcccctactgggaagtgaggagcccctctgcctggccagccgccccgtccgggagggaggtggggggtcagccccccgaccggccagccgccccgtccgggagggaggtgggggggtcagccccccgcccggccagccgccccgcccaggaagtgaggggcgcttctgcccggccgcccctactgggaagtgaggagcccctctgcccggccaccaccccgtctgggaggtgtgcccaacagctcattgagaacgggccaggatgacaatggcggctttgtggaatagaaaggcgggaaaggtggggaaaagattgagaaatcggatggttgccgtgtctgtgtagaaagaagtagacatgggagacttttcattttgttctgcactaagaaaaattcctctgccttgggatcctgttgatctgtgaccttacccccaaccctgtgctctctgaaacatgtgctgtgtccactcagggttaaatggattaagggcggtgcaagatgtgctttgttaaacagatgcttgaaggcagcatgctcgttaagagtcatcaccaatccctaatctcaagtaatcagggacacaaacactgcggaaggccgcagggtcctctgcctaggaaaaccagagacctttgttcacttgtttatctgctgaccttccctccactattgtcccatgaccctgccaaatccccctctgtgagaaacacccaagaattatcaataaaaaaataaattaaaaaaaaaaaaaaaaatattccatgctcatggataggaagaatcaatattgttaaaatggccatactgcccaaagcaatctacacattcaacactattcctatcaaactaccaatgtcacttttcacagaattagaaaaaaactaccacaaaattcatatggaaccaaaaaagaacctaaatagccaagataatcctaagcaaaaagaacaacgacagaggtatgacattacctgacttcaaactatgctatcagactacaagaaccaaaagagcatggtacttgtacgaaaacagacacatagaccaatggaacagattagagagcccagaaataaagctgcacacctataaccatctgatctttgacaaagttgacaaaaataagcaatgggaaaaggactccctatgtaacaaatgatgttgggataactagctagccatatgcagaagaatgaaactgaaccccaacttttcaccatacataa

SEQ ID NO: 10195 - DNA, 384 bp, Homo sapiens
ccttgggaagctgttgatctatgaccttacaccccaacccggtgctctctgaacatgtgctgtgtcagctcaggattaaatggattaagggcggcgcaagatgtgctttgttaaacagatgcttgaaggcagcatgctcgttaagagtcatcaccactccctaatctcaagtaccgagggacacaaacactgcggaaggccgcagggtcctctgcctaggaaaaccagagacctttgttcacttgtttatctgctgaccttccctccactattgtcctatgaccctgccaaatccccctctgcgagaaacacccaagaatgatcaataaaaaataaaaaaataaataaaaattaaaaaaaacgaaaaacaaaataagaaactgg

SEQ ID NO: 10196 - DNA, 572 bp, Homo sapiens
acccctgtctgggaggtgtacccaacagctcagtgagaacagggccatgatgacaatggcagtttttgtggaatagaaaggggggaaaggtggggaaaagattgacaaagccgatggttgccgtgtctgtgtagaaagaagtagacatgggagacttttcattttgttctgtactaagaaaaattcttctgccttgggatcctgttgatctgtgaccttacacccaaccctgtgctctctgaaacatgtgctgtgtccactcagggttaaatggattaagggcggtgcaagatgtgctttgttaaacagatgcttgaaggcagcatgctggttaagagtcatcaccactccctaatctcaagtacccagggacacaaacactgcggaaggccacaggatcctctgcctaggaaaaccagagacctttgttcacttgtttatctgctgaccttccctccactattgtcctatgaccctgccaaatccccctctgcaagaaacacccaagaatgatcaataaaaataaataaataaagaaagaaagaaagaactctccaaaaattatactaaaa

SEQ ID NO: 10197 - DNA, 429 bp, Homo sapiens
tgggagacttttctttttgttctgtactaagaaaaatcttctgccttgggatcctgttgatctatgaccttacccccaaccccttgctctctgaaacatgtgctgtgtccactcagggttgaatggattaagggtggtgcaagatgtgctttgttaaacagatgcttgaaggcagcatgctcgttaagagtcatcaccactccctaatctcaagtacccagggacacaaacactgcggaaggccgcagggtcctctgcctaggaaaaccagagacctttgttcacttgtttacctgctgaccttccctccactattgtcctatgaccctgccaaatccccctctgcgagaaacacccaagaatgatcaattaaaaaaaaaaaaaagaatttgacaaagtaaaaaaaaaaaaaaaaaaaaaaaaaggggg

SEQ ID NO: 10198 - DNA, 353 bp, Homo sapiens
ccccaaccccagtgctctctgaaacatgtgctgtgtccactcagggttaaatggattaagggcggtgcaagatgtgctttgttaaacagatgcttgaaggcagcatgctcgttaagagtcatcaccactccctaatctcaagtacccagggacacaaacactgcggaaggccgcagggtcctctgcctaggaaaaccagagacccttgttcacatgtttatctgctgaccttccctccactattgtcctatgaccctgccaaatccccctcttcgagaaacacccaagaatgatcaataaatactaaaaaaataaataaataaataaataaaggtgctgagaacataaaaaaa

SEQ ID NO: 10199 - DNA, 315 bp, Homo sapiens
  SITE (34): n equals a,t,g, or c
cactcagggttaaatggattaagggcggtgcaanatgtgctttgttaaacagatgcttgaaggcagcatgctcgttaagagtcatcaccaatccctaatctcaagtaatcagggacacaaacacttcggagggccgcagggtcctctgcctaggaaaaccggagacctttgttcacttgtttatctgctgaccttccctccactattgtcccatgaccctgccaaatccccctctgtgagaaacacccaagaattatcaataaaaaaataaattaaagaaaaaaaaaaaaagtgaaaaagcttacaaaaaaaaaa

SEQ ID NO: 10200 - DNA, 466 bp, Homo sapiens
ggaaaagattgagaaatcggatggttgccgtgtctgtgtagaaagaagtagacatgggagacttttcattttgttctgcactaagaaaaattcttctgccttgggatcctgttgatctgtgaccttacccccaaccctgtgctctctgaaacatgtgctgtgtccactcagggttaaatggattaagggcggtgcaagatgtgctttgttaaacagatgcttgaaggcagcatgctcgttaagagtcatcaccactccctaatctcaagtaatcagggacacaaacactgcggaaggccgcagggtcctctgcctaggaaaaccagagacctttgttcacttgtttatctgctgaccttccctccactattgtcccatgaccctgccaaatccccctctgtgagaaacacccaagaattatcaataaaaaaaaaattaaaaaacaaaaaacaaaaaacaaagttaa

SEQ ID NO: 10201 - DNA, 420 bp, Homo sapiens
tgggagacttttcattttgttctgcactaagaaaaattcctctgccttgggatcctgttgatctgtgaccttacccccaaccctgtgctctctgaaacatgtgctgtgtccactcagggttaaatggattaagggcggtgcaagatgtgctttttaaacagatgcttgaaggcagcatgctcgttaagagtcatcaccaatccctaatctcaagtaatcagggacacaaacactgcggaaggccgcagggtcctctgcctaggaaaaccagagacctttgttcacttgtttatctgctgaccttccctccactattgtcccatgaccctgccaaatccccctctgtgagaaacacccaagaattatcaataaaaaaataaatttaaaaaaaaaaaaattattaaaaaaaaaaaaagataa

SEQ ID NO: 10202 - DNA, 399 bp, Homo sapiens
cattctgtactaagaaaaattcttctgccttgggatcctgttgatcggtgaccttacccccaaccctgtgctctctgaaacatgtgctgtgtccactcagggttaaatggattaagggcggtgcaagatgtgctttgttaaacagatgcttgaaggcagcatgctccttaagagtcatcaccactccctaatctcaagtacccagggacacaaacactgcggaaggccgcagggtcctctgcctaggaaaaccggagacctttgttcacttgtttatctgctgaccttccgtccactcttgtcctctgaccctgccaaatccccctctgcgagaaacacccaagaatgatcaataaaaaaaataaaaataaaataaaaataaaaataaataaataaaat

SEQ ID NO: 10203 - DNA, 308 bp, Homo sapiens
tccactcagggttgaatggttaaagggcggtgcaagatgtgctttgttaaacagatgcttgaaggcagcatgctccttaagagtcatcaccactcctaatctcaagtacccagggacacaaacactgcggaaggccgcagggtcctctgcctaggaaaaccagagacctttgttcacttgtttatctgctgaccttccctccactattgtcctgtgaccctgccaaatcctcctctgtgagaaacacccaagaatgatcaattaaaaaataaataaataaataaataaaataaaaagtaaggaaaaga

SEQ ID NO: 10204 - DNA, 579 bp, Homo sapiens
cccggcacgacccgtctgggaggtgtgcccagcggctcattggggatgggccatgatgacaatggcggttttgtggaatagaaaggcgggaagggtggggaaaaaattgagaaatcggatggttgccgggtctgtgtggatagaagtagacatgggagacttttcattttgttctgtactaagaaaaattcttctgccttgggatcctgttgatctgtgaccttatccccaaccctgtgctctctgaaacatgtgctgtgtccactcagggttaaatggattaagggcggtgcaagatgtgctttgttaaacagatgcttgaaggcagcatgctcattaagaggcatcaccactccctaatctcaagtacccagggacacaaacactgcggaaggccgcagggtcctctgcctaggaaaaccagagacctttgttcacttgtttatctgctgaccttccctccactattgtcctatgaccctgccaaatccccctctgcgagaaacacccaagaatgatcaataaaaaaataaataaataaataaataataataataataaataaaataaaaataaaaa

SEQ ID NO: 10205 - DNA, 538 bp, Homo sapiens
ttgagaacaggccatgatgacaatggcagttttgtggaatagaaaggggggaaaggtggggaaaagattgagaaatcggatggttgccgtgtctgtgtagaaagaagtagacatgggagacttttcattttgttctgtactaagaaaaattcttctgccttgggatcctgttgatctgtgaccttacacccaaccctgtgctctctgaaacatgtgctgtgtccactcagggttaaatggattaagggcggtgcaagatgtgctttgttaaacagatgcttgaaggcagcatgctggttaagagtcatcaccactccctaatctcaagtacccagggacacaaacactgcggaaggccacaggatcctctgcctaggaaaaccagagacctttgttcacttgtttatctgctgaccttccctccactattgtcctatgaccctgccaaatccccctctgcaagaaacacccaagaatgatcaataaaaataaataaataaagaaagaaagaaagaactctccaaaaattatactaaaa

SEQ ID NO: 10206 - DNA, 394 bp, Homo sapiens
gaaaaaacctcctttcttgtgatcctgttgaacggtgaccctacccccaccctgtgctctctgaaacatgtgctgtgtccactcagggttaaatggattaagggtggtgcaagatgtgctttgttaaacagatgcttgaaggcagcatgctagttaagagtcatcaccactccctaatctcaagtacccagggacacaaacactgcggaaggccgcagggtcctctgcataggaaaaccagagacctttgttcacttgtttatctgctgaccctccctccactattgtcctatgaccctgccaaatccccctctgtgagaaacacccaagaatgatcaataaaaataaataaataaataaataaataaataaataaataaataaaaataaaata

SEQ ID NO: 10207 - DNA, 368 bp, Homo sapiens
ttgatctgtgaccttacccccaaccctgtgctctctgaaacatgtggtgtatccactcagggttgaatggattaagggcggtgcaagatgtgctttgttaaacagatgcttgaaggcagcatgctcgttaagagtcatcaccactccctaatctcaagtacccagggacacaaaaactgcagaaggccgcagggtcctctgcctaggaaaaccagagacctttgtgcacttgtttatctgctgaccttccctccactattgtcctgtgatcctgccaaatccccctctgcgagaaacacccaagaatgatcaattaaaaaaaaaaaagaaaagaaaaaaaaaaaaaaatgaacaaaacctccaagaag

SEQ ID NO: 10208 - DNA, 437 bp, Homo sapiens
tgtagaaagaagtagacacgggagacttttcattttgttctgcactaagaaaaattcttctgccttgggatcctgttgatctgtgaccttacccccaaccctgtgctctctgaaacatgtgctgtgtccactcagggttaaatggattaagggcggtgcaagatgtgctttgttaaacagatgcttgaaggcagcatgctcgttaagagtcatcaccaatccctaatctcaagtaatcagggacacaaacactgcggaaggccgcaggtcctctgcctaggaaaaccagagacctttgttcacttgtttatctgctgaccttccctccactattgtcccatgaccctgccaaatccccctctgtgagaaacacccaagaattatcaataaaaaaataaatttaaaaaaaaaaaaaaaaagaaaaaaaaaaaaaaaga

SEQ ID NO: 10209 - DNA, 372 bp, Homo sapiens
ctgttgatatatgaccttacccccaaccctgtgctctctgaaacatgtgctgtgtccactcagggttaaatggattaagggcagtgcaagatgtgctttgttaaacagatacttgaaggcagcagactcgttaagagtcatcaccactccctaatctcaagtacccagggacacaaacactgcggaaggctgcagggtcctctgcctaggaaaaccagagacatttgttcacttgtttatctgctgaccttccctccactattgtcctatgaccctgccaaatccccctctgcgagaaacatccaagaatgatcaataaaaaaaaaattccaaaaaaaaaaaaaaaagaaataggaaggaagataaaatgag

SEQ ID NO: 10210 - DNA, 455 bp, Homo sapiens
aaggttgccaagtctgtgagaaagaagtagacaggggagacttttcatttgttctgcactaagaaaaattcctctgcttgggatcctgttgatctgtgacctacccccaacccggtgctctctgaaacatgtgctgtgtccactcagggttaaatggattaagggcggtgcaagatgtgctttattaaacagatgcttgaaggcagcatgctcgttaagagtcatcaccaatccctaatctcaagtaatcagggacacaaacactgcggaaggccgcagggtcctctgcctaggaaaaccagagacctttgttcacttgtttatctgctgaccttccctccactattgtcccatgaccctgccaaatccccctctgtgagaaacacccaagaattatcaataaaaaaataaattaaaaaaaaaaaaagaaaaatttaaactgaaaaacacaataa

SEQ ID NO: 10211 - DNA, 459 bp, Homo sapiens
tgagaaatcggatggtgctgtgtctgtgtagaaagaagtagacatgggagacttttcattttgttctgtactaagaaaaattcttttgccttgggatcctgttgatctatgaccttgcccccagccctgtgctctctgaaacatgtgctgtgtccactcacggttaaatggattaagggtggtgcaagatgtgctttgttaaacatatgcttgaaggcagcatgctcattaagaatcatcaccactccctaatctcaagtacccagggacacaaacactgcggaaggctgcagggtcctctgcctaggaaggccagagacctttgttcacttgtttgtctgctgaccttccctccactattgtcctatgaccctgccaaatccccctctgcgagaaacacccaagaatgatcaataaaaataaaataaaataaaataaaatggagcaaaaagaaaaaga

SEQ ID NO: 10212 - DNA, 312 bp, Homo sapiens
gtccactcagggttaaatgattaaaggcggtgcaagatgtgctttgttaaacagatgcttgaaggcagcatgctcgttaagagtcatcgccactccctaatctcaagtacccagggacacaaacactgcggagggcgcagggtcctctgcctaggaaaaccagagacctttgttcacttgtttatctgctgaccttccctccactattgtcctatgaccctgccaaatccccctctgcgagaaacacccaagaatgatccataaaaaaaaataaaaaaataaaaataaaaaaaaaagaactgaataaacata

SEQ ID NO: 10213 - DNA, 399 bp, Homo sapiens
ctaagaaaaattcttctgccttgggatcctgttgatcggtgaccttacccccaaccctgtgctctctgaaacatgtgctgtatccactcagggttgaatggattaagggcggtgcaagatgtgctttgttaaacagatgcttgaaggcagcatgctccttaagagtcatcaccactccctaatctcaagtacccagggacacaaacactgcagaaggccgcagggtcctctgcctaggaaaaccagagacctttgttcacttgtttatctgctgaccttccctccactattgtcctgtgaccctgccaaatccccctctgcgagaaacacccaagaatgatcaattaaaataataataataataataataataataataataataaaattaaaaaaaaa

SEQ ID NO: 10214 - DNA, 333 bp, Homo sapiens
tggggcatgtgctgtgtccactcagggttgaatggattaagggcggtgcaagatgtgctttgttaaacagatgcttgaaggcagcatgctcattaagagtcatcaccactccctaatctcaagtacccagggacacaaacactgcggaaggctgcagggtcctctgcctaggaaaaccagagacctttgctcacttgtttatctgctgaccttccctccactattgtcctatgaccctgccaaatccccctctgcgagaaacacccaagaatgatcaataaaaaaaaaaaaaaaaagaatttttataattttaatgagaaaaattaagaaaca

SEQ ID NO: 10215 - DNA, 455 bp, Homo sapiens
tgttactgtgtctgtgtagaaagaagtagacataggagactccatttgttctgtactaagaaaaattcttctgccttgggatgctgttaatctataaccttacccccaaccccgtgctctctgaaacatgtgctgtgtccactcagggttaaatggattaagggcggtgcaagatgtgctttgttaaacagatgcttgaaggcagcatgctcgttaagagtcatcaccactccctaatctcaagtacccagggacacaaacactgcggaaggccgcagggtcctctgcctaggaaaaccagagacccttgttcacatgtttatctgctgaccttccctccactattgtcctatgaccctgccaaatccccctcttcgagaaacacccaagaatgatcaataaatactaaaaaaataaataaataaataaaggtgctgagaacataaaaaaaaatg

SEQ ID NO: 10216 - DNA, 451 bp, Homo sapiens
aaagaggtagacatgggagacttttcattttgttctgtactaagaaaaattcttctgcctgtgatcctgttgatctgtgaccttacccccaaccctgtgctctctgaaacatgtgctgtgtccactcagggttaaatggattaagggcggtgcaagatgtgctttgttaaacagatgcttgaaggcagcatgcttgttaagagtcatcaccactccctaatctcaagtacccagggacacaaacactgcggaaggcctcagggtcctctgcctaggaaaaccagagacctttgttcacttgtttatctgctgaccttccctccactattgtcctatgaccctaccaaatccccctctgcaagaaacacccaagaatgatcaataaaaaataaataaataaataaaaataataataaataaataaataaaaataaaaataaaaaataaaaaa

SEQ ID NO: 10217 - DNA, 381 bp, Homo sapiens
ccttgggatgctgttgatctatgaccttacccccaacctggtgctctctgaaacatgtgctgtgtccactcagggttaaatggattaagggcggtgcaagatgtgctttgttaaacagatgcttgaaggcagcatgctcgttaagagtcatcaccactccctaatctcaagtatccagggacacaaacactgcggaaggccccagggtcctctgcctaggaaaaccagagacctttgttcacttgtttatctgctgaccttccctccactattgtcctatgaccctgccaaatgcccctctgcgagaaacacccaagaatgatcaattaaaaaaaaaatatataaatcaaaaccaaaaagaaataaaaaaataaaaaaata

SEQ ID NO: 10218 - DNA, 371 bp, Homo sapiens
ctgttgatctgtgaccttacccccaaccctgtgctctctgaaacatgtgctgtgtccactcagggttaaatggattaagggcggtgcaagatgtgctttgttaaacagatgcttgaaggcagcatgctcgttaagagtcatcaccaatccctaatctcaagtaatcagggacacaaacactgcggaaggccgcagggtcctctgcctaggaaaaccagagacctttgttcacttgtttatctgctgaccttccctccactattgtcccatgaccctgcgaaatccccctctgtgagaaacacccaagaattatcaataaaaaaataaatttaataaaaaaaaaaaaaaccaaccagaaaaaaaaaaaaaaa

SEQ ID NO: 10219 - DNA, 372 bp, Homo sapiens
tgggatgctgccgatctatgaccttacccccaacccggtgctctctgaaacatgtgctgtgtccactcagggttaaatggattaagggcggtgcaagatgtgctttgttaaacagatgcttgaaggcagcatgctcgttaagagtcatcaccactccctaatctcaagtacccagggacacaaacactgcggtaggccgcagggtcctctgcctaggaaaaccagagacctttgttcacttgtttatctgctgaccttccctccactattgtcctatgaccctgccaaatccccctatgcgagaatcacccaagaatgatcaataaaaaataaaaataaataaaaataaaataaaataaaataaaatgaaga

SEQ ID NO: 10220 - DNA, 639 bp, Homo sapiens
gggaggtggggggtgcctccgcccggccgccccttctgggaagtgaggagcccctctgcctggccaccaccccgtctgggaggtgtacccaacagctcattgagaacgggccatgatgacgatggcagttttgtggaatagaaaagggggaaaggtggggaaaagatagagaaatcagattgttgctgtgtctgtgtagaaaggagtagacatgggagacttaattttgttctgtactaagaaaaattcttctgccttgggatgctgttgatctatgaccttacccccaaccctgtgctctctgaaacatgtgctgtgtccactcagggttaaatggattaagggcggtgcaagatgtgctttgtcaaacagatgcttgaaggcggcatgctcattaagagtcatcaccactccctaatctcaagtacccagggacacaaacactgtggaaggctgcagggtcctctgcctaggaaagccagagacctttgttcacttgtttacctgctgaccttccctccactattgtcctatgaccctgccaaatccccctctctgagaaacacccaagaatgatcaataaaaaaaaaataataaaaaaaaaaagaagaagaagaagaaaagaggaagaggaagagg

SEQ ID NO: 10221 - DNA, 441 bp, Homo sapiens
aaaaagaggtgaacatgggagacttttcatttgttcttgtactagaaaaaattcttcttccttgggatcctgttgatctgggccttgcccccagccctgtgctctctgaaacatgtgcctgtgtccactcagggttgaatggataaagggtggtgcaagatgtgctttgttaaacagatgcttgaaggcagcatgctcgttaagagtcatcaccactccctaatctcaagtacccagggacacaaacactgcagaaggccgcagggtcctctgcctaggaaaaccaaagacctctgttcacttgtttatctgctgaccttccctccactattgtcctgtgaccctgccaaatccccctctgcgagaaacacccaagaatggtccataaaaaaaaaaaaaaaaaaaggaaagaaaaagaagaagaagaaaaaaaaaaaaagg

SEQ ID NO: 10222 - DNA, 521 bp, Homo sapiens
tttatggaatagacagggggaaaggtgggcaaaagattgagaaatcggatggttgccgtgtctgtgtagaaagaggtagacatgggagacttttcattttgttctgtactaagaaaaattcttctgccttgtgatcctgttgatctgtgaccttacccccaaccctgtgctctctgaaacatgtgctgtgtccactcagggttaaatggattaagggcggtgcaagatgtgctttgttaaacagatgcttgaaggcagcatgcttgttaagagtcatcaccactccctaatctcaagtacccagggacacaaacactgcggaaggcctcagggtcctctgcctaggaaaaccagagacctttgttcacttgtttatctgctgaccttccctccactattgtcctatgaccctaccaaatccccctctgcaagaaacacccaagaatgatcaataaaaaataaataaataaataaaaataataataaataaataaataaaaataaaaataaaaaataaaaaa

SEQ ID NO: 10223 - DNA, 254 bp, Homo sapiens
gcttgaaggcagcatgctcgttaagagtcatcaccactccctaatctcaagtacccagggacacaaacactgaggaaggccgcagggtcctctgcctaggaaaaccagagacctttgttcacttgtttagctgctgaccttccctccactattgtcctaagaccctgccaaatccccctctgtgagaaacacccaagaattatcaataaaaaataaataaataaataaataaattaaaaaatatatatatataa

SEQ ID NO: 10224 - DNA, 435 bp, Homo sapiens
tctgtgtaaaaagtagaagactgggagacttttcattttgttctgcactaagaaaaattcctctgccttgggatcctgttgatctgtgaccttacccccaaccctgtgctctctgaaacatgtgctgtgtccactcagggttaaatggattaagggcggtgcaagatgtgctttgttaaacagatgcttgaaggcagcatactctttaagagtcatcaccaatccctaatctcaagtaatcagggacacaaacactgcggaaggccgcagggtcctctgcctaggaaaaccagagacctttgttcacttgtttatctgctgaccttccctccactattgtcccatgaccctgccaaatccccctctgtgagaaacacccaagaattatcaataaaaaaataaattaaaaaaaaaaaaaaaaaaagaactggtaaa

SEQ ID NO: 10225 - DNA, 354 bp, Homo sapiens
cttatccccaaccctgtgctctctgaaacaagtgctgtgtcactcagggttaaatggattaagggcggtgcaagatgtgctttgttaaacagatgcttgaaggcagcatgctccttaagagtcatcaccactccctaatctcaagtacccagggacacaaacactgcggaaggccacagggtcctctgtctaggaaaaccagagacctttgttcacttgtttatctgctgaccttccctccactattgtcctatgaccctgccaaatccccctctgcgagaaacacccaggaatgatcaataaaaaaataaataaataaaaaaataaataaataaatcaataaaaaataaaaaa

SEQ ID NO: 10226 - DNA, 418 bp, Homo sapiens
tgggagacttttcattttgttctgtactaagaaaaatcttccgccttgggatcctgttgatctgtgaccttacccccaaccctgtgctctctgaaacatgtgctgtgtccactcagggttaaatggattaagggcggtgcaagatgtgctttgttaagcagatgcttgaaggcagcatgctcgttaagagtcatcaccactccctaatctcaagtacccagggacacaaacactgcggaaggccacagggtcctctgcctaggaaaaccagagacctttgttcacttgtttatctgctgaccttccctccactattgtcctatgaccctgccaaatccccctctgtgagaaacacccaagaattatcaataaaaaataaatttaaaaaaataaataaataaaaaaaataaaataaaaa

SEQ ID NO: 10227 - DNA, 360 bp, Homo sapiens
gaccttaccccccaaccctgtgctctctgaaacatgtaccgtgtccactcagggttaaatggattaagggctgtgcaagatgtgctttgttaaacagatgcttgaaggcagcatgctccttaagagtcatcaccactccctaatctcaagtacccagggacacaaacactgcggaagttcccagggtcctctgcctaggaaaaccagagacctttgttcacttgtttatctgctgaccttccctccactattgtcctatgaccctgccaaatccccctctgcgagaaacacccaagaacgatcaaaaaaaaaaaaaaaaaaaaaatgtaaatcataattattctcagcaaagtattaaaa

SEQ ID NO: 10228 - DNA, 284 bp, Homo sapiens
taagggcggtgcaagatgtgctttgttaaacagatgcttgaaggcagcatgctcgttaagagtcatcaccactccctaatctcaagtacccagggacacaaatactgtggaaggcagcagggtcctctgcctaggaaaaccagagaccttttttcacttgtttatctgctgaccttccctccactattgtcctatgaccctgccaaatccccctctgcgagaaacacccaagaatgatcaattaaaaaaaaataataaattaaaaaaaaaaaaagaaaatctaa

SEQ ID NO: 10229 - DNA, 410 bp, Homo sapiens
gagacttcattttgttctgtactaagaaaaattcttctgccttgggatgctgttgatctatgaccttacccccaaccctgtgctctctgaaacatgtgctgtgtccactcagggttaaatggattaagggcggtgcaagatgtgctttgttaaacagatacttgaaggcagcatgctccttaagagtcatcaccactccctaatctcaagtacccagggacacaaacactgcagagggccgcagggtcctctgcctaggaaaaccagagacctttgttcacttgtttgtatgttgaccttccctccactgttgtcctgtgaccctgccaaatccccctctgcgagaaacacccaagaatgatcaatgaaaaaaataaaaataaaaaaaataaaaaaaaggaagttaaata

SEQ ID NO: 10230 - DNA, 419 bp, Homo sapiens
agacttttcattttgttctgtactaagaaaaattcttctgccttgggatcctgttgatctgtgaccttacccccaaccctgtgctctctgaaacatgtgctgtgtccactcagggttgaatggattaagggcggtgcaagatgtgctttgttaaacagatgcttgaaggcagcatgctccttaagagtcatcaccactccctaatctcaagtacccagggacacaaacactgcggaaggccgcagggtcctctgcctaggaaaaccagagacctttgttcacttgtttatctgctgaccttccctccactattgtcctgtgaccctgccaaatccccctctgcgagaaacacccaagaatgatcaattaaaaaaaaaataaaataaataaaataaaataatacttccaatttaaactaa

SEQ ID NO: 10231 - DNA, 465 bp, Homo sapiens
ggatggttgctgtgtctgtgtggaaggaagtagacatgggagacttttcattttgttctgcactaagaaaaattcctctgccttgggatcctgttgatctgtgaccttacccccaaccctgtgctctctgaaacatgtgctgcgtccactcagagttaaatggattaagggcggtgcaagatgtgctttgttaaacagatgcttgaaggcagcatgctcgttaagagtcatcaccaatccctaatctcaagtaaccagggacacaaacactgcggaaggccgcagggtcctctgcctaggaaaaccagagacctttgttcacttgtttatctgctgaccttccctccactattgtcccatgaccctgccaaatccccctctgtgagaaacacccaagaattatcaattaaaaaaaaaaaaaataaataaataaataaataaataaataaataaaagaaaatgtgg

SEQ ID NO: 10232 - DNA, 382 bp, Homo sapiens
aattcctccgccttgggatcctgttgatctgtgacacttacccccaaccctgtgctctctgaaacatgtgctgtgtccactcagggttaaatggattaagggcggtgcaagatgtgctttgttaaacagatgcttgaaggcagcatgctcgttaagagtcagcaccaatccctaatctcaagtaatcagggacacaaacactgcggaaggccgcagggtcctctgcctaggaaaaccagagacctttgttcacttgtttatctgctgaccttccctccactattgtcccatgaccctgccaaatccccctctgtgagaaacacccaagaattatcaataaaaaaataaatttaaaaaataaacaaacaaacaaaaaaaaaaa

SEQ ID NO: 10233 - DNA, 414 bp, Homo sapiens
catttagttctgtactaagataaattcttctgccttgggatcctgttgatcggtgaccttacccccaaccctgtgctctctgaaacatgtgctgtgtccactcagggttaaatggattaagggcggtgcaagatgtgctttgttaaacagatgcttgaaggcagcatgctcgttaagaatcatcaccactccctaatctcaagtacccagggacacaaacactgcggaaggcggcagggtcctctgcctaggaaaaccagagacctttgttcacttgtttatctgccaaccttccctccactattgtcctatgaccctgccaagtccccctttggggggaacaccccaggatggtccaaaaaaggaaaaaaaaaaaaaaaaaaaagaaaacaaattctaagaggttataaaagg

SEQ ID NO: 10234 - DNA, 218 bp, Homo sapiens
ccactccctatctcaagtacccagggacacaaacactgcggaaggccgcagggtcttctgcctaggaaaaccagagacccttgttcacttgtttatctgctgaccttccctccactattgtcctatgaccctgccaaatccccctctccgagaaacacccaagaatgatcaataaatactaaaaaaaaaaaaaaaaaaaaaagtaaaagttcataaaa

SEQ ID NO: 10235 - DNA, 4129 bp, Homo sapiens
gcagtggcgtgatcttggctcactgcagccttgaactcccaggctcaagtggatcctccctcttcagccccgcaagtagctgggactacaggagtgcaccaccacccccatctaatatttttttgttgttattctagggacgagttctcactatgttgcccaggctggcctcgaactcctgggctcaagcaatcctcctgcgttggcctcccaaagtcctgggattacaggtgtaagccactacggctggcctattattgctgtattctaacttattcatctcctatggtacgatttttcattttttctaatttatgttttcatacttttatatatcgtgctatgttaaatagcttcatatagttttcttttatgcagtgattttagcctcttgatgatcttctttatcagttatggcactggtgacttaaaatggatgttcttcctctgtcattcctccgacgtttgttagctggcatttttaacaaagagctttcacttctcctttttatttcggtatctctgctgactaatgcacttgcattttattccatgggttattttccatcactgtcattgttctttctgatgcctatgctgtcccagattcgaccgtgggagccttcagcctgtgtcctgtgtcctttcaactgtctctattaatctttgagcatttcttactttctcacagaacaaaagtatccaggcttatgttgccctctttctgccttgggcctggactcagccatttctcttaaggattatcttaagcatcatttagcttagaaattaatcagctttccaaaagatgtacaaaatgctaactttccttttgagcaatttttttctaaaattagattttttttagaggattattcctttattctttctataagttcatttgaagtgtggtgttaggaaaccatgcctgagtttaactcttccagtgtttatcagatcattttttccctgtgctgtatcatcttaaacatcttaaacaattccttgacatttttatatttctttgtattttcattgactgtattgccatttctagattagctggttaatgtacaaattggattattttgcatttccttggtaatataggctgttgatgctaaaggaggaaaaacaaatggacttgaaaactggtcgaatgcatcggaaagccatttttggagatgattctatgctaacatcctctctcctttcttgatctcttaattttttttttcttacccaagtatatacaggttgattttgtctttctggaagatccaagatctttggtttagagatatattctcttaatgttaactggtattagaatactcttttctgtattttatttcaatacacttgagaatagaaatgattgtattttcttttaacttgtgcagtagagtgtggcatacaaatgttgtattctcagtatttcaaaaaattaccttcttactgtacaagttgtattcagcatataaagtctattccagctttgttgtagatgcagtgtgattattacatgccgataaggtatgaattggagatgggatccaaaattactgtacttagtgtaatttttaagctaattacagggttggtggtgaatattttacttctgcaaaatgaaaacagcatttcatcagaagttgttttatggtctttcagacattttattgtatatctttggtgctttttgcccatgaagtatctcttttgtgtgtttgtgtgtatgtgtattgatctgctgtaaatttcacagcactcattgtcagggatcagcagaatcaggcctaggcagagagctgagcagtactctcagtacgtctctgtgtccttgttgccacattatctctgttgtttatttataagttggagaactctctgacctgtaacaaaggttggataggtcagagacaattgggagaggaatcctctgctctattgtcacctgtgcctcactccaaaatatgctctgaaatcaatatttaaatattaaatttgtatggtgaatgtattcttttttaatgttaattaaatgattggtcagcccacttaatatttacaatgcaggacttactttgcgtattctctgtcttgtatttttgctttatttaagctaggctagcctccaagctggaagctgaattgacagttgaaaaataatgacatgtatacaaggtatgtttgaaggattgcagatgcaggggcaccatatgctaaaggagtgttggaagctcactgcagaagatgacaaaagcagactgatatgtattatttgctgaaatataagctggaggcacaggtgaagattgccaaacctaatgaacagtttggcaaataagacaggctgtcaggccatggcagttcagcagtgggcgtgctgcctgtgaaccaagtcatttgttccagaggactacacttaaataccacaaataaaatcttccttgtcactgatatcacagtgaaatagatgttgtctttcagatttctggttgaattaccagccattaacatctggtgatttgggttgtaaaattatttttagttttgcctgttcatatttcatccagaaagcccaaacaagatatattttcccacataagaatgtaagcagtataatgccccgtccgggagggaggcggggggcagcccccacctggccagccgccccttccaggagggaggtggggggcgcctctgcccggctgccccgtctgggatgtggggggggcccctctgcccggccgccaccccgtctgggaggtgtacccagcagctcattgagaacgggccatgatgacgatggcggttttgtcgagtggaaggaggggaagtgtggggaaaggaaaaagaaatcagattgttgctgtgtctgtgtagaaagaagtagacatgggagactccattttgttctgtactaagaaaaattcttctgccttgggatgctgttaatctatggccttacccccaaccccttgctctctgaaacgtgctgtgtccactcagggttaagtggattaagggcggtgcaagatgtgctttgttaaacagatgcttgaaggcagcatgctccttgagagtcatcaccactccctaatctcaaatacccagggacacaaaaactgcggaaggccgcagggtcctctgcctaggaaaaccagagacccttgttcacatgtttatctgctgaccttccctccactattgtcctatgaccctgccaaatccccctctccgagaaacacccaagaatgatcaataaatactaaaaaaaaaaaaaaaaaaaaaaaaagaactctgcaagaacatctgccccagaactgcctgtccaacctggactgacatcatccttgttattgatctttgtagccaaatataattattttaaaacaaacaaaaaagaagaatgtaagcagtataagactttaaaacacacaaatgaaaaatatacatgactacatgcttcagtgaactaaaactttcatctgtgatctttattttgcaacgttctgaagtaacattacagtcttttcagtgtgctgtgtcatttatatcccttactttatcctgggaatcctgtattgccattgagcatatgcaaattgagacatgtgcatagcttctccccgttgagcccatcagtggggaggagctatgtaccggggacatttggcaaagattttcatgagtctgttggatgtaacagctccttaagaaaacctcagtttaccttccctattttttaccatttgtaaaactaaggctcagtgatgtaaaatataacacattctgtgctgtggcataactgcagcttaggtttttatattcaagacaagcagaggtatagttgaaaaggtatgaacacttattatgcttcaagatccctttgttggtttagttgtggcattttagaacagcggacttgggactaaagcatctttctatctgggatcagtatttctaagttgcctttaagctgaataaacatttggtttttatatttaattgcttcgatgtgaaacactgcaatttaaaaaattacacatatgtaatacagtattttacactaaataatagtgactggcagtccattggccgaagaagtattatttttcagatattc

SEQ ID NO: 10236 - DNA, 649 bp, Homo sapiens
cagccgccccgtccgggaggtgaggggcgcgtctgcccggccgcccctgctgggaagtgaggagcccctctgcccggccaccaccccgtctgggaggtgtgcccagcggctcattgagaacgggccatgatgacagtggcagttttgtggaatagaaaggggggaaaggtggggaaaagattgagaaatcggatggttgccgtgtctgtgtagaaagaagtagacatgggagacttttcattttgctctgtactaagaaaaattcttctgccttgggatcctgttgatctgtgaccttacccccaaccctgtgctctctgaaacatgtgctgtgtccactcagggttaaatggattaagggcggtgcaagatgtgctttgttaaacagatgcttgaaggcagcatgctcgttaagtgtcatcaccactccctaatctcaagtacccagggacacaaacactgccgaaggcctcagggtcctctgcctaggaaaaccagagacctttgttcacttgtttatctgctgaccttccctccactattgtcctatgaccctgccaaatccccctctacgagaaacacccaagaatgatcaattaaaaaaaaataaaaataaaaataaaaataaaagaaaaaaaaaaaaagaaaa

SEQ ID NO: 10237 - DNA, 374 bp, Homo sapiens
tgccttgggatcctgttgatctgtgaccttacccccaaccctgtgctctctgaaacatgtgctgtgtccactcagggttaaatggattaagggcggtgcaagatgggctttgttaaacagatgcttgaaggcagcatgctcgttaagagtcatcaccaatccctaatctcaagtaatcagggacacaaacactgcggaaggccgcagggtcctctgcctaggaaaaccagagacctttgttcacttgtttatctgctgaccttccctccactattgtcccatgaccctgccaaatacccctctgtgagaaacacccaagaattatcaataaaaaaataaatttaataaaaaaaaaaaaaaaaacaggtgaaaaa

SEQ ID NO: 10238 - DNA, 428 bp, Homo sapiens
gtagacatgggagacttttcattttgttccgtactaagaaaaattcttctgccttgggatcctgctcatcggtgaccttacccccaaccctgtgctctctgaaacatgtgctgtgtccactcagagttgaatggattaagggcggtgcaagatgtgctttgttaaacagatgcttgaaggcagcatgctcgttaacaatcatcaccactccctaatctcaagtacccagggacacaaacactgaggaaggccacagggtcctctgcctaggaaaaccagagacctttgttcacttgcttatctgctgaccttccctccactattgtcctatgaccctgccaaatccccctctgcgagaaacacccaagaatgatcaataaaaaataaaaaataaaaaaaaaggtaaaaaaaaaaaaaaaaaaaaagaa

SEQ ID NO: 10239 - DNA, 4461 bp, Homo sapiens
gcagtggcgtgatcttggctcactgcagccttgaactcccaggctcaagtggatcctccctcttcagccccgcaagtagctgggactacaggagtgcaccaccacccccatctaatatttttttgttgttattctagggacgagttctcactatgttgcccaggctggcctcgaactcctgggctcaagcaatcctcctgcgttggcctcccaaagtcctgggattacaggtgtaagccactacggctggcctattattgctgtattctaacttattcatctcctatggtacgatttttcattttttctaatttatgttttcatacttttatatatcgtgctatgttaaatagcttcatatagttttcttttatgcagtgattttagcctcttgatgatcttctttatcagttatggcactggtgacttaaaatggatgttcttcctctgtcattcctccgacgtttgttagctggcatttttaacaaagagctttcacttctcctttttatttcggtatctctgctgactaatgcacttgcattttattccatgggttattttccatcactgtcattgttctttctgatgcctatgctgtcccagattcgaccgtgggagccttcagcctgtgtcctgtgtcctttcaactgtctctattaatctttgagcatttcttactttctcacagaacaaaagtatccaggcttatgttgccctctttctgccttgggcctggactcagccatttctcttaaggattatcttaagcatcatttagcttagaaattaatcagctttccaaaagatgtacaaaatgctaactttccttttgagcaatttttttctaaaattagattttttttagaggattattcctttattctttctataagttcatttgaagtgtggtgttaggaaaccatgcctgagtttaactcttccagtgtttatcagatcattttttccctgtgctgtatcatcttaaacatcttaaacaattccttgacatttttatatttctttgtattttcattgactgtattgccatttctagattagctggttaatgtacaaattggattattttgcatttccttggtaatataggctgttgatgctaaaggaggaaaaacaaatggacttgaaaactggtcgaatgcatcggaaagccatttttggagatgattctatgctaacatcctctctcctttcttgatctcttaattttttttttcttacccaagtatatacaggttgattttgtctttctggaagatccaagatctttggtttagagatatattctcttaatgttaactggtattagaatactcttttctgtattttatttcaatacacttgagaatagaaatgattgtattttcttttaacttgtgcagtagagtgtggcatacaaatgttgtattctcagtatttcaaaaaattaccttcttactgtacaagttgtattcagcatataaagtctattccagctttgttgtagatgcagtgtgattattacatgccgataaggtatgaattggagatgggatccaaaattactgtacttagtgtaatttttaagctaattacagggttggtggtgaatattttacttctgcaaaatgaaaacagcatttcatcagaagttgttttatggtctttcagacattttattgtatatctttggtgctttttgcccatgaagtatctcttttgtgtgtttgtgtgtatgtgtattgatctgctgtaaatttcacagcactcattgtcagggatcagcagaatcaggcctaggcagagagctgagcagtactctcagtacgtctctgtgtccttgttgccacattatctctgttgtttatttataagttggagaactctctgacctgtaacaaaggttggataggtcagagacaattgggagaggaatcctctgctctattgtcacctgtgcctcactccaaaatatgctctgaaatcaatatttaaatattaaatttgtatggtgaatgtattcttttttaatgttaattaaatgattggtcagcccacttaatatttacaatgcaggacttactttgcgtattctctgtcttgtatttttgctttatttaagctaggctagcctccaagctggaagctgaattgacagttgaaaaataatgacatgtatacaaggtatgtttgaaggattgcagatgcaggggcaccatatgctaaaggagtgttggaagctcactgcagaagatgacaaaagcagactgatatgtattatttgctgaaatataagctggaggcacaggtgaagattgccaaacctaatgaacagtttggcaaataagacaggctgtcaggccatggcagttcagcagtgggcgtgctgcctgtgaaccaagtcatttgttccagaggactacacttaaataccacaaataaaatcttccttgtcactgatatcacagtgaaatagatgttgtctttcagatttctggttgaattaccagccattaacatctggtgatttgggttgtaaaattatttttagttttgcctgttcatatttcatccagaaagcccaaacaagatatattttcccacataagaatgtaagcagtataatgccccgtccgggagggaggcggggggcagcccccacctggccagccgccccttccaggagggaggtggggggcgcctctgcccggctgccccgtctgggatgtggggggggcccctctgcccggccgccaccccgtctgggaggtgtacccagcagctcattgagaacgggccatgatgacgatggcggttttgtcgagtggaaggaggggaagtgtggggaaaggaaaaagaaatcagattgttgctgtgtctgtgtagaaagaagtagacatgggagactccattttgttctgtactaagaaaaattcttctgccttgggatgctgttaatctatggccttacccccaaccccttgctctctgaaacgtgctgtgtccactcagggttaagtggattaagggcggtgcaagatgtgctttgttaaacagatgcttgaaggcagcatgctccttgagagtcatcaccactccctaatctcaaatacccagggacacaaaaactgcggaaggccgcagggtcctctgcctaggaaaaccagagacccttgttcacatgtttatctgctgaccttccctccactattgtcctatgaccctgccaaatccccctctccgagaaacacccaagaatgatcaataaatactaaaaaaaaaaaaaaaaaaaaaaaaagaacactgcaagaacatctgccccagaactgcctgtccaacctggactgacatcatccttgttattgatctttgtagccaaatataattattttaaaacaaacaaaaaagaagaatgtaagcagtataagactttaaaacacacaaatgaaaaatatacatgactacatgcttcagtgaactaaaactttcatctgtgatctttattttgcaacgttctgaagtaacattacagtcttttcagtgtgctgtgtcatttatatcccttactttatcctgggaatcctgtattgccattgagcatatgcaaattgagacatgtgcatagcttctccccgttgagcccatcagtggggaggagctatgtaccggggacatttggcaaagattttcatgagtctgttggatgtaacagctccttaagaaaacctcagtttaccttccctattttttaccatttgtaaaactaaggctcagtgatgtaaaatataacacattctgtgctgtggcataactgcagcttaggtttttatattcaagacaagcagaggtatagttgaaaaggtatgaacacttattatgcttcaagatccctttgttggtttagttgtggcattttagaacagcggacttgggactaaagcatctttctatctgggatcagtatttctaagttgcctttaagctgaataaacatttggtttttatatttaattgcttcgatgtgaaacactgcaatttaaaaaattacacatatgtaatacagtattttacactaaataatagtgactggcagtccattggccgaagaagtattatttttcagatattctgctctgtcatcagctgtagacactgacctggtatttatctggaaaggcttgctgtcaggggttcacagtgctgcttgtgggttatctccagaccctttacatacagcactttaggacagcgtgagtcacaggttgcactagaatttgcctttgaaattagacctaaactatgtggaactggaacccttgtacacaaagctctctatcatccaaatcctgctgaactctcttaggaaagaacagttttacagattcattctttccacacacaagatttccccactgcccagttactctcacctttttattttcttgactgttatgttttact

SEQ ID NO: 10240 - DNA, 526 bp, Homo sapiens
ccatgatgacaatggcggttttgtggaatagaaaggggggaaaggtggggaaaagattgagaaatcggatggttgccgtgtctgtgtagaaagaagtagacataggagacttttcattttgttctgtactaagaaaaattcttctgccttgggatcctgttgatctgtgaccttacccccaaccctgtgctctctgaaacatgtgctgtgtccactcagggttaaatggattaagggcggtgcaagatgtgcttcgttaaacagatgtttgaaggcagcatgctcgttaagagtcatcaccactccctaatctcaagtacccagggacacaaacactggggaaggccgcagggtcctctgcctaggaaaaccagagacctttgttcacttgtttatctgctgaccttccctccactattgtcctatgaccctgccaaatccccctctgtgagaaacacccaagaatgatcaataaaaaataaataaataaataaataaataaataaataaataaataaacaaaaaa

SEQ ID NO: 10241 - DNA, 395 bp, Homo sapiens
aaaaatcttctgcctgggatctgttgatctgtgaccttacccccaaccctgtgctctctgaaacatgtgctgtatccactcagggttgaatggattaagggcggtgcaagatgtgctttgttaaacagatgcttgaaggcagcatgctcgttaagagtcatcaccactccctaatctcaagtacccagggacacaaacactgcggaaggccgcagggtcctctgcctaggaaaaccagagacctttgttcacttgtttatctgctgaccttccctccactattgtcctgtgaccctgccaaatccccctctgcgagaaacacccaagaatgatcaataaaaaaaaaaaattaaaaaaaaaataaataaataaataaataaaaataataaaatgaa

SEQ ID NO: 10242 - DNA, 481 bp, Homo sapiens
ggaaaaaattgagaaatcggatggttgccgggtctgtgtggatagaagtagacatgggagacttttcattttgttctgtactaagaaaagttcttctgccttgggatcctgttgatctgtgaccttatccccaaccctgtgctctctgaaacatgtgctgtgtccactcagggttaaatggattaagggcggtgcaagatgtgctttgttaaacagatgcttgaaggcagcatgctcgttaagagtcatcaccactccctaatctcaagtacccagggacacaaacactgcggaaggccgcagggtcttctgcctaggaaaaccagagacctttgttcacttgtttatctgctgaccttccctccactattgtcctatgaccctgccaaatccccctctgcgagaaacacccaagaatgatcaaaaaaaataaataaataaataaataaataaataatgaaagctggaagataaatgaatg

SEQ ID NO: 10243 - DNA, 280 bp, Homo sapiens
atgtgcttagataaacagatgcttgaaggcagcatgctcgttcagagtcatcaccactccctaatctcaagtaatcagggacacaaacactgcggaaggccgcagggtcctctgcctaggaaaaccagagacctttgttcacttgtttatctgctgaccttccctccactattgtcccatgaccctgccaaatccccctctgtgagaaacacccaagaattatcaataaaaaaataaattaaaaaaaaaataaaaataaaaataaaaaaaaataaagcaa

SEQ ID NO: 10244 - DNA, 416 bp, Homo sapiens
catgctgcaggtctcatttagttctgtactaagaaaaattcttctgccttgggatcctgttgatctatgaccttacccccaaccctgtgctctctgaaacatgtgctgtgtccactcagggttaaatggattaagggcggtgcaagatgtgctttgttaaacagatgcttgaaggcagcatgctcgttaagagtcatcaccactccctaatctcaagtacccagggacacaaacactgcggaaggccacagggtcctctgcctaggaaaaccagagacctttgttcacttgtttatctgctgaccttccttccactattgtcctatgaccctgccaaatccccctctgtgagaaacacccaagaatgatcaataaaataaataaataaataaataattaattaaacacactgaaaa

SEQ ID NO: 10245 - DNA, 468 bp, Homo sapiens
tgatggtgccagtctgtgtagaaagaagtagacatgggagactttcatttagttctatactaagaaaaattcttctgccttgggatcctgttgatctgtgaccttacccccaaccctgtgctctctgaaacatgtgctgtgtccactcagggttaaatggattaagggcggtgcaagatgtgctttgttaaataaacagatgcttgaaggcagcatgctcgttaagagtcgtcaccactccctaatctcaagtacccagggacacaaacactgcggaaggccgcagggtcctctggctaggaaaaccagagacctttgttcacttgtttatctgctgaccttccctccactattgtcctatgaccctgccaaatccccctctgtgagaaacacccaagaatgatcaataaaaaataaataaataaataaataaaataaaataaaataaaataaaatgggagaagggtg

SEQ ID NO: 10246 - DNA, 407 bp, Homo sapiens
ttttgttttgttctgtactaagaaaagttattctgccttgggatcctgttgatctgtgaccttacccccaaccctgtgctctctgaaacatgtgctgtgtccactcagggttaaatggattaagggcggtgcaagatgtgctttgttaaacagatgcttgaaggcagcatgctcgttgagagtcatcaccactccctaatcttaagtacccagggacacaaacactgcggaaggccacagggtcctctgcctaggaaagccagagacctttgttcacttgtttatctgctgaccttccctccactattgtcctatgaccctgccaaatccccctctgcgagaaacacccaagaatgatcaataaataaataaataaataaataaagacctacaaacaaaataaataa

SEQ ID NO: 10247 - DNA, 370 bp, Homo sapiens
ggatgctgttgatctatgaccttacccccaaccctgtgctctctgaaacatgtgctctgtccactcagggttcaatggattaagggcggtgcaagatgtgctttgttaaacagatgcttgaaggcagcatgctcgttaagagtcatcaccactccctaatctcaagtacccagggacacaaacacctcggaaggccgcagggtcctctgcctaggaaaaccagagacctttgttcacttgtttatctgctgaccttccctccactattgtcctatgaccctgccaaatccccctctgtgagaaacacccaagaatgatcaataaaaaaataaataaataaaaaataaaaaataaaaaaaataaaaaaaaa

SEQ ID NO: 10248 - DNA, 406 bp, Homo sapiens
tctactaagaaaaatcttctgccttgtggatctgttgatctgtgaccttacccccaaccctgtgctctctgaaacatgtgctgtatccactcaggattgaatggattaagggcggtgcaagatgtgctttgttaaacagatgcttgaaggcagcatgctcgttaagagtcatcaccactccctaatctcaagtacccagggacacaaacactgcggaaggccgcagggtcctctgcctaggaaaaccagagacctttgttcacttgtttatctgctgaccttccctccactattgtcctgtgaccctgccaaatccccctctgcgagaaacacccaagaatgatcaataaaaaaaaaaaattaaaaaaaaaataaataaataaataaataaaaataataaaatgaa

SEQ ID NO: 10249 - DNA, 439 bp, Homo sapiens
tgtgtagaaagaagtagacatgggagacttttcattttgttctgtactaagaaaaattcttctgccttgggatcctgttgatctgtgaccttacccccaaccctgtgctctctgaaacatgtgctgtgtccactcagggttaaatggattaagggcggtgcaagatgtgctttgttaaacagatgcttgaaggcagcatgctcgttaagagtcatcaccactccctaatcgcaagtaccgagggacacaaacactgcggaaggccgcagggtcctctgcctaggaaaaccagagacctttgttcacttgtttatctgctgaccttcccgccactattgtcctgtgtccctgccaaatccccctctgcgagaaacacccaagaatgatcaataaaaaaaaaaataataaaataaaataaaaaaataaaaaaaaaaacata

SEQ ID NO: 10250 - DNA, 523 bp, Homo sapiens
tgatgacaatggcggttttgtagaatagaaagaggggaaaggtggggaaaagattgagaaatcggatggttgccgtgtctgtgtagaaagaggtagacgtgggagacttttcattttgttctgtactgagaaaaattcttctgccttgggatcctgttgatcggtgaccttacccccaaccctgtgctctctgaaacatgtgctgtatccactcagggttgaatggattaagggtggtgcaagatgtgctttgttaaacagatgcttgaaggcagcatgctccttaagagtcatcaccactccctaatctcaagtacccagggacacaaacactgcggaaggccgcagggtcctctgcctaggaaaaccagagacctttgttcacttgtttatctgctgaccttccctccactattgtcctgtgaccctgccaaatccccttctgcgagaaacacccaagaatgatcaataaaaaaaaaataataataataataataaaattaaattaaattaaaaaaaaaaa

SEQ ID NO: 10251 - DNA, 371 bp, Homo sapiens
ggatcctgttgatctgtgaccttacccccaaccctgtgctctctgaaacatgtgctgtgtccactcagggttaaatggattaagggcggtgcaagatgtgctttgttaaacagatgcttgaaggcagcatgctcgttaagagtcgtcaccacaccctaatctcaagtacccagggacacaaacactgcggaaggccgcagggtcctctgcctaggaaaaccagagacctttgttcacttgtttatctgctgaccttccctccactattgtcctatgaccctgccaaatccccctctgtgagaaacacccaagaatgatcaataaaaaataaataaataaataaataaataaataaataaataaataaaaaa

SEQ ID NO: 10252 - DNA, 394 bp, Homo sapiens
ttaatttttttttttagtatttatttatcattcttgggtgtttctcggagaggaggatttggcagggtcataggacaatagtggagggaaggtcagcagataaacatgtgaacaaaggtctctggttttcctaggcagaggaccctgcagccttccacagtgtttgtgtccctgggtacttgagattagggagtggtgatgactcttaacgagcatgctgccttcaagcatctgtttaacaaagcacatcttgcaccgcccttaatccatttaaccctgagtggacacagcacatgtttcagagagcacggggttgggggtaaggttatagattaacagcatcccaaggcagagtaatttttcttagtacagaacaaactggagtctcccacct

SEQ ID NO: 10253 - DNA, 3334 bp, Homo sapiens
tacacattaccttcttttcaagggcctgtttcctttgcctccataactgttgtgggtattgacggccaggcttctaaacctcttaaaactccccaactctggtgccaacttagacaatactcttttaagcactcctttttagttatccccacctgcccagttcccttattaggctgagacactttaactaaattatctgcttccctgactattcctggactacagctatatctcattgcctcccttcttcccaatccaaagcctcctttgcatcctcctcttgtatcccccaccttaacccacaagtataagatacgactactccctccttggcaaccgatcatgcaccccttaccatctcattaaaacctaatcacccttaccccactcagtgccaatattccaccccgaagcatgctttaaaaagattaaagcctgttatcactcgcctgctacaacatagccttttagaacctataaactctccttacaattcccccattttacctgtcctaaaaccagacaagccttacaagttagttcaggatctgcaccttatcaacaaaattgttttgcctatccaccccatggtgccaaacccatatactctcctatcctcagtacctgcctctacaacccattattctgttctagatctcaaacatgctttctttactattcctttgcatccttaatcccagcctctcttcgctttcacttggactgaccctgacacccatcaagctcagcaaattacctaggctgtactgccgcaaagcttcacagacagcccccattacttcaatcaagcccaaatttcttcctcatctgttacctatcttggcataattctcataaaaacacacgtgctctccctgccaatcatgtccgactgatctctcaaaccccaaccccttctacaaaacaacaactcctttccttcctgggcatggttggatactttcacctttggatacctggttttgccatcctaacaaaaccattatataagctcacaaaaggaaacctagctgaccccatagatcctaaatcctttccccactcctctttccgttccttgaagacagctttagaaactgccccactctagctctccctgactcatcccaacccttttcattccacacagctgaagtgcagggctgtgcagttggaattcttacataaggaccaggatcgcatcctgtagcctttttgtccaaacaacttgaccttactgttttaggctggccatgatgtctccatgcagccactgctgctgccctaatacttttagaagccctcaaaatcaaaaactatgctcaactcactctctacagttctcgtaacttccaaaatctattttcttcctcatacctgacgcatatgctttctgcttcctggctccttcagctgtactcactctttgttgagtctcccacaattaccattgttcctggcccagacttcaatccggcctcccacattattcctgataccacacctgacccccatgactgtatctctctgatccacctgacattcaccccatttccccaaatttccttctttcctgttcctcaccctgatcacgcttgatttattgaaggtggttccaccaggcctaatcgccacacaccagcaaaggcaggttatgctatagtacaagccactagcccacctcttagaacctctcatttcatttccatcgtggaaatctatcctcaaggaaataatttctcagtgttccatctgcttttctactactcctcagtgattattcaggccccctcccttccctacacatcaagctcgaggatttgccccacccaggactggcaacttagctttactcaacatgccctgagtcagataactaaaatacctcttagttcaggtagacactttcactggataggtagaggcatttcctacagggtccgagaaggccaccgcagtcatttcttcccttctgtcagacataattcctcagtttagccttcccacctcaatacagtctgataacagacgagcctttattagtcaaatcagccaagcagtttttcaggctcttagtattcagtgaaacctttatatcccttacagtcctccgtcttcaagaaaagtagaatggactaaaggtcttttaaaaacacacctctccaagctcagccaccaacttaaaaaggactggacaatacttttaccactttcccttctcagaattcaggcctgtcctcagaatgctacagggtacagcccatttaagctcctgtatagatgctcctttttattaggccccagtcttattccagacaccagaccaacttagactgtgccccaaaaaaacttgtcatccctgctatcttctgtctagtcatactcctattcaccgttctcaactactcatacatgccctgctcttgtttacactgccctgctcttgtttacattgtttttctaagccatcacagctgatatctccaggtgctatccacaaactgccactcttaactcttgaagtaaataaataatctttgctggcaggactatgctgaatctccttaggcactctctaatcagatatcctgagtcatcccaattcttagaccttttatacctgtttttctccttttgttattccatttggtttctcaattcatccaaaaccatatccaggccatcaccaatcattctatatgacaaatgtttcttctaacatccccacaatatcaccccttaccacaagacctcccttcagcttaatctctcccactctaggttcccacgccacccctaatcccgcttgaggcagccctgagaaacatcgctcattctctctccataccaccccccaaaaatttttgccgccccaacacttcaacactatttttatttttcttattaatataagaaggcaggaatgtcaggcctttgagcccaagccaagccatcgcatcccttgtgacttgcacatataagcccagatggcctgaaataagtgaagaatcacaaaagaagtgagtatgccctgccccaccttaactgatgacattccaccacaaaagaagtgtaaatgaccggtccttgccttaagtgatgacattaccttgtaaaagtccttttcctagctcattctggctcaaaaagcacccccactgagcaccttgcgacccccactcctgcccgtgagagaacaagccccctttgactgtaattttcctttacctacccaaatcctataaaacagccccacccttatctcccttcgctgactctcttttcggactcagcccacctgcacccaggtgaaataaacagctttattgctcac

SEQ ID NO: 10254 - DNA, 2713 bp, Homo sapiens
agtatatttaaatcaaagcaagaaatcccatttccaaatggcaataaagcatgtgttacatagaatcagtgcatgaaagtgttttagtagcccagattagattgtaccctggcaaataagcaagagttctttttcattttcatcttgcaattcaactgggtatttgggttctttttctattcactcatgtcagatagagacatacatgttgtaaattattttgtcagaatgaaagcctggcagattaaatgctttcttctcttcttgctttacttgatatcaatctcttgttcatttcttgataatatgtttggttatttttgttttcattgcttttagtgtcagagatggctttggattccccgttctgtgtgctgctgtctggctcctgaacccagctgtagaggtgtgtcaatcccaactggtgaagtactgagaggaagctacacaaaaggcagcaaagtattagtaagtgtacctctgacattttaaccacctctgacttttccatggaatggacaagtagtagtctctgtcagagctacattttaaaggagaaaaagaaacgtgaagtcatgaactgttaatttatgctgttatttttgtgtttactcacctcatttatattgacttgtaaattagtaatttgtgaactattatttatcaattcattgcctacatgtcaggaaacaaattttcttcttaataaagaatccggttgctgggcacaatggttcacacctgtaatctcagcacgtttggagggcaaggcaggaggattccttgaggccaggagttcaagaccagtctgggcaatatagcaagatttcatctctacaaaaaaatgaaaacattggctgggcatggtggctcattcctatagttcaggctactgaggagcctgatgtaggaggatcatgtgaccccagtagtttgaggctgcagtgagctatgatcctaacactgctctccagcctgggtgacacaccaagttgccctctcttcaaaaaaggaatctagagacatcagtgtgtgcacaagcatggtttgtgaatttggaagtgcgtatgtgcatagttgtgctcaagaatgtgttgatgattataccttctcagaatgaaggtaattttttttctttttttttttttgagatggagtcttgctctgttgccaggctggagtgcagtggtgctctcagctcactgcaacctctgcctcccgggttcaagcaattctcctgcctcagcctcccaagtagctgggactacaggcacacaccaccactcccggctaattttttgtgttttagtagagatggggttttaccatgttggccaggatggtctcgatcccccgaccttgtgatccatccaccttggcctcccaaagtgttgggattacaggtgtgagccaccgtgcctggcctgaaggtcatttttataaagatctctccatgtcttagatttgattcttcctttgaatatttttctcattgacatttgaaagcacctgaccttatataaaatgaacaattttcataactccataaaaggagaattatggcatcatctactatttctttctcttgtctcataaatctaaaccatcaacctgcttatttttgtatactgtcacactgtgtattccctgcattgaatgcctttctattgacattgtctataaaaattgtgggaagttttctgcaccctgaaatttctgttatgcggattaaatatccactatccgtgtttttccgagtcttacagcagaaagggtaaatgcagccctcacagcagcctgttgttcgtcctgcaattgtgtttccatcacattacacaaagcctctttgtcttcgtggttctaccctactaataagttttttaaaaaattatgtaatgtgtgtatatacaaatacctatatgtttgtgtgtacacatacagctaatatctgctgagattatgtatgcatgaactatagaattaacttgtaattttaagaaaataaattattttgtaaagataaatctcatgtttaagaagaggaattacaattgaatcatttagggatgcctcagcctaaacataatatggaaaaagccataaccaaaagtcattttagagtactgctaggttactcaacctatcatcacatttaattaaaatgtcagtttgaaccatggccagtctattttggttaatatgttatttaaatcaacttgtgaagtcttcattttaaatatagaatttgtgttaatgaactggaaaataacattctattcttggaagatgtgttaaagtctaaagatttatgactttgtaaaagaagaaaaccagctggtgatcagttggcattagtatatgaggatgtactcatatttggtaatagccatttttttctaactagagtaagggagttgggaatgggaggcagaaacaaggacacagacatgtaaaaaatcatagaacaaaactgtattgagttctgcgtatgggtctgtgatccatggttcagtttgagaggttcatgtgtcccttatgagaagggacaggaaagccaggaggacaggagtatgtttgggcctgtgcctctgcttccaccacagaagtcagcagctctacctttctcttttctcctctttatctaataattgtctcctcttcaaatttgggaaatgaacttaatcaaagatttgttgtgtttttttgtttgttt

SEQ ID NO: 10255 - DNA, 242 bp, Homo sapiens
catttttcaagagaccccaaatattcctcaaataccacgccatcttccataggttgcttttttgttttttaagagacctgaggccacttggctttcttttggtggccaaaacactagagcagaaacagggagtttgtggctgtccagaagccacatgccttgtctctgaaagttttatttagattatgttgtattatctcctatgggtaggtttccactgatgtgtggcttatgtgaattat

SEQ ID NO: 10256 - DNA, 171 bp, Homo sapiens
agctcaaggaggcctgcctgcctctgtagactgcacctctgggggcagggcatagccaaacaaaaggcagcagaaacctctgcagacttaaatgtcccagtctgacagctttgaagagagtaatggttctcccagcacgcagctggagatctgagaacggacagactgcct

SEQ ID NO: 10257 - DNA, 131 bp, Homo sapiens
ttttttttttgagacggagtctcgctctgttgcccaggctggagtgcagtggcacaatctcagctcactgcaagctcctcctcccgggttcacgccattctcctgcctcagcctcccgagtagctgggact

SEQ ID NO: 10258 - DNA, 8538 bp, Homo sapiens
aaacttgatcttcttacccatgagtatagtttacttttcagcttatagatttttgtctttcaataaaactttttactttttctctatatttcaactaaatgtcttcaatatgccctatttttgtgctattgcaaatgatatcctttatgacacttattgctttggaatagaaattataaattgatcttctattcaccagtgttattcaactagtattaattcttgttgtttttctgttgccatcctcaagtaatggcagtttattactttttccctaatttcttattaatacaatcttgtaccagcaagagtctcatagccaatgctggattatgtagtgatgatgtctgttttgatcctgattttaaaagcaatgtttctgagaactcttctttacatgtattttagccattgattttggatagtctttatcagattcacttttgtttctgtatctcattttctaagactaattatgaataggttttgatttttaaaacaaataaattgaaaatatctattgagatatttttctgctttaatctgctaatgtggtcaattgtgtcgatattcttatctctaaaacattttgtattcattggacaaatcttagtcatgatgtatttttaaaataaatcaatagatacttttgccaaaactggtttaaaatttttgattccatgttcatgcataaaatcatttggtgattattccccatttttcttttctctgagagagtttgtataaagatagaattatatgttttccaaaattttagtagaacatctccagtatctccccttctcgcagaactcttaaccctattttttaaatcctatgtcttactaagagagtatagatgtgtgcttctggaactaacatttcccttgaaggatatttccactgttttattaatcctttgtttcttctattatatacatctttttttcaaaaccacatatattatcatttctgatagtctgttattatctccactaccttattttgcttaccttgctgtaacagaatacatgagactgtgtatttataaaagaaacaagtttatttggctcatggttgtggaaactgggcagtcttaagagtatggctgtagcctctggtgagggtttgaattacatcataacatggcagaggagaagagaaagcaggcagatgcgaaaggggcaccaatgaggtagttaatccagtcctgagagaatgagaactcactcccaccagaactaacccaatctcctaagagtagcattcattccttgtaaccacctaatcaccttttaaaggccttgtctcccagcaccaccacaccaatgaccaaattttcaacacaaggattctgggtaataactcaaaccacagcattcattctgccttccctttattctatcttaagatctaatttgtttggttatttatttattggggggagcaataaagacatttcttaaatatttcccttccatcaaactcatcctaatttcaagtagtgccagaatgtctctgggattgggagaatcaggccaagaggaagttgagttgggtacatgtagtttgggattaataggatacaattaattagcttaaacagtcaatttcatttaagttatgttattgctacacaccctggtgtatgactagccccccagtatactgctaccagtgattgtgcccatctactcatcattgtaagtcaaaggtgcgagttcacaagttattctatgaagtgaatgttcccttcagcaactggcactgggggcatgttagcagtgagagaaaagcaatatttaaaagcacagagcaagaaattgatctgttagaaattattcccatcattaggtaggtaaaattataattaaatgtctttgtttctcctgaatacctaggaaaaaatgaagagttgttttcccagaattatagaagtatatccagtaaagcaattatagatacaccatacttttttactgttgggaattacacaaaatagagttgactaatctctgtgctttagtgcacagatctgtagtgagactagaaagagtcatacatttgcatgagaatatgtgtgttgaatgtaccccaacgtatgagattgtattttagcaagtgacatattttgtcttgttgaagtctaattgtcccgaacagagtggatttctagaatgccacccacatagtaaactggcctaaagataaatgatttctagtgaccaaaatctaatgtataccaattagtgagtcaatgtgaaaaaggagtaacttgattatacaatctgcagttattagaatgtagaagcaatttcaaaatgcacttaaattgcctgtgtatgtgttaatttcaggttaaatttgtatgtgactttttcaaaattattcatcataccaaaatgcaaatgtaatagaaagccaagaatttactccagaaaagaaaacttgtaactttaaaatataaaataattctagtttttcacaatgagtgctagttatccacaacttttgatgctgtaagaaactcaaactaggtttccattccaagatggctgaataggaacagctccagtctgcagctcccagcgtgatcgatgcagaagacaggtgatttctgcatttacaactgaggtacctggttcatttcactgggactggttggacagtgggtgcagcccacggagggcaagccaaagcagggcggggcattgcctcacctgagaaatgcaaggggtcaagggatttccctttcctagccaagggaagctgtgacagactacctggaagaatgggacactcacgcccaaatactgcacttttcccacagtcttagcaactggcagaccaggagattttctcccatgcctggttcggcaggtccaatgcccacagagccttgctcactgctactgcagaagtctgagatttaccagcaaggctgcagcctgtctaggggaggggcatccaccattgctgaggcttgagtaggtaaacaaagtggccgggaagcttgaactggggcagagcccactgcagctcaacaaggcctactgcctctatagacaccacctctgtgggcagggcatacctgaacaaaaggcagcagaaacttctgcagacttaaacgtccctgtctgacagctctgaagagagcagtggttctcccagcatggcgtctgagctctgagaacagacagactggctcctcaattgggtccctgacccctgtgtagcctaactgggagacacctcccagtaggggccgacagacacctcatacaggtgggtgcccctctgggatgaagcttccagaggaaggatcaggcagcaatatttgctgttctgcaatatttgctgttctgcagccaccactggtgatacccatgcaaacagggtatggagtggacctccagcaaactccaacagatctgcagctgagggacctgactattagaaggaaaactaacaaacagaaaggaatagcatcaacatcaatgaaaaggacatctacaccaaaaccccatctgtaggtcaccagcatcaaagatcaaaggtagataaaaccacaaagatggggagaaaccagagcagaaaagctgaaaattctaaaaaccagagtgcctcttctcctccaaaggatcacagctccttgccagcaaaggaacaaagctagagggagaatgactttgatgagttgacagaagtaggcttcagaaggttggtaataccaaacttctcctagctaaagaagcatgttctaacccattacaaggaagctaaaaaccttgaaaaaaggttagatgaatggctaactagaataaacagtgtagagaagaccttaaatgacctgatggagctgaaaaccatggcaagagaacttcatgatgcatgcacaagcttcaatagctgatttgatcaagtggaagaaagagtatcagtgattgaatatcaaattaatgaaataaagtgagaagacaagtttagaaaaaaaaagggtaaaaagaaacaaacaaagcctccaagaaatatgggactatgtgaaaagacaaaatctacgtttgattggtgtacctgaaagcaatggggagaatggaaccaagttgaaaaacagtcttcaggatatcatccaggggaacttccccaacctagcaaggcaggccaacattcaaattcaggaaacacagagaacaccacgaaggtactcctcgagaagagcaacccaagacacataattatcagattcactaaggtagaaatgaaggaaaaaatgtaaagagcagccagagagaaaggtcgagttacccacaaaaggaagcccatcagactaatggcggatctctcagcagaaactctacaagccagaagagagtgggggccaatttcaacattcttaaagaagagaagtttcaacccagaatttcatatccagccaaactaagcttcataagtgaaagagaaataaaatcctttacagacaagcaaatgctgagagatttttttaccaccaggcctgccttacaagagctcctgaagtaagcactaaacatggaaaggaacaactggtatcagccactgcaaaaacattgcaaattgtaaaggccaccaatgctatgaagaaactgcatcaattaatgggcaaaataaacagcgaacatcataatgacaggatcaaattcacacataacaatattaaccttaaatgtaaatgggctaaatgccccaattaaaagatacagactggcaaattggataaagagtcaagacccatcagtgtgctgtattcaggagacccatctcatgtgcagagacacacataggctcaaaataaagggatagaggaagatctaccaagcaaatagaaagcaaaaaaaaagcaggagttgcaatcctagtctctgttataaaacagactttaaaccaacaaagatcaaaagagacaaagaaggccatttcataatggtaaagggatcaattcaacaagaagagctagctatcctaaatatatatgcacccaatacaggagcacccagattcaaaaagcaagtccttagaaactacaaagagacttagactcccacacaataataatgggagactttaacaccccactgtcaatattagacagattgagacagaaggttaacaaggatatccaggacttgaactcagctctgcaccaagcagacctaatagacattgacagaactctccaccctaaatcaacagaatatacattcttctcagcaccacatcacacttattctaaaatagaacacaaaattggcagtaaagcacacctcagcaaatgtaaaagaaaagaaatcacaacaaactgtctttcagacaacagtgcaatcaaattagaattctggattaagaaactcactcaaaactgcaaaactacatggaaattgaacaaccttctcctgaatggctactgggtaaataatgaaatgaaggcagaaataaagatgttgtttgaaaccagtgtgaacaaagacacaatgtacgagaatctctgggacacattaaaagcagtgtgtagaggaaaatttatagcactaaatgcccacaagagaaagcaggaaagatctaaaattgacaccctaacatcacaattaaaagaactagacaagcaagagcaaacacattcaaaagctagcagaaggcaagaaataacaaagatcagagaagaactgaaggagacagacaaaaaaacctttcaaaaaatcaatgaatccaggagctggttttctgaaaagatcaacaaaattgatagactgctagcaagactaataaagaagaaaacagaggagaatcaaatagacacaataaaaaatgataaaggggatatcaccaccgatcccacagaaatacaaactaccatcagagaatactataaacacctctatgcaaataaactggaaaatctagaagaaaatctaggataaattcctggactttttttggttggtaggctattaattattgcctcaatttcagagcctgttattggtctattcagagattcagcttcttcttggtttagtcttgggagggtgtaagtgtccaggaatttatccagatggattcacagctgaattctactagaggtaagaaggaggagctggtaccgttccttctgaaactattccagtcaatagaaaaagaaggaatcctccctaactcattttatgaggccagcatcatcctgataccaaagcctggcagagacccaacaaaaaagagaattttagaccaaaagccctgatgaacattgatgcgaaaatcctcaataaaatcctggcaaactgaatccagcagcacatcaaaaagcttatccaccaaaatcaggttggcttcatccctgggatgcaagactggttcaacatatgcaaatcaatacacgtaatccgtcacataaacagaaccaatgacaaaaaccacatgattatctccattgatgcagaaaaggccttcgacaaaattcaacaacccttcatgctaaaaactctcaataaacaaggtatcgatggaatgtatctcaaagtaataacagctatttatgacaaacccacagccaatatcatactgaatgggcaaaaactggaagtattccttttgaaaactggcacaagacagggatgccctctctcaccactcctattcaacatagtattggaagttctggccagggcaatcaggcaggagaaggaaaaaaagggtattcaattaggaaaagaggaagtcaaattgtccctgtttgcagatgacatgattgtatatttagaaaacccccattgtctcagccccaaatctccttaagctgataagcaacttcagcaaagtctcaggacacaaaatcaatgtgcaaaaatcacaagcattcctatacaccaataacagacaaacagagagccaaatcatgagtgaactcccattcacaattgctagaaagagaataaaatactaggaatccaacttaccagggaggtgaaggacctcttcaaggagaactacaaaccactgctcaacgaaataaaagaggacacaaacaaatggaagaacattccatgctcatggataggaagaatcaatatcgtgaaaatgaaaatgaccatactgcccaaggtaatttatagattccatgccatccccatcaatctaccaatcactctcttcacagaattggaaaaaactactttaaagttcatatggaaccaaaaaagagcccacatttccaagacaatcctaagcaaaaagaacagagctggaagcatcacgctacctgacttcaaactatactacaaagctacagtaaccaaaacagcatggtactggtaccaaaacagatatatagactaatggaacagaacagaggcctcagaaataacactacacaactacaaccatctgatctttgacaaacctgacaaaaacaagaaatggcaaaaggattccctatttaataaatggtgctaggaaaactggctagctatatgtagaaagctgaaactggatcccttccttacaccttacaaaaaaattaattcaagatagattaaagacttaaatgttagacctaaaaccataaaaaccctggaagaaaagctaggcaataccattcaggacataggaatgggcaaggaatttatgactaaaacaccaaaagcagtgacaacaaaagccaaaatagacaaatgggatctaatgaaactaaagagcttctgcactgcaaaagaaactactgtcagagtgaataggcaacctacagaatgggagaaaatttttgcaatctacccatctgacaaagggctaataccaaaatctacaaagaacttaaacaaatttacaagaaaaaaacaaccccatcgaaaagtgagcaaaggatataaacagacacttctcgaaagaagacatttgtgcagccaacagacacatgaaaaaatgctcatcatcactggccatcagagaaatgcaaatcaaaaccacaatgagataccatctcatgccagttagaatggcaatcattaacaagtcaggaaacaacaggtgctggagaggatgtggagaaataggaatgcttttacactgtaggtgggagtgtaaattagttcaaccactgtggaagatagtgtggtgattcctcaaggatctagagctagaaataccatttgacccagccatcccgttactgggtatatacccaaaggattataaatcatgttaatataaagacatatgcacatgtatgtgtattgcagcactattcacaatagcaaagacttggaaccaacccaaatgtccatcaataatagtctggattaagaaaatgtggcacatatacaccatggaatactatgcagccataaaaaaggatgagttcatgtcctttgcagggacatggatgaagctggaaaccatcattctcagcaaactatcacaaggacagaaaaccaaacaccgcatgttctcactcataggtgggaactgaacaatgaggacacttggacacagggcagggaacatcacaca

SEQ ID NO: 10259 - DNA, 8536 bp, Homo sapiens
aaacttgatcttcttacccatgagtatagtttacttttcagcttatagatttttgtctttcaataaaactttttactttttctctatatttcaactaaatgtcttcaatatgccctatttttgtgctattgcaaatgatatcctttatgacacttattgctttggaatagaaattataaattgatcttctattcaccagtgttattcaactagtattaattcttgttgtttttctgttgccatcctcaagtaatggcagtttattactttttccctaatttcttattaatacaatcttgtaccagcaagagtctcatagccaatgctggattatgtagtgatgatgtctgttttgatcctgattttaaaagcaatgtttctgagaactcttctttacatgtattttagccattgattttggatagtctttatcagattcacttttgtttctgtatctcattttctaagactaattatgaataggttttgatttttaaaacaaataaattgaaaatatctattgagatatttttctgctttaatctgctaatgtggtcaattgtgtcgatattcttatctctaaaacattttgtattcattggacaaatcttagtcatgatgtatttttaaaataaatcaatagatacttttgccaaaactggtttaaaatttttgattccatgttcatgcataaaatcatttggtgattattccccatttttcttttctctgagagagtttgtataaagatagaattatatgttttccaaaattttagtagaacatctccagtatctccccttctcgcagaactcttaaccctattttttaaatcctatgtcttactaagagagtatagatgtgtgcttctggaactaacatttcccttgaaggatatttccactgttttattaatcctttgtttcttctattatatacatctttttttcaaaaccacatatattatcatttctgatagtctgttattatctccactaccttattttgcttaccttgctgtaacagaatacatgagactgtgtatttataaaagaaacaagtttatttggctcatggttgtggaaactgggcagtcttaagagtatggctgtagcctctggtgagggtttgaattacatcataacatggcagaggagaagagaaagcaggcagatgcgaaaggggcaccaatgaggtagttaatccagtcctgagagaatgagaactcactcccaccagaactaacccaatctcctaagagtagcattcattccttgtaaccacctaatcaccttttaaaggccttgtctcccagcaccaccacaccaatgaccaaattttcaacacaaggattctgggtaataactcaaaccacagcattcattctgccttccctttattctatcttaagatctaatttgtttggttatttatttattggggggagcaataaagacatttcttaaatatttcccttccatcaaactcatcctaatttcaagtagtgccagaatgtctctgggattgggagaatcaggccaagaggaagttgagttgggtacatgtagtttgggattaataggatacaattaattagcttaaacagtcaatttcatttaagttatgttattgctacacaccctggtgtatgactagccccccagtatactgctaccagtgattgtgcccatctactcatcattgtaagtcaaaggtgcgagttcacaagttattctatgaagtgaatgttcccttcagcaactggcactgggggcatgttagcagtgagagaaaagcaatatttaaaagcacagagcaagaaattgatctgttagaaattattcccatcattaggtaggtaaaattataattaaatgtctttgtttctcctgaatacctaggaaaaaatgaagagttgttttcccagaattatagaagtatatccagtaaagcaattatagatacaccatacttttttactgttgggaattacacaaaatagagttgactaatctctgtgctttagtgcacagatctgtagtgagactagaaagagtcatacatttgcatgagaatatgtgtgttgaatgtaccccaacgtatgagattgtattttagcaagtgacatattttgtcttgttgaagtctaattgtcccgaacagagtggatttctagaatgccacccacatagtaaactggcctaaagataaatgatttctagtgaccaaaatctaatgtataccaattagtgagtcaatgtgaaaaaggagtaacttgattatacaatctgcagttattagaatgtagaagcaatttcaaaatgcacttaaattgcctgtgtatgtgttaatttcaggttaaatttgtatgtgactttttcaaaattattcatcataccaaaatgcaaatgtaatagaaagccaagaatttactccagaaaagaaaacttgtaactttaaaatataaaataattctagtttttcacaatgagtgctagttatccacaacttttgatgctgtaagaaactcaaactaggtttccattccaagatggctgaataggaacagctccagtctgcagctcccagcgtgatcgatgcagaagacaggtgatttctgcatttacaactgaggtacctggttcatttcactgggactggttggacagtgggtgcagcccacggagggcaagccaaagcagggcggggcattgcctcacctgagaaatgcaaggggtcaagggatttccctttcctagccaagggaagctgtgacagactacctggaagaatgggacactcacgcccaaatactgcacttttcccacagtcttagcaactggcagaccaggagattttctcccatgcctggttcggcaggtccaatgcccacagagccttgctcactgctactgcagaagtctgagatttaccagcaaggctgcagcctgtctaggggaggggcatccaccattgctgaggcttgagtaggtaaacaaagtggccgggaagcttgaactggggcagagcccactgcagctcaacaaggcctactgcctctatagacaccacctctgtgggcagggcatacctgaacaaaaggcagcagaaacttctgcagacttaaacgtccctgtctgacagctctgaagagagcagtggttctcccagcatggcgtctgagctctgagaacagacagactggctcctcaattgggtccctgacccctgtgtagcctaactgggagacacctcccagtaggggccgacagacacctcatacaggtgggtgcccctctgggatgaagcttccagaggaaggatcaggcagcaatatttgctgttctgcaatatttgctgttctgcagccaccactggtgatacccatgcaaacagggtatggagtggacctccagcaaactccaacagatctgcagctgagggacctgactattagaaggaaaactaacaaacagaaaggaatagcatcaacatcaatgaaaaggacatctacaccaaaaccccatctgtaggtcaccagcatcaaagatcaaaggtagataaaaccacaaagatggggagaaaccagagcagaaaagctgaaaattctaaaaaccagagtgcctcttctcctccaaaggatcacagctccttgccagcaaaggaacaaagctagagggagaatgactttgatgagttgacagaagtaggcttcagaaggttggtaataccaaacttctcctagctaaagaagcatgttctaacccattacaaggaagctaaaaaccttgaaaaaaggttagatgaatggctaactagaataaacagtgtagagaagaccttaaatgacctgatggagctgaaaaccatggcaagagaacttcatgatgcatgcacaagcttcaatagctgatttgatcaagtggaagaaagagtatcagtgattgaatatcaaattaatgaaataaagtgagaagacaagtttagaaaaaaaaagggtaaaaagaaacaaacaaagcctccaagaaatatgggactatgtgaaaagacaaaatctacgtttgattggtgtacctgaaagcaatggggagaatggaaccaagttgaaaaacagtcttcaggatatcatccaggggaacttccccaacctagcaaggcaggccaacattcaaattcaggaaacacagagaacaccacgaaggtactcctcgagaagagcaacccaagacacataattatcagattcactaaggtagaaatgaaggaaaaaatgtaaagagcagccagagagaaaggtcgagttacccacaaaaggaagcccatcagactaatggcggatctctcagcagaaactctacaagccagaagagagtgggggccaatttcaacattcttaaagaagagaagtttcaacccagaatttcatatccagccaaactaagcttcataagtgaaagagaaataaaatcctttacagacaagcaaatgctgagagatttttttaccaccaggcctgccttacaagagctcctgaagtaagcactaaacatggaaaggaacaactggtatcagccactgcaaaaacattgcaaattgtaaaggccaccaatgctatgaagaaactgcatcaattaatgggcaaaataaacagcgaacatcataatgacaggatcaaattcacacataacaatattaaccttaaatgtaaatgggctaaatgccccaattaaaagatacagactggcaaattggatagagtcaagacccatcagtgtgctgtattcaggagacccatctcatgtgcagagacacacataggctcaaaataaagggatagaggaagatctaccaagcaaatagaaagcaaaaaaaaagcaggagttgcaatcctagtctctgttataaaacagactttaaaccaacaaagatcaaaagagacaaagaaggccatttcataatggtaaagggatcaattcaacaagaagagctagctatcctaaatatatatgcacccaatacaggagcacccagattcaaaaagcaagtccttagaaactacaaagagacttagactcccacacaataataatgggagactttaacaccccactgtcaatattagacagattgagacagaaggttaacaaggatatccaggacttgaactcagctctgcaccaagcagacctaatagacattgacagaactctccaccctaaatcaacagaatatacattcttctcagcaccacatcacacttattctaaaatagaacacaaaattggcagtaaagcacacctcagcaaatgtaaaagaaaagaaatcacaacaaactgtctttcagacaacagtgcaatcaaattagaattctggattaagaaactcactcaaaactgcaaaactacatggaaattgaacaaccttctcctgaatggctactgggtaaataatgaaatgaaggcagaaataaagatgttgtttgaaaccagtgtgaacaaagacacaatgtacgagaatctctgggacacattaaaagcagtgtgtagaggaaaatttatagcactaaatgcccacaagagaaagcaggaaagatctaaaattgacaccctaacatcacaattaaaagaactagacaagcaagagcaaacacattcaaaagctagcagaaggcaagaaataacaaagatcagagaagaactgaaggagacagacaaaaaaacctttcaaaaaatcaatgaatccaggagctggttttctgaaaagatcaacaaaattgatagactgctagcaagactaataaagaagaaaacagaggagaatcaaatagacacaataaaaaatgataaaggggatatcaccaccgatcccacagaaatacaaactaccatcagagaatactataaacacctctatgcaaataaactggaaaatctagaagaaaatctaggataaattcctggactttttttggttggtaggctattaattattgcctcaatttcagagcctgttattggtctattcagagattcagcttcttcttggtttagtcttgggagggtgtaagtgtccaggaatttatccagatggattcacagctgaattctactagaggtaagaaggaggagctggtaccgttccttctgaaactattccagtcaatagaaaaagaaggaatcctccctaactcattttatgaggccagcatcatcctgataccaaagcctggcagagacccaacaaaaaagagaattttagaccaaaagccctgatgaacattgatgcgaaaatcctcaataaaatcctggcaaactgaatccagcagcacatcaaaaagcttatccaccaaaatcaggttggcttcatccctgggatgcaagactggttcaacatatgcaaatcaatacacgtaatctgtcacataaacagaaccaatgacaaaaaccacatgattatctccattgatgcagaaaaggccttcgacaaaattcaacaacccttcatgctaaaaactctcaataaacaaggtatcgatggaatgtatctcaaagtaataacagctatttatgacaaacccacagccaatatcatactgaatgggcaaaaactggaagtattccttttgaaaactggcacaagacagggatgccctctctcaccactcctattcaacatagtattggaagttctggccagggcaatcaggcaggagaaggaaaaaaagggtattcaattaggaaaagaggaagtcaaattgtccctgtttgcagatgacatgattgtatatttagaaaacccccattgtctcagccccaaatctccttaagctgataagcaacttcagcaaagtctcaggacacaaaatcaatgtgcaaaaatcacaagcattcctatacaccaataacagacaaacagagagccaaatcatgagtgaactcccattcacaattgctagaaagagaataaaatactaggaatccaacttaccagggaggtgaaggacctcttcaaggagaactacaaaccactgctcaacgaaataaaagaggacacaaacaaatggaagaacattccatgctcatggataggaagaatcaatatcgtgaaaatgaaaatgaccatactgcccaaggtaatttatagattccatgccatccccatcaatctaccaatcactctcttcacagaattggaaaaaactactttaaagttcatatggaaccaaaaaagagcccacatttccaagacaatcctaagcaaaaagaacagagctggaagcatcacgctacctgacttcaaactatactacaaagctacagtaaccaaaacagcatggtactggtaccaaaacagatatatagactaatggaacagaacagaggcctcagaaataacactacacaactacaaccatctgatctttgacaaacctgacaaaaacaagaaatggcaaaaggattccctatttaataaatggtgctaggaaaactggctagctatatgtagaaagctgaaactggatcccttccttacaccttacaaaaaaattaattcaagatagattaaagacttaaatgttagacctaaaaccataaaaaccctggaagaaaagctaggcaataccattcaggacataggaatgggcaaggaatttatgactaaaacaccaaaagcagtgacaacaaaagccaaaatagacaaatgggatctaatgaaactaaagagcttctgcactgcaaaagaaactactgtcagagtgaataggcaacctacagaatgggagaaaatttttgcaatctacccatctgacaaagggctaataccaaaatctacaaagaacttaaacaaatttacaagaaaaaaacaaccccatcgaaaagtgagcaaaggatataaacagacacttctcgaaagaagacatttgtgcagccaacagacacatgaaaaaatgctcatcatcactggccatcagagaaatgcaaatcaaaaccacaatgagataccatctcatgccagttagaatggcaatcattaacaagtcaggaaacaacaggtgctggagaggatgtggagaaataggaatgcttttacactgtaggtgggagtgtaaattagttcaaccactgtggaagatagtgtggtgattcctcaaggatctagagctagaaataccatttgacccagccatcccgttactgggtatatacccaaaggattataaatcatgttaatataaagacatatgcacatgtatgtgtattgcagcactattcacaatagcaaagacttggaaccaacccaaatgtccatcaataatagtctggattaagaaaatgtggcacatatacaccatggaatactatgcagccataaaaaaggatgagttcatgtcctttgcagggacatggatgaagctggaaaccatcattctcagcaaactatcacaaggacagaaaaccaaacaccgcatgttctcactcataggtgggaactgaacaatgaggacacttggacacagggcagggaacatcacaca

SEQ ID NO: 10260 - DNA, 53075 bp, Homo sapiens
ttcttttcttttcttttcttttttttttttttttttttttttgaggcagagtcttgctctatcacccaggctggagtgcagtggcacaatctcagctcactgcagcctccacctcctgtgttcaagcgattctcctgtctcagcctcctgaatagttggaactacagacgtgcaccaccacactgggctaatttttgtatttttagtagagatgaggtttccccatgttggccaggctggtctcaaactcctgatgtctagtgatccacccacccctgcctcccaaagtgctgggattacgggtgtgagccattgcgcccagcccatctggggaacttttgaaggtctagaaaagagtaagactgatgatagtgacctttgctgtgaatttcataaccattcacttatactttttctgatagatccttaaaaatgaaatttcaaagcaaaatggggagatttgcaccctaacttcagtggggttgtgagtggacaaaatgtacaaggttgtcgacaaagtagcatgcttccacacgttgaccatgtgcagcttcaacctagatgatgcacagtgaacatttcatgaataaagcctgatatgggattgtctacaggttcctccaacccctgagtagagatgttccctcctagagacttgctgtagatcacgtttcatcctccaaccgtgggggaagtgtgctgtgttattacctgatcaatgtagtatctttattttgggggaaaagctgagcctcatttttctcatttgttatattgctttccttttgtgtggtcatttgctgtcccaggcatcaaatggtccataaacaaaacacttacccactgcacacacactccaaaaaagagcaaacaaatttcagagcaaccaaaatgttgttgctaacccagtccatgaaagctcatgcatttttcttggagcaatgtctgacttttaggtaaagcaccttgcaaactgccttgacacagcaggtgcctgcaaaacattttctttttctcttcctttcctgggttagaattcagatccagtaaggagtgaggctaagtactggaaatggaatgatgaaggagatggacatccgtcctgacctcagaaaggtgtggggaggctgggcacaatggcttatgcctgtaatcccagcactttcagaggccaacgtgagaggatggcttgagcctaggagttcgagaccagccttggaaacacagcaagaccccgtctctacaaaaataaaaaaatcagccaggcatgctggtgcatgtctgtagtcccagcaactcaggaggctgaggtgggaggatcacttgagcctaggaagtcgagggtgctgtgagctatgattgcgccactgcactgcagcctgggtgacagagcaagaccctgtttcaaaaaaaaaaaaaaaaaaaaaaaggtatgaggaaaacaagaattgaaaataaatgaaagtattaatgtgagtaaggaagaaaaggaaaaggaatgttacaatataatattatattgaagtcctatcacccagtacccccagaatgtgacttaactgcagatgcaattagttgagatgaagcacactggagtaggatgagtccctaatccaatatgactggtctccttataacaaagggaaatttggatgcagacacacacagagaatgccatgtgaagacagaagcagagatccccaagccaagaaatgtcaaaggttgccaggtaaccatcagaagctaggagagaatcatggagaaccctcccaaggaactatccctgctaataccatgacctcagacttctagctctggggactgtgagattatagatatatttccattgtttaagccactccatttgttgttctctgttatattaccttagcagatgaatacagggagctacaggggtatttagtgaggggatgaagattagggaggtcggttggtgggcatggtagaaggaagatgctcaaggcagaaggaagtttcattccatagaggtggctcaatgctgaacctccagattcttcctgatatgtgctaggggcagcttagcttgacggaagaaacatcgatgttgccatcacacaaacctggcatcgaatcctgatgttgttacaacatgctgtgtgactttgggaaagccactcaacttctctgagctttggtttccttctttgtaaaatagaattgttatacttagagatatgagggtaaaaagtttttacgtggttaatgtgcctttttatttggcctttctgagtacacgacttttgtctgagttagcctgtggtaaccatctgctttggagagaaaggagagagaacgatgtggaaggcatgtgtttaagctgagacctgaaagatggctcagagttagtttggggaaaacataaaggagagcagaggattttacagaagaaaactgtatttttacatatggttaattgttacatgacaatttatcctaacgagcttgagtatctggtttctaatttcctaacacattagaactgcgagtaaagaaggctgcctctcactatgtggctggtaaaacagactgacaatgatggaagacaaaggaagactacacgatagaaggaattaggaggagagggacgcagagggaggagaagagaaggggcagaaactaaacagccatagtaggctggggctattgagtgaaggggcaaacatctcctgttaatagtatctcattaaattggatgaagtggctgctgtgggcataaaacaccctttagtcttttttttttttttatgctttaagttttagggtacatgtgcacgttgtgcaggttagttacatatgtatacatgtgccatgctggtgcgctgcacccactaacttgtcatccagcattaggtatatctcccaatgctatccctcccccctccccctaccccacaacagtccccagagtgtgatattccccttcctgtgtccatgtgttctcattgttcaattcccacctatgagtgagaatatgcaaaacaccctttagtctttagaatgatgatggtgagccaccaagggtgagttatgggacgttagggatgttctgtttcagaactgataacaatacattgtggtttcttcgtccacatatacatgatgctacttcaaatcaaaatggaactcctcctcttctttttgctgcctttgaaactcttgcagaatacagatgagcaaggccccctgccttctaaaactggattaggtggccctctcttgtgcttgcgcgggaacctctgttttgctgcttcacatcattcaccgttgctggttgcaactagttcttcatgtatcccgccatgctgcggatctgcctcctaccctagactgttatctatttgcagcacaaccgggattttgaaatgaatctctgtcccccagagcctgcataaaaactggctgaaagtgagcattaaataaatatttaacaactctagttttaaaatatttccatcctaaatggttcaaattttttttttaagttttcatgctcaaacatataaactcttgggtaacaccaatgcctcattttccaaaggttttatgattatatatgtgtttttttttctttattgcaaattcctgctggtctctctgccaccaagattcaaaaagattcaattctccttctacataaaccttttctgatgtaagcctaggctgctatattctcttttgacaaattcagggtaattttgagttggattggatacttcttttttccttgcttgtggacagaaaaaaacctacatggtatttcaaaccataattttaaggatttccctcaaaaaggttgctggcataaagatttggaaaggttagaaagaaaaacagtgctaaaagccagagctctgttctgatttctgaatgtctattctccttttttgttcttatgagactaactagtgcaattggccccagcagggacatctcctgcccattccctgtcattagtctggttttgaggcaatggaacaatctagactatgtccaagaattctgagcccagagaggaccttatggaaacctaacatcctcttttcctcatggccacctgttatgttgtcttggctttctaaacaattggaggcaatcaagcaagctttagctaccatatgttgggtgcttactatgtttcagtgcgttgctaagcatgatgatcataatgtatttgaacctcacagtgaccccatgaggaagctgttatggtcccaatttagagcttagaagactgaggcttatataggctttataagacacccaaagatgctgttggtaagtggaagagcaaaaatttgagtccaaaatggactgactaaaaactccattcttatttcattatgttgtcctggatcgtgctgtctgtggagagagagatggctgaggccacatcatagggtatagaaggtgtgttgcaaacagtggagatgaagaatgtccctgggcaggaccagtgtggcctcatgggctaggcaaaagcatggtccctcttgagtattgaaagctttagtagaattttatacaaaaaagacaccagtacttgtatgttcatcgcagcactattcacaatagcaaagttatggaaccaatgaagtggaaggagtgagggttggaaactgttgatgtgctcatcaacagttgactggataaagaaaatgtggtatatacacactatggaattctatgcagccatgaaaaagaatgaaatcatgtcctttgcagcaacatggatggagctggaggccatttttctaagtgaactaactcagaaacagaaaataaaatactgcatgttctcacttatggatgggagctaaacagtaagtatgcagggacatgaagatggaaatcacagatactagggactgcaaaagggaggtggatgggaaaggagtgagtgttgaagattacctttcaggtacaatgttcactatttgggtgatggctacactaggaccccgaccctgacctttatataatatgcccatgtaacaaatatgcacaaatatgtatctaaaataaaataaaatttgaaaaagaaagctttggaaaaattttatgaaattctttagtaagtggtataagagctgggaatcgttaaccaagcacaatgcctggaacaccatagacactaaaatatgtgaggaagaatggatggatgaaccaagctgaagaggcaagcacataggtaggttccaccaggaagcagggtatttctaatttgggaggaaacttgtttattatctgcatagaacagtaagttctgttctctggatagaagaaacaggccgaggcgggtggatcacgaggtcaggagatcgagaccatcctgactaacacggtgaaaccccatctctgctaaaaatacaaaaaattacccgggcgtggtggcacgcacctgtggtcccagctacttgggaggctgaagcaggacaatcacttaaaccccagaggtggaggttgcagtgagctgagatagcaccattgcacttcagtctgggctacagagcaagactccatctcaaaaaaaagagaagaagaagaaagaaggaggaggaggagaagaggaggaagaagaggaggaagaggaagaagaagaaggaggaggaggaaaagaagaagaaggagaagaagaaacaaaaaagcatagatctggccagcagttttctcatctgactgggaaattttgcaggaagaaggaagttattcaagacagaaggaagtttctgtccacagaggtggttcaatgcgtggttcaatgctgaacttccaggctcttcttgatccattctgggggcagcctagcttggtgaaggaaacattagttttgccaacagacaaccttgacatcaaatcctgatactgttataacatgctgtgtggctttgggcactcaacctctctgagctttggtttccttgtttgtaaaataggatggtttaacttaagagatgtgagggaaagttgtttttacatggttaatgtgccttttcctttttatttggcctttttattttttagatggagtcttgctctgttgctcaggctggagcacagtggcataatctcagctcactgtgacctctgcctcctgggttcaagcgattctcctgcctcagcctcccgagtagctggtattacagctaccatgcccggctaatttttgtattttttagtagagatggagtttctccatgttggtcaggctggtctcgaactcctgacctcaggtgatccacccgccttggactcccaaagtgctgtgattacaggcatgagccaccgcgcctggccaatttggcctttctgagcacatgacttttgtctgagttagcctgtgataaccatctgcttaggagagaaaggagggagaatgaagtggaaggaaacccagtccacacaactgtgtagggcccattgccccatagtggcaggttctgtggtaagaccccagctcttggggtatctggtatctcagagttattggggagtgccaaccaggcaaccttttggttagattatatccctctgtttcttaactggctcagctgccctgtgacagctcagagcttcactatgagctcctgctagagtctcagaggaagcaggacaagagactcctgcctcaagcatttcccacaactcatccaacattcctcccctaccctgcatctgaaacccaaagagggaaagtcggtgacatgatcttagtcttcctcctctctctttcttttccttctcacatccccccaagaactggaggagtcagacatcccatcccattcctctctggtccattcttgtaaaaatcctgtggtcttgccaaccaagtgcggtccttaatatgccgaaaggtggagattaaaaaaaaaaattagaacaaaacaccttccaaagacaaatgtcttccaaatgtgcgtgacttcacattgtattactgtctggctgccaaatcatttctgaatgttagagatttgaatattacctccttcagcagcaataaggaagtgcctaagtccacagattctagagtcagactgtcaggttcaaagcttggctctgctgtttccagtgatgtaactttgggccaaacctctctgtgccttggttttctcctctacaaaatggagttgataatagtatctcataaggatgcctgggataattcgattagctagtatatggaatagtgtggggtacctcataacccctttatgtttattatgtatacaagtgtgtcttcaccttcctcatcattatcaatatcatcattttttgtgttacttctgtaataaatctcaattcctcaaccctacccaggcatatggaagtcatgggccatccagagccaagcccacacactcaggaagacaagaagagaaaaacacattaaaaacttaaaaaatacatagtccataagcactgtgttctagttgataaagttgtgtcccatgaggatatgggttaacaattctgatattgctataattatgtactggaattgaacaagtaacaaatggatggtggataatgggagccaggtttattattcttggagtgggaggttacagataatcgagggaggaagctagaatgattcatctgacagtgagttagagttggagacatcaggatgacttcatgcttaggtcaatatagacacggatagttgcttctgtaaatttttgtagatatgtgtgtatatacatatattagcatacatatctaaattcccttaccttgtcagcatagagggagtagaaaaaaccagcacacctggcacctagattttggtttctaatattattctccaataaaatgaaccaggctccttgaagaaatggttgattcttggaccaggataacaaatctatacaagatgagcctggggaatcttgtattgccagaaagttagaaagtttaaaaatgaggggaatctgtcaaaggagacaattgaaatagtttccgattcccaaatttggaacaatctgagcaacaaaacaaaataaagtggtagtggattataacccaaggtataaaatacatatccatgtgtctacactgatatgaatacatgattgaatcaatacataaatgaggaagaagagacaaatcttccatgaggaataattccaaatagtttatgtagatatttcttccactcaaggaggtagagcataacccctactccttagatacggtgtgaatggcacacagtgacttctttccaaagagtaaaatgtgaaaaaaggggaaaatagaataattttatagaggagaaatctgtccaacacttcctaagccaggcaatagtttaacatcaatagcgatgagtcattatagtacatatttttgctatgttatgagaatgtcactttacctcagtgattcccctcactcccaaacccataaccccaatctaatcatgagaaaaatatgagacaaattccgtttggccaggcgtggtggctcacgcctgtaatctcaacactttaggaggctgaggcaggcagatcacctgaggtcaggagttcaagatcagcttggccaacatggtgaaaccctgtctctactaaaaataaaaaaattagccaggtgtggtggtgtgtgcctgtggtgccagctactcgggaggctgaggcaggagaatcgcttgaacccgggaggcagaggctgcagcgagctgagattgcaccactgcactccagcctgggggacagagcaagactctctctcaaaaaaaaaaaaaaaaaaaaaaaaaaaggccaggtgtggtggctcacgcctgtaatcccagcactttgagaggctgaggtgggcggatcacgaggtcaggagattgagaccatcctggctaagacggtgaaaccccgtctctactaaaaatacaaaaaattagctgggcgaggtggcgcgtgcctgtagttccagctactcgggaggctgaggcaggagaatggcgtgaacccaggaggcggagcttgcagtgagccgagattgcaccactgcactccagcctgggcgacagagcgagactccgtctcaaaaaaaaaaaaaagaaagaaaaaaaaaagtccattctacaagatatctgaccctgtacccctcaaaactgtcaaagtcatcaaaacagggaaagtctgagaaactgtcacacgcaagaggaatctaaagagatatgactaaattctaagtttaatatggtacctagatattttgaaacagaaaagatggacattaggtaaaaactaaggaaactcaaataaagtgtgggctttagttaatagtaacatatcaaaattgattcattcactgtgacaaatataccacactaatatgttaataatagggaaactgggtctggaggatacaggaactctctgtactatctttgcagtacttttgtaaatctaaaaccgtttcatagtaaagagtttgtttaaaaaatttattgtttgaggccaggagcggtggcttacgcctgtaatcccagcactttgggagactgaggcaggcaggtcacctgaggtcaggagttcaggaccagcctggccaacatggcgaaaccatatctccactaaaaatacaaacattagccggacatggtggttcacacctgtaatccagctactcggaggctgagatgggaggatcacttgaacctgggaggtggagattgcagtgagctgagatcatgccactgcactccagcctgggtgacagagtgaaactgtatctctctctctgtacatacacacacacacacacacacacacacacacacatatatgtgtatatatatatatatagagagagagagagagagagataacatgagaagctcttttcctactgtctggaacacggtgtgtgctcgacaaaacaacactatttgaccatctagtgcctttctgggctattcctccttgggatatgctttgaaggagtcattatgttgtctttcctttaagatgagccagaatggtctagtttctgacagttaatatttgtctcttctgcatggagagacttggagcattctctcagtatttataactgagcatttttaccttaagtggctctgagttgcatccgttttatttccctgtttagtaactaagatatcccacacaacaacaggagttacacggtagttaccttggcgcaagtctgccagatgcttccaatgagtaattgtatcttaaccttctttgaagacgattgttggatatacgaggctccttctctgtcttaggaaggagagcacaggacaccatcaatttgtcgtttgtggaccaagggtctgcatggaaaaacagcatcacagaagggcaagtcttcattcattatttcgaagggtcgtaatgagttgcgcttataatgggtggaggggggaattttcttgtggcattggataaggagtacctttccacagaggtgggtaagatatctctggggatggggaatgtctagaagggaacttctgagagtgagacatgttactggattccatctattgctatgactgtggaaaagaaattatatatgcgggccgggcgaggtggctcatgtctgtaagcccagcactttgggaggccaaggcgggcagatcacctgaggtcaggagttcaagaccagcctggccaacatggagaagccccttctctactaaaaacacaaaaattagccgggcttggtggcacatgcctgtaatcccagctacttgggaggctgaggcaggagaatcacttgaacctgggaggcggaggtcacagtgagctgacaccactccactgcactccagtctgggcgacagagtgagactccatctcaaaaaaaaaattaatatatgtgtgtatatgcatacatatatacttgtgtgtatatgcatacatatatacttgtgtgtatatgcatacatatatacttgtgtgtatatgcatacatatatacttgtgtgtatatgcatacatatatacttgtatgtgtatgtacatatgcatacatatatacttgtatgtgtatgtacatatgcatacatacatatatacacacacgtacacacatgcatatttcttctctcaacttggcaagggcaggatttgcagattataacctagatctcattcatgctgcattttttcactcaccctattgttctagttttcttggattccaacctgggcttatctccaatctgcatttttttttgtttctcctccctagctgaatatatttgtggaaaactcacaaagcaactgggttgccaggtctggtctctatcttcctgtccagtgaaaagaaaatgacatttagaaaacctagtcacaaatgtctgtttaataaattttgtttgttgccctgaaactggattttaatatttctgaatattcagtgcctggaagctagcacaaaatggctatctaaaactgccagaaatttgctttatgtggttcttaatgtgaaactggaaatgcaccttctggatggtgtcacttcttttgagagggatcgctttggtggggtattatggttgtgtctacttatattaagtaactactcactgcccctgaggtgtctcaggacttgggataaataatctaaaagcaaatactttataatggaatatcatgtattctgtttaataatataaaagtgtgtcccaacatattcagtgaggaacatctctgtagaattattttttttctttaacgaagtgtttagtattttctctggcagacctggacacagggtttgagcctagtaggttgagtctgagactgacggatcaaacagatgagagaaaggacttatactggaggataataggctttgaaggttcaaatctttaattagacagtctagtgtttgggatgtatttccaggggtaggggggcctaccattgagacattagttagcttactaatgtccttgggcacgctctatgcacgagtcagccaaattgttgtttgaaatttctgctgtagctctgtagaaaactgaggggcaatgcattttccatctcgaggcaatacctgggtttgccccatggacagccttccctctggtcagtttcagcttcccagaggaaatccagacaacaattgccttagtcagaactctacattgcaagtggcaggagccaggagccacaaaaaacactctttagaaaggggcttctctctctcctcagctgctttcctgtgggtgtgattcttattctttaataatgaagaaagattttctccacatggtaggttcaaattcacttgacttcatggccttttcgttgtttgactccaatggttccaagtagaaaagttgatggaagatggaagaactctgattggcccagcatagatcacatgctctcctctggtccaatcatcattataagaaggaggtattgggattggtttgattcaggctccatgctcgcttccatggccaggggtctgaattactgtatagcacaatgagccctcgctagctgggcacatactcacctgcttttcaactgccagctcttacatccctgagcgagggtatctctggccactggagctagctttgcctgtgaacatgggaagttgccagtgctaacgaattaacatctcccggaagcagctctcaaccaatgactaataggagtttgtgtgtaaatactaaggggtcctttgcccttggggtgacataattttgaggcatgcattcaatacgatttaccagaattccagagtgggattaaactccagtcgaccacattgcatcttgcttggcattgcactttatttgcttcttcttgttctctaactcccccatccttttgctacaagtatttcctgagatcacctgccaaatatgcttgcatttaagtcctttggtatgtttctttatcctttatcgccacttgagttgtgtgatgagctgccaatcacggtaactgtcttagtttgtgtttccccggaagtcactaagataaggactttgcacaaaaacagtagctatccaccaaaaaatatatcatgaaacacacacacacacacacacacacacacacacagcagcagcagcagcagcagcagcatacaatgagaacttaacagtaagccatttcccacaggaccaatacttgggaacaaaacatggctggcctgacatgcccaggggaagcagacaggaaccctggtgggttggctttggagaggagaatgtcagaggatcttgggctccaaggtgtggtgaaagccataccttatcaacaccttttctactgttactttattaatcctgggactctcccatcgcagctgaatctcggccaaaaagctatcgtggtagaaggatacatgcgtctctccagacgttggccaaagactgggttacttggcacttatgtttggcgacattcccatttaacacttgggcttgtgtgatggcccatgcaggtaaagtgataaaaatactgtccctaacctcatgcctcagctagggtatctctgcctgtttccatttgggtttgttggtttctaaagccacacattttccgtatgcatcaggggttgagttatctaaaagcaaagcctgggaaaggggttcagatgcatgtgactttgagggagtgttcttcaggtaacaaataaacacacacctctaaggttatgagggaagcagtgtaggaaaggttagggagccacacaaaaatggggctccaagtaaagtccagattcaggggttgtcaaactatagcccttgggtcaaacttggtaccacctgtttttgtaaataaagttttattggaacacagccacacccatttatgtagttgtcccacggtatccatggggatttggtttcaggaccctccaaggataccaatatcaacagatgctgaagtcccttataaaaaaatggcatagtatttgcatataacctactcacatcctctcatatactttaagtcatctctagattacttataatactagtacaacacagatgttatgtaaatagttgttacactgtatttttacttgtattatttttaactattgtattgttatttttaatttttttctgggtattttcaattcacagttggctgaatccaagggtgtagaacctgtggatacaaagagtcaactgtcttctgtctagggctgcattcatgctacaaaggcagagttgaatagtcaaagcagagactgatggcctatgtagtctaaaatgcttactacctggccctttacagaaaaagtttcccgactcctactctaaacttgtcccagtccatgtgaactctgaagtatcatcatttcataaagttatccccatgttgaggcaaggggctggtctttggacttcagtgtcagcgggacattggttgctgaccacttgaggatgaggtgtgtgaagcatattgaccccagggcagtggctcctatcagccaagagcaattctctgggtattgaaggcagctgtgagctgttagcagccaacatttgcagcagctgggaaatgggttcacatactagataaaggggatctttcaaggcaccactggcaaccaccgcagtgcatacctggatggacacacatgcttcatgaagccagagggaacccatactttccacctcaaagtgagccatcattatctcccagtgatgggatggatagacaggaggcgagacccattcccatttgggtctcgcctcctgtctatccatcccattgctctcaggatgaagatggtgacacttaccagtgttcactgggtcctgccaccctctccaaccccacctcattccagtttccttacactgtattctctagctgtgcatggccagagctcagagggcaattccttccgttgctgagcatgttgggttccatccagctccacggcttttgctcatgctgcttcctctgcctgaaataccctccctcatatcttccaccttccaccacactgaactattataacaaccctccttcctgtagatctcagctcagaaaaaccttcctgaatctctctttccttgaatctcatttcccttcaagcagccaatatttagtttgtttgtctttacatttgtttgtgtcttgtgcaaacttgtagtatgcaaaaatatacacataggttatattacttaacaaaaaatgctatactatttgctttcctttaaagcttccttttttccctttaacaatataaaccataagaaactgttcaagttttccttcattttttctaacacctgaaagatattccatcatatgtgtacatactatgtacatcatatgtattataataattcatttaagaattcccatattgatatgagctcagattgtttctgtgtatgtgttttcatttttacaaataatggtgcaaaaacatctctgaacaaatatccttacattctgatgcttttatttctgtaggctcagttgctaaaagtggtattgttcagtcaacatatacatacgctttacatttcaatactcagtgcctgatttcttcctgcaaatataggaaattgcatgtccaccagcagctttaagaggcctccctgtgctcagcatctctgccagtactcatgtccttcaatccctttaacatctgccaatctgttggcaaaggaatggcttctcattgttcttctgacttccatttctttgactgttactgagattgggcatctttttatacaaatatcatttcattgacaaaaataacctctctactgaaaggaccttaacatgttagtttaacatgttttgagcacatcttttgagatgatgtcagaaaaacacccacctgtcctcatttgctctccagtgaagactatgaactcaattgtgtcccatgtatctgtgaaccctctgctgttttgcgacttgcgtccctaaagggtggggagagttttggtctccagtgatgtggtgatgggagggaaggtagatggttctgccctgtctgtgacaatctccttctgtgtcttcacttccagatgccacccagatgaacaacgcagtgcccacctctcctctgctccagcagatgggccatccacattcgtacccgaacctgggccagatctccaacccctatgaacagcagccaccaggaaaagagctcaacaagtacgcctccttaaaggcagtcggtaagtgccacctgatggatctttttctctttctcctcttcgctctcctttgctgcttcttgtagatctctttatctccagttttctttcctaattcctttttctagctctctttttttctctttctgcttttctctgcctctatctcatttttgttctctctctgtctataaatatgtatatctatatatctatctatgtctgtctatgcattcattcatccatccacctatacactctatccatccattcatccatccacctattcacttatccatctacctacctacatatgtattatctatctgtctgtccatccatccatccatcatccatccatctactattcacttatctgcctatctattatctattgaatctatctacctattatcctatcatctgtctgtctatcatctatcaatccatccacccatccacctattcacttatccatctatctacctacctatgtattatctatctatcatccatccatccatccttctatccatctacctatccacttatctattatctatctatatcatctgtctacctattatctatcatctaactacctattatctatctatctatctatctatctatctatctatttatctatcatctttctatctacctattatctgtctgtctgtctatctatctatctatctatctatctatctatctacccatcttctgggtctctctacctgggacccaggtttctaaggaccagagaccctcagctgctttctctgacctagaacaagttctacattgctgtgtgaggcagggtggctgggcgaggggcacatgtgcggtgagggctatttcctggggagaagaacctggatgctcatttggtcccactgacactttaacccctttaccatctccatctaccctagctgatcctcagggaatcttgacatagaatctaggtctctccatcccagaaatgccttatactttagtgggtaacacccttcacctacaaagtccatcccatttctaagaagttggtaaacaatgcacgttcctatcccaggcaacttctgctcttcaggatttaagtatttacgggagtgggcagcctggggctgctactaatggagttcttaccaagtgcaagacattgaattaaacccttgttttctcatagtgattccaaggtgaagacacaatgattatcccaattaccagattagaaaactgagactctaagaggctaatataacttgcccaagtcaagcagcagtgggtgacagagctgagaattgaaccctatttttatccctccagagccactgcttccaccactgtcctggttccttcagttcattcttcaatttaaacatgagggggtgtgatagttaccctgacagtgactgaggctcctgaacagtttgctcataaaagggttctattggatagaagcaacagtcacagaaagcaattcctgactcctgattggctgtggcaacctcagggttccctaaatcaatggttctcacatgtggatgccaattactagaatcacctggagagcaggtaaaatataaggatgccccaggtccaccctggagatttcaattgaactggttgaggataagattcagacatgggcatttttaaagcactctgtggctgtttctagtgtgaagccaggggtgacagccattcatgaaaactacttcatcagtcccacatccaggaaaaccaaatcctatttcaaatgcttgctctgaatttcctcttctaatgaccttaatacatgggggaaattccttttctttccttctcactgtgtcctgtgagctctaagtttttctccctgtctcagaggagagattttaaagccaggctttccacttaacctgattcttctgagtctattccttggggagctagaaagagccaaacagatgtgagttcaaatcctggctctactgcttaccatctgtgtagccttgggcaacatttggcccctttttaaggtctcagtcttctaatctgtaaaatgggcctaaggatgcctgtgatgactcatattatagactggtaaaggacattcattcaacatacatttgtcacctcccttctccagagctccctggtcttgtttctagtagccccatggatgaatccttttctcatttccatcttagagcatgctcagatatcataggaaggtcttcttcttcttttttcttttttgagacagagtctcactgtgtcactctggctggagcgcagtggcacgatatcggttcactgcaacatccgtctccggagttcaagtgattctcctgcctcagcctcccgagtagctgaggttacaggcatgcaccactatgcctggctaatttttttttttttttttaagtagagatgggtttctccatgttgctcagctggtctcgaactcctgacttcaaatgattttcccagcttggcctcccaaagtgctgagattacaggtgtgagctactgcacttggccaggaaggacttctttaaacattctccttttccaacatggagtcctcaccttcccagcagaattgactgtcagaagctccgaagcattagaacaattcactttgagtggaatcccatttattggtagaggtcttctactctttagttattcataaaatttatttatttatctattctcacatagttttggttcccgaaaaactctgggcaggcagaaaaccccacaaaccatatactttcttttattatcaactgttcatcctattttctccccccactgccaagcccctcattggagatgggatgagagatacttgctgatcgatttcagtatgaaatatgctaatcctgttataaactaacaccagaacccaaagcactgacacaaccatgtgtctaagatgcatgtggtaaccataatcaacacacatcagattcacaaaacaagcattttggtgcctagcatagggccaggcacttcctaggtgcttagccagtgcttataccagaagtctatgtttgggaattcatgttccctgatctcttaagatttccagatggaatcattcaaatagtgactgagccaaatttataataccaaggacacaggatgtgcaaactgacacaggcttttctaaatctgaagccttgtaagaccctacgtactggttacccatgtttcacattgaatttctatgcccagctcaaccctcgttatgtcccatgaccacagattccttctattccatattgcctgtttgcacagcatatgcatcctaactgcattcaaatatactcagtgttactaggaagggatgagggctgttacctaggagagcaagagtcacggcatctttgccagtgtaactgtggaagccttcatatgctatttggtggcccacttccctttctgagcctcgcagttagatgataaataacatatgccattttattttattcttctttaggcatttaaaaaatcaacaggccaggagttgaagaccggcttggccaatatggcaaaaccctgtctctactaaaaatacaaaaattagctgggcatggtggcaggcacctgtaatcccagctacttgggaggctgaggcatgagaatcacttgaacctgggacgcggaggttgcagtgagcggagatggtgccactgcactccagtatgacacccagtcgctccctgggaaaatagcagagggatattctaacagaaattccttgattttatccaagatttatgtggagctcctctacatggcaaatgtctgcaatgcatttgggattaaattttcagtgtgaaaatcatttcacactctttgagtaaccctctgttcataaatcaggaacttctgaaatgtttgttgaatgaatgaatgagcttgtctttgacaagaataaaaaaaaaaggaatagcttggttgtaaggaagcactctaatacctcctagaaaactctgaagcatcccacgtgggacaccttccccagtcctagatggggttgatgtaccccctcctgttcttcatcctttttttctgaccactgtgagagttctcagggctttctctgagacataggtggtcttgtgaatctggagggccaatgaggagcagactgagggattgcttgactcaatgggttagccaggaatccagcatctgcctgcacatataaaatgcaaatcccataataaatgttctttcaagggttctttgttaaagcataatgtgatcatggtgtgaatgatgaaatgcattttattaatgaaattattaccagccaggagagaagttgtttaaaaaatggtttgccattgaaagttctgcaacctccgataagcagattcattttctaaatatttcaatccagagaataaggagaggttagacaatctttagcattcactggtaagctcaaaaatacttctggaaaataaatttctctgggaagctttaacatccagagctctgggaagatgatcagaggctctgtctcactcagactctaactgtacttagctggatgactttgagcaggtcaatgaagctcttggacttcagcttcttcatatgaaaaatgagaaaactgaactataagatgtccaagttccattttaattttaaaattagaaaattaaataattctactcattctagttattagaatgccttaaacatgtgccattcatttcctgccaactcagggaaaaaacggtttgaataaagggtgttaatgttggttgttcctgaggcaaattctccccaaacctgccttcctttctattttattgtattttatttttgtttgcttgttgggatcaccctcactcatgtttaaagagacctcttttcctttctttttctttttttttctttttttttttttttgagacagagtttggctcctatcacccaggctggagtgccatggcgcaatctcggctcaccacaaccgccgcctcctgggttcaagcgattctcctattgagagaattggacatgcaccacctagtcatacatggcatgtaactgcagaatggtttctgttcccaagggtttcactgcccagctcttggtaaaatattagcacacactggggaattgttagtggctaaaccgtataggactttgtaccagaagggatgatgactttgaattattccttcagttgttcattcattctccaaacattaagtctggtttcccttgactgcaggtcccactgaggcatgaaccaaatctgtcccatttgtcaatgtatccccagcacctagtgtcatgtggggtgcttagtaaggactcccaacacctatttgtaaaactagtgaataataccatatgagaagcaccttatctagcctgagaggggccttagagaatcagcaggatagcagaatatagcacagcctctggaatttgtcagggctgagtttaagacccagcttggacatttatcaagtaattggagaaattatttaacttcctcaggtctcagtttctccttctgtaaaatggagataataatgataacacacagataatggcttagaaaatttgatgatatagtgtaggtaaagttcttagcctgacatatgtcagtcctcagcaaatactgcagcatattaaagacccagaccagagttatctgcggtcatcattttcccctgatctcggagatacgctggtacctggattaacatgcaattgcccacatttcattttgagggagaaagggttggttccatattctttactccagtctgatgggaaagacatacatgaaagttaactcatgtcagggatctgataaaacaagcaggcaagcaagcaaacaaatggcttttctaagctgtcctaaggaccctcaaagaatcagtctagacctcttcaagttccccatcttcagggtggacaataaaagttgatgcccaggcatatagatactgtaatgttagccatcagagaaatattctgtttcaatacaatccatcagggaactattctttttcactcaattgactctccttactaaagcaaaaatgtaatgtggatttaaacatttcccaccaatgttgaggttgagaagtgggtcttgttatagaccgagccaaaaatgtaacctgaaaatccagttaagcatacaagttccctggcctgaggtgcccatatggttacaatatgggagcctaccttgtgattcttcacaggccaaagtttggaagacagacgtctttatgaaaatatccctaggccgggtgcagtggctcacacctgtaattccagcactttgggaggccaaggcgatggatcacggggtcaggagatcgagaccatcctggttaacccagtgaaaccccgtctctactaaaaatacaaagaaattagctgggtgtggtggcacatgcctgtagtctcagctacttgggaggctgaggcaggagaatggcgtgaacccgggaggcggagctcgcagtgagccaagatcacaccactgcactccagtctgggcaacagagcgagactctgtctcaaaaaaaagaaaatgtccctaaagctcacttggtggttcagagagggatgattggtacttccagaactggaaaagatcaccctttcacccttttatgtaattcctgatgggctttgcaaacagaaagttgcctgcacattgacatttatctttcattagccccttgtccagtttttcctctaggtttctgattattgaactcctaagtgaccaaagattcatgatcatgtgcccttaagatggctcaatgcaaccttggccattgagtataagaaagagacaggatgtaccagcatcattgataaaatgctgcgtcacttcatttctaattcaaaattttaattttattaaaaaaaaattgtctgtgttgctatttgacagatgattgacattttgccagaatcacaaggcattttccaatagcactttttgaaacaacagcaacaatacacttcaatatggcaggaattccctctttactcttggaatcatgagtgaaaaccctaaaagccatacatgaggcacttggccatggattggcctctactagtttaatttcttttcaagttagggcagaaagggggctcacatcactgagctcataaacagcacacctctgagggaggcatcagtaccccccgttttgcagatggggaaacaagcttagcatagttatttccccataatccgtacttttagtaaatggcagagccaagtctcatattcaagagtgcttgacttggaatcctatgttcttcccatgaaactatgctgtcttctgcagagaaatttctagcatctaaagtatgtaaccaggcaaaagaaaagctggggaagcctatcccctgctcttctgggggaaggagagcttaccaaggtactcatcatttttctttgtttgaaagtaaaagtttggctgggcacagtggctcatgcctataatcccagcagtttgggaggccaaagcagacagatcacttgagatcaggagttcgagaccagcctggccaacgtggtgaaaccccatctctactaaaaatacaaaaattagccaggtgtggtgctgctcgcctataacctcacctacttgggaggctgaggcaggagaatcacttgaacccggggggcagtgggggtggaggttccagtgagtcgagattgtgccactgcactccagcctggacaacaaagcaagactctgtctcaagaaaagaaaaaaaaaagaaagtaaaaatttccctatgatgttgagtataattgaactctagtgtatttgaggtatgctatactggaggtatattttacatacagtgacatacacagttcataattttacaatagtgtgattgtttaaaaaaaaagcatacacttggttatccacatcccaataaaaatgagaaatattttcgtcacactgaaagttccctcatatctccttccttttaataccttaggtctacttcctcttcatgagcatttttcaccctcaaagtatttttctaatgtccatgagtgtgaccaagtacacagtggagccttaactaaatgttccgtagcctatacatcatcttattaaatgccctattgtcaatgaacttataaatgaaaattcattattgtaatagctaagccctatctgagctaatgggaacagaggtgacaaaataatggttcctgccttcaaggcaaacagcaatggatttaatttggggttcagatggcttccctggagtcagcgacttgttggcttggtcagcgtgtggccatccacacaggaagaatgggggtcgcaccactatttccagatgaccctggctatgggggagaagagaaccgagtcatcctgggtgggcccgactcagttttaacttcctcactcttctctcttctgttgctccaattgtccctcttgtgagtgatgaggggtgtacagttcagatccacgggggggatgtggcgatttgagcatcctttggcacgcctggggaggccagccagaaatgtttaaatggggccggatctgtgctctgtaatcattcagatgacagactgttccctgcgccttcactcagcctgatatatctctggaaatagtgccaaactgttgaggacttggtctttctaggtagatgcctaagaaaggaaagagctaggaccacacgctgattggccaggtctccagccaatgaggagaggtctcgtgggtagggttgccccactttaagcaaaacccaatcttacagagaactatcaaagaaaatgcgaggttggtgggggttgggttgggtatagccttggccaattctcagtatccttcattttatgaaaggagtcattatggaattctgttaataatgttagatctcccagggctcattcgggacatctgaaagggaattcaattcggataaactgatttataatgaaaactccaggcacacacctgttctgtaaagcaatgtattactcattatgggattctcagataacaagcttgatctcgttaccgtttagaatttccctaccttagaaagggtgactctgtggataaaattgaatgcattccttcattcagtcatattttccaaacacagaatgtgtgttaggtactgtggtaaggtagcccccaccccatggggcctgtcacccagcatttaaagtcgcagtcagtagagcctgtcccaaccttgaatctggggctaataatgtgccccttttcaggagggggattgcagtggaacacgatcaaagtctatctcttgtcatcagagtgtagtcttgagccaaggtgagctcatataactcaaactttcctttctttctaagcaggttgaaatttacagccagattttctacctaagaattatctttctgccttacgtaactgaaaatatctcggcctttttcaggaggcttcttttgatcttctgttgggtgttaacgtgaggctgcttcaaggccttgcagaaagaggtacacacatagctgcattttcacacgtggctcccttccctgttccctgggtcccctgaggcctgtccctgcttggaggctgcagcaggggcagccaacagcacctgggtgtgagggcatagtgaacatgggtgccctgcaaacagatcatcagcatttcttgattgttatttttttaggaagttctgatggtgactgggcagtatcgacacttaagtcaccaaaaggtactgtacagctttttctagctcttttgtccaggtgttgtcaaagttagcattaaataatgaagggatagagagtcctggtgtctgtgtgacctgtgcacatgtgtgtctgcatagggtggcatctgcaagtccgtctaagttccagtgtgtaggtgtttgtgtgtttgtgtgtgtgtgtgtgcatctagcaattgttggacaacgtggtagccctcacttcccaatatttgctgcctgatggaaaatatcactatgagaaatcatgccaggtaaggtgaaatatgttgatttttctcagaaagctgcaatggcaaatggcaaaacacaaggttaattaatgggggcggggcgggggaagaacacagcttctgagggagagaaaaacataatcaagttattggccaagggtcttgggaatgactagccttttagagaacagaatgctattttcaactttcctgggacagcgtggtgagcagagagggttaggaagttggtcgacttgagtctgtgagttaacccagctgggtgaccagaccaggtggcagctatcattaattagcgccctactatgtgccagaggactggccctttacatcattttatcatttaattctatgatgatcaggctgtgtaggcattgtcatctgcatttagaaatgaggacatgatgtctaagtatggataagtcttgctggtctagagtcatgtgactattcagtggtagatctgcagtttgaacctctatcagtctgacccttattctaagctattttccactagggtgtaatggaagcagctctttttagaatagaccagaaacacccttctccatatgctttgttggacttggtggagaagtaactgacctaaggaggtggaggtagaactatttatctatttatttatttatgagacagagtctcactctgtcactcaggctaaagtgccgtagtgcgatcttggctcactgcaacctcctccgcctcccaggttcaagggattctcctgcttcagccttctgagtagctgggattacaggcacatgccaccgtgcccagctaatttttgaatttttttttttagtagaaacggggtttcaccgtgttggccaggctggtcaaaatcctgacctcagatgacccacctgccttggcctcccaaagtgctgggattacaagcatgagccaccatgcctggccagtagaactctttaatgagctcgaactggggaaaattaggagacattgccaggatatcagcaagaaactggtgtattagtctgtttcaatgctgctgataaagacatacccaagactgggcaatttacaaaagcacaaggtttattggactcacagttccacgtggctggggaagtctcacaatcagggcagaagggaaggaggagcaagtcacatcttatgtggatagcaaagggagagcttgtgcggagaaactcccatttttaaaaccatccgatcttgtgagactcactcactctcacaagaacagcacaggaaagacccacctccataattcaatcatctcccaccgggttcctcccacaacacctgggaattgtgcgagttgcaattcaagatgagatttgggtgggggcacagccaaaccatatcaatagttgtggccattttttttttgccgtttcaaaagattattctggcttctaagtggagactggattaggggactgtggactagagttgcagacacccactggaaggctcttgcaggtgggtggtgacctgcactgaggtgggtagaggatggagagaagaaaatgggagtggaaggatcattgagagactacaaaaagtactgagtgaggagggggagggatcatgagaccaatggttctcacgttgtaaccagcttgagcacacatcagcatcacttggagggttgttacaaacccagattcctgggccttacccaggagcacctgattcactaagccttggctcagaaacatcctgagttgttgcagggaggagagtgcattctattccctcattgggaaagagagctttacatcagtgtatttaatgagaatcccctgactacctggctgttgccttcagagagacagatttttgggttttgcattagataataagtattcacatgtcaaagtccatttttagaaatgcaaacaatttggaacatgacagacctcctaatttgaggcattaacttcttttttccctccctgtgaaaaacaaagccgttatgatctctgtgacagcatttggaggcagcctgcatttctgtccttatatcatccttttgttgtcagatgcatttagaacatatttcagtttaggttaaaagcaaggagctgttttctacccaaaccaagctaacttcacctgtcctgctaaaggcacctttatcctgccttgtcgggggagaggaaaagtggtcccagtgagaaccaagttcctctggggtcattggtctgcctctagtgttctctactcaacctctagacccagactctagatgaggtatggtagcaaggttagggagtttgtgtgcccccaccttccacatcctgccactttcttaaaagggagagagacaggctgggtgcggtgtctcacacctgtaatcccagcactttgggaggctgaggtgggcagatcacctgaggtcaggagtttgagaccagcctgaccaacatggtgaaaccctgtctctactaaaaataccaaaattagccaggcgtggtggcacgtgcctgtagtcccagctactcaggaggctgaggcaagagaatcgcttgaatccgggagatggagtttgcagtgagccaagatcatgccactgcactccaccctgggcggcagagcgagactctgtcaaaaaaaaaaaaaaaaaaaaaagagagagacaatttggatatgatgggcttagactcaggcatatatgggttccaatacaggcaccatcatttgctagtcttgttgtcttcaacctctctgatcccctattttctgatctgcaaaatggagaccatcatatcacctacctcctaggtcgttgtgagataaggtgttgaaaacacgtgtcatagtacctggcatatggaaagtaataaatgcatgcagttcattactggtattagtagtactgttattatcagatgagcaaattaaaggctctgaaaagccttgtggtaataaaaactggtgaactctttttaacccaccatttcccaaacacttttgacatctgatctctttgctcttaaggaagaccgatgaacatcttaacattcagtggcatgaatgttgctgggaacctactttgggaacatagggcgtgggcagagaagtaggtagaggtgcagatgtcactggggagcagtgggggagatgggaaaaggaagaggtagctgtcaaggggaaaggacaaggtccttgaagatacaagtttcttactgccacctgcattgataatgactccctttggagtgtgtctgccaggacaggaaatgataaacatcatgctagttggtacgatttatttttcaccacctagggcttcccatgcaagttgccccctagtggtcactgctattgatccacccacgcccagccttggaaacaactgtcacaccattttaaaatccacccacctgtcacacctgtttaaagtccaccctgggctgggcgcggtggctcacgcctgtaatcccagcactttgggaggccgaggtgggcggataacgaggtcagaggatcgagaccatcctggctaacacggtgaaaccccatctctactaaaaatacaaaaaaaaaaaaaattgcagggagtggtggcgggcacctgtagtcccagctactcgggaggctgaggcaggagaatggcgcgaacccgggaggtggagcttgcagtgagcagagatcttgccactgcaccccagcctgggtgacagagtgagactccgtctcaaaataaataaataaattaattaattaattaaaataaaatccaccctggaagacaccatctcaagaccagcagactgtcttcaccaagatgaagccgtgtctttggaaatctgtttattttgcaaacagaaactttaaacttaagcccagtgctacagcaaggcaatcaaattaggagaaactgccagcatagactgcagtgtaatctctctgcttctgactagaatcagcctgcgtccccctttccaagctacatacatgctccacgctcccatttctaccattgctccaatagaggaaatcagagaatgtactctctgtaggttttgcacagggcttggcttggtatataataggtgctaaataagagtaaaagaggccagtactcacaaagtctccatttatctctgctttggagatagctcttagtcatcctgatggaatctttcagaaggaaatacacttcactaggccgggcgtggtggctcatgcctgtaatcccagcactttgggaggccgaggtgagcagaccacttgaggtaaggagttcgagaccatcctggctaacatggagaaacctcatctctactaaaaattgaaaaattagccaggtacagtggcatgtgcctgtagtcccagctacctgggaggctgaggcaagagaatggcttgaaacgtggaggcagaggctgcagtgagccaagaacatgccactgcactccaacctgagaaggaaggaaggaagggagggagggagggagggaaggaaggtaggaaggaaggaaggaaaaaaagaaggaaggaaagacatttcacctagcttttctgcttttatacatgaggaaactggggtttcctaaaaccgcaaaagaaaagtacgtcacaacaggaccagggtccagacctcaaagaggggcttgaggacttgacccagaatcactggagacgcttgttacaaatgtagatcctgggcccactcactcctaaggaattagaacatctgagtgtcgtgtcccagtattcatttttaaaatgcacctcctgggtgattcttatgtacattagagtttagacctagcttttcctaatcccccaccctagatgcaatcgcagtttgcgacacagcatccgtttacataccggcgttcttcccaatgtatttttgctgtttgctgaaataaaactgttttcttagtggtgatttgagctggggccacagctggacggtaacagcattgaaagtggatagtgttgggtttggtttcttgctctgccacttattggcagtgacagagtaatttgtcagccaaattatttaacatctctggaccttagttccttcatctgtcacgtggaaagaatgatattgcctgccatgtctctttaagagggtttaaatgagacaatgtacgtaaaatcgctaaaccagtgtctagcccatagtaggtactcagtacatgctagttctttccttcttctaagaaaattgacttagcccaatgagaaatgctcatgcaggaggcacaagacaatagacaatgtgcaatagggttacagttccattggagtgcatgcatcctatagaccatcccaggggagggaacacccatcgaaaggcagctttaaaacattacttcatgaaatttgggcttttgcaatttcctgattttggttattggtttggtcatgagccgccgggtgcaaagcaggtggaagacaggagggtgatgtgaggtgaagttttttaataaaaatcaaatcctactcgctcctgagttcagtcccctttgaaaagcacacagcaagtgctgggattttgatgagcttccttgggaacccatagggcatgaaatgaatgcgcaaagagggttctctggtttgtagaaaatgctcttgcatcaagattgcaataaacatttgactagtttggccgtgtgtccttccgaggctaacccagccagatcctgttcattccaaagccatcttgcgtgacactcacagcacacacagtaggcaatcaacatatattttgttaataaattattaaatgaaactgggcatagtgttcaaaggaaattttgtcttttctgaaaaggtactgggaaatgagaatcaaccagagggaagtctggaaacctgtattctagacccaatactggtttatccatgtgacagtctttgagcttggtatataacaggtgctaaaatttcctctcctgaaagatggaaagcttgagactattaatttttttgccccctgagcctctgtaagtaaatatcccaggttttgctctgattaccttaccttgtcatgtgcccacctctgaacaaatttgtaggaggagggcaaagaaatggagaatgcctggggcatggggaagtggagggatatgacatccaaaccacatggattaggaataggagagaggctttgggaggccgaggtgggcagatcacctgaggtcaggaattcaagaccaacctggccaacagagatggtgaaattgtctctacaaaaatacaaaaattagctgggcatgatagtgggtgcctgtaatctcagctactcaggaggctgaggcagaagaatcacttgaacccaggaggcggaggttgcagtgagccaagatcacgccactgcactccagcctgggtgacagagtgagactccatctcagaaaaagaaaaaaagaataggaaagagatgcatctcacctgaaaattgggggctcttcttggaagtatggtgagtgaatgattggcatttttatcagtcagctactgccacaataacactgcgtaacaaataacctcaaatctcattgcttaaaatgtatttagaccagcatttatttagatcaggagtctatattccagtgatttcagctgatgtgggaggttcttcttatctcaggtgatttcacccatctctctgggagttggctggatgttgggtgatctaggctggttttaactggaatgacttgggtgacttgactctgctccatgtgcctcatcctcaaataaggcagcccagatatggtctcatgagggtgggagaggtgcaagagagaaattcaaaccagcaagcacttctccaaatgcctgtatgtctcatgtctgctaacatctcttagtcacacggaacagagtgtagagatggagaaagtcaaagaattgattcatgcattaatctaacataggatcccaaatctcataattatctacattgacatggtcccaggaaactacagccaagaggaaggtgacaagtagggcttagaattctttcccttaatttgcttcatttagaaaaccaccagttgtatgaaatttcaccagctgggaggatgattggaagacagaccatgcaatgaatttctggaaaaaaaaaatctctatctatatagcagcaatgcacaggaaggcagtgagtggatgcagttccatccagaaccctgtgtgggaatcggtgggaggggatctgtgctcagccatggctggagaatgagcctgtccaccgttgtccagtagcctttcagaagatgttgactgcacagcaggactgcctaagtgaagagagaaagggcctgaggtttcagagggctcctggcagccacaacaaagggggcccatggtacaggctggacagctttgttgcaaagcccaagccaggggctgttttagaattctccctagcaaaggctccctcctcactctggattaatagtttgcctatatatgggattttagaaaaaaaaaaaatcacagtaccaccgcctgttgggagccttcagggttaagactaaaaaagggccaggctcctggacgcctttttccggttttctctcttagagcaatatggctttgggaaagatatggtgccccgtggggagggccagatgccccgtgcttctttaggacctggttcatgtgcagcctccgctacttgtgtctctgcagcaaggcccggaggcaggtgaagtgcaactaattcaccataaagacaaatcttccatctactccctggtcctctcctgcttaggaaactcaggctttttttttcctgcctttcttgtttctgtctgctgagacagcctctggaatctgcacaactttataccatgtagttcaaaagaagagagaaatacctggactttttttttttttttttttaacaacatgaactctttccctatcactttttaattcagcttgtgaagaagaagaaagcagagaccgagaaaacggtcctatataagttaaatactgttttacggtactaaaatgtcccacaaatacagtgcttaagagaaagaagtatttcttttttaaacaactttattgagatatgattcacctatcatacaattcacccatttaaagtgtaaaatccagtggttttcagaatgttcacagaattgtgcaaccatcattacagtcaatattagaacattttcctcatcccagaaagaaactctataaccattagtagacattttccatctcttactgtcttagcagtcctctcccagctaacccctggttcaagcaatgacttgcctattttgtgtctttatatatttgcctgttttggatatagctgtctcatgtgatagacctgtattagtttgttttcatgctgctgataaagacatacccgagactgggtagtttataaaggaaagaggttcaatggactcacagttccacatggctggggaggcctcacaatcatggtggaaggccaaggggaagcaaaacacgtcttacatggcagcaggcaagagagtgtgtgcaggggaactccccattataaaaccatcagatctcatgagacttattcattatcacaagaacagcacaggaaaaacccacccccatgattcagttacctcccaccaggtccctcccaccaggtccctcccaagacacttgggaatcattataattcaaggtgagatttgggtggggatacagccaaaccatatcatgacccaaggagagtaatccaggttggtgggcagctctactccgagtggtcactccaggacccaggttcctccaaccttgttgcactatgactcttaccatcttgtcctcatctgcattgttatagttggttgctgtcactgtgtaattctggcctgggggaagagggaagagaggagacctagaacaaggatttctttttttaaagcaagtcaggtaaagcagaaataggacacatcacttttgctattatttcactggtgcgatatcagtctcatggccaaatgtggcttccaggaaggctggtaaatctagttctgagttgagtgaccatgtgtccaagaaaaagaaggtagactaaatctgatctgggagataagaagcaggcagccacagcatcttctctgatgggaatgtacatttcaggagatgtaccatgcactatgcataatgttctgagttttcgcaagccttgtctcgtttacttctacactgcactccacaaggtgtgtgtgtatgtatatatatatatatatatacatacacacaccacaaggtgtatatccacaaggtatatataacattatcctaattttataatctttatattttctgatgacgacagaaatagcagttactaccctttggatacttgctatgaggcaatgacattggccttttttcaggatgcaacgtcctctacacgattctcttcaatactctccatccccaggccacataggcctggttattttagtttcaattttataggtgaagcttagagatttgaacccagatccatctgctgtcaaagtttatactctttcctccatatggtaaagaagattttgtagtcacaaaagtcagacatggctgggtgcggtggctcatgcctgtaatcccagtactttgggaggctgaggcaggaggattgcttgagctcaggagtttgagacaggcctggacaacatagtgagacacccttctctacaaaaataaaaacaaaaatagccaggcatggtgttgcatggctatagtcctagattctcgggaggctgaggtgggaggatcacttgaacccaggagggtcaagtcagtagtgagctctgatcatgccactgcacttcagcctgggtgacagagtgagatgtgcatatttccaaactttgttatctgtcatataaaactggtgcattgaatccttcaaactcccagccatattaactcctctttccttctcaacattcccagatctcatttcttgtttttcaagactgggggctctaccatagctttcaagagcctagtgtaggattcaaaaccaacacgttggttctttgtcatcatttgtatcagtctgttctcatgctgcgaataaagatgtacctgagactgggtaatttataaaggaaagaggtttgatggactgacagttccacttggctggggaggcctcaaaatcatggtggaaggccacggaagagcaaaagcatgccttacatggcagcaggcaagagagggcatgtgcagaggaattcccctttataaatattgtcaaagaagcaatattcattgtccattgcaggcaatgtagaatgcctacattgcaatattctatactgcaggcaaaagcttccataaatattgagtgtgatggccataacttgaggcagtggagccaggtgtcctgggttcaagtctcagctccatttgttggataaacagccaaagctctctgagcctcagtttccctacttataaaataaaaccaatggtaacacctacctcattaggatgttgagagtattgaaggggatagcaaatgtaaattcctagtgaaggcagtagcatagaacacacacttaagaaaggtgagcaattactcagtttgccattgacaagagtggggaaatagagaggaagtccctgtctctactcagacttctgatatacccaaacagtctctttaatcaatccctgccttcttcacctgactttattctacctcccttcccccgagctaggtctgctaaagagtatccaggtctctgcaaattctcagacaggaaaatggatcctagttcgcctgtctgcgacataaaagcacttaacctgagctccagcccttcaatccctgtaaagaacagatgactcagtcttcggtgatacagactgaatgaccaggagatgaaatatcctgcccatttctcatatttcagggactgtcattggaactggaatatcatcagtgctttccttctttcatcacgtgcatattattgcacgcctgctgtataccaggcactgggctgtacgttgaggatacagcagtgagcagaacagacacaacctctgccctaagtggagctttatattctggttaagggagacagagcatacacaagtaaccaaaaaagatacctttatatagtaatatgagctatgaacatattaaaatagggataggtcatcagagccattggtggaggtgtcttctttgggtattaggagggtttttcaggaggtagcctttggtcacaggtccagatgacaagtagtatttaggcagaggaaacagcagggatgatgtccaaaggtcctgagatggtgacaagcttggcgtgttcaggaacagaaaggaatctcatgtatagtggaatagtacccccctaaatccttgtccattcagaacctcaggctgggaatgcacatggaaatagagtctttgcagaggtcattgagttgaggatatattgaattaatgtgggccctaatcctgtggctgatatccttataagaagggagaaatttggacacataaacacacgcacacacacatacacacacatggaaaatggccacgtgaagtccaaggcagagattggaatgatgtagcttacaaggcaagagatgccaaggattgccagcaaccaccagaaattcgaagaggcaagaatggatcctctagcagagccttcagatggagcatggcccggccaacttctggcctttggaactgcaagagaatgtatttctgctgttttaagccatcaagtttgtggtactttgtgatggcagctttaacaaacgaacacacactgtgatgtgttcacaataggtatggagcagaggagggtgcataagtagctagagtccacgtcaaacagacctcagggaccactgcaaagaatttggattttgttcttaagtgtaatgagaagattaattgctgtcttttatcatacccttgagcgaaaggcagaaaccgatgaggaaatgtgaaagctttggttggggcattgcttaccaggtgaaatccatcacctgtgacccaggaatattaccaagaaagaatgagtggtaggaacccctccctaagatatctttgcctcaaggaaaggaggtaggtgggaggctgcctgctgagaccctcagatgtgcagcttgttttgggaactggttattaccttgacgttctccctttccacggaagccaggctccatcccgccccgcacctgtacaagtgtctgctgctaattaagagagagacagatggaggaaggtatagtttaattttacagccccagtttcttcaaggcaattaggctcattagaaggaaagcaccttttcctttcttcttcttcttttgtaaatgaagaaaagtcaaataggagagggccagtgttgttgaaaggctcacacatctgtttcctggtcagtttgtcggccatctgcccatgaggtaccggggctgattaggttaatgcatttattaatggggcttacaagactgttcaatgaatctgttattcttttgcaagtagctttttaatatactaagacagggactacactgcacaaagccaagagtggctagataagcatttctttcccctcacctggctccaaaccagaggggaacagaaacattatgaaaacaggttttcatgaaaactgcacttccaggtaatggaaatgattcatccatctaacctctaaccacctccttgttgttgaaatagtcttgaaaatatctctttggaggatagtttcatgcaccaggcaccagttcagtgcctacactgtgcttctctaagagaccacctgagtcctagggtgggagaatggttagttaaatgaataggcatgaatgatataatcttgcctataggacattagatggcctgaggatcccttgccttcttcatctataactcagatatcctttcaggttcttgaagctactcggctccttctcacctcaaagcttttgcaaatgctgtcatgtatcagttatcaactgctgcataacaaatgactccaaatcttagttgctgagcatagcaaccatttatcgagatcatgattctgggtcaacggagaagttcttgtttgggctggattggctcctctcagttggattttcttggtatctgggtctgctgttaggtggctgatggtctaagatggcctcactgaacatactgcagttagcagttggttagttgtgttgaacaggggtaactggtctatgggtttctcatcctccaggagtctaggggatcccttcttcacatggaggcagatttcaagagccttagagtagaagttgctagaatctactggtccaagctcaccataatgccagaacatattcaaggcatggggaaatagattccacttcttgatggtaagagctgcaaagtattttggtcattcttggaatatgccacatattccctcacgtgggttgctctttctgttactcttcaccttctgatctcagcttaaagagttctttctcaagaggcaggatgaatgcctgcctctctagtagaatgtttattccaggatggcaggaaccatgtctgcttctgtttccgattgtctttcatatttcaagtgtccagcatatggtgggtacctgtttgatgaatgactaaatgattgaacaaacagctcgaagactgcagcatggagaatggattacaggaggtgaaacaaggcaaggaggccagtttggttactgaagtagaacaatgttcaaagggggtaggagaaagggaataggttaaggaaatatttgttagatatagctggaaggacttgttggtttgacagttgtgctgcaagagaagaggagaatgaagtcaaccattgctcccaaatttctggcataagtggctaaggagtgagtggtcccacgtgagatgtaaggaaaaggctgaagaacagatctgagtaatgttgctgggttcagggatgacaaccttgggccagagatgctattgaatctgtccgggaggtaactggatatataaattttgaagtctaaaggggaatcttagattatttttctgttgaagtttcatggcactggaaatcttgaactttcctctaaaaggcaggaaaataggttcaaatcccagctgtaatgttagcttgtgctaccttaaacaataaagcttccctgaccaccaactccctcctgatcagatcaaggcccctttgtgtgccctttcatggagtaaactaggcactcaacaaacatggtgggtggaagaaggaaagaagggagacagaaaagaaggcagcttggtttggatgaatgcctgctttgtgcctagtaagttgcctaccatagagtaagtgttcaaacaatgtctgtcaaatttaatccagggcttctttcttaaggcagggaataggtaaaatataggtattgagcatttactacattccaggaattgtgctgtgtagcaggtgtatctcatgcaattcattgctcacattaaatccaagagtggttaatattatccccatttcacacctaaggaaacaggcataaatggttaagtggtgttcccaaggtctcataaactcagatctgtctcattccagagcctgcagactttctttttcactccactcttgccccaagtaccaaacactttctgtgctcagggagtacccaataccagattcaccaagcaaccagctcagagttaggttaggaggatggtgtggattctccatgtgggacccactgtttcctcttaatgggattttccccccatctgcacggatatggacagacttgaatgcctctgtatctacttttctttagaactttctgaggggacatcatgtattgaagctgctgggatgcttaactcataatttattttgtctgcttctcagaaacaggaaccattgaatgcatcccttgctcagagcagacctcagactggtctgatgtctggaaagaggaacatgggaaagaatgatgctggatcattataagacatttaatgagggcgagtgagatttttcagtgaaagattactgggaggaaagtgagaaagatagcttccacccctattcttgccctatattctctatgttctcactgtattttgctcatatattttttttaatttttaagttcaggagtacaagtgcaggtttgttacataggtaaacttgtgtcatgggggtttgtcgtacagattatttcatcccccaggtattaaacctagtacttattatttttcctgatcctctccctcttccctctctcatcattcatcaaatatttactgaggccaggtgtggtggctcacacctgtaatcctagcccttcgggaggccaaggtgggtggatcacttcaggtcaggactttgaggccagcctggccaacatggaaaaacgcttctctactgaaaataccaaaatcagccaggagtggtgtcacatacctggaatcctagctacttgggaggctgagacaggagaatcacttcagcccaggaggcaaaggctgtagtgagctaagactgtgccaccgcactccagcctgggtgacagagcgagacactgtctcaaaaaaaatttgactgagtccttaatatctgccaggaactaggctggacattgcttatataatgctggccaaaagtcatacctcatcttggaacgctagtgagtgagacggatgataatgaatgaactgcacaaacaagtataaaatgacagtcatgataaatgccacgggaggagcttattatggagagatctgactttatcggactttctagaagggagagggacctcaggggagaggcagctgggcataataggagtgaagtgatacttccctttagttctctaacaaaaaacacccctatgtgctggaactgtgaaaacggcagaggctatccctgtggttctcaaccctggctgcatattagaatcacctgagggacttagaaaatatatgtctgggccacaatctctgaaattctgatcaaatggttttgggaaggggtccaggtgtctgaacacttttaaagctcccccatgtgatttccatgtactgccaggactgagaaccactgagccacccagatggaaggatatttctgctctcaaagaactcgtggtctagtggggaaacagatgtgaacacagaaatttataaaacagcgtagtcagtgttatgatggagagagcaggggtggctgagaaagtctgagggaatgagggaggcaatatctcagctaagtcttgcaagatgagtaacagtaaacctggtgctaatgaaggggatagactctgcagctcagacacctggttcttagaccagataggggacctcattataagtactgctatgactggttagctccccttcatagcacttaccatagttatacatttatgtaatttgggggattatttgaccaccatctccctcctgatcagatcaaggcccctttgtgtgccctttcagggagcaaactaggccctcaacaaacacggttggtggaagaaggaaagagaggagacagaaaagaaggcaggttggtttggatgaatgcctgcctccctgctagaatgtccaccccagcagggcaggaaccatgtctgtttctgattcttcttcatatttcaagtgtccagtacatggtgggtacctgtttgatgaatgactaaatgaatgaacaaacagctcaaagactgcaacatggagaaaggattggaggaggtgaaacaaggcaaggaggccagtttggttactgaaggagaacaatgttcaaagggggtaggagaaagggaataggttaaataaatatttattaggtatggctggaaggacttgttggtttgacagttgtgctgcaagagaagaggataatggagtcaaccattgctcccaagtttctggcttaagtggctaaagggtgggtggtcccatgtgagagataaggaagaggctgaagaacagatctgagtaatgttgctgggttcaggcatggccacctttgttacgggaaaggagtcccgacctagaccccaagagaggtttcttggatctcatgcaagaaagaattcagggcgagtccatagagtaaagtgaaattaagtttaataagaagtagaggaataaaagaatggttactccatagacagagcagccctgagggctgctggttactcatttttatggttatttcttgatgatatgctaaagaaggggtggattatttatgcctcgcctttttcgaccatatagggtaacttcctgacattgccatggcatttgtaaactgtcatggcgctggtgggagtgtagcagtgaggatgaccagaggtcactctcatggccattttggttttggtgggttttggtcagcttctttactgcaacctgttttttcagcaaagcctttatgacttgtgccaggcttctgtctcatcctgtgactaagaatgccttaaccatctgggaatgcagcccagtaggtgtcaacctcattttacccagctgctattcaagatggggttgctctggttcacatgcctctgacagttgtcctgcaagagaagaggagcatgaagtcaaccattgctcccaagtttctggcttaagtggctaagggatgggtggttcccatgtgagagataagaaagaggctgaagaacagatctgagtaatgttgctgggttcaggcatggccaccttgggccagagatgctgttgaatccaggaggtaatgacatataaattttgatgtcgaagggggaaactttgagtattcttctattgaagtttcatggcactggaaatctagagctttcctccaaaaggcaggaagatgggttctagtcccagctctaatattaacttgtgctaccttaaacaattcatgacatttcaggaatgtgtgatcctcacagccttagcagattccaagattccttttggctttgacattccataccttcaggtagccctagaatttaaagaggaagtttctcttgaaaggctttatcagtcggagctatttgcattacaaggaatataaactcaacttaaactgtatcatacatagcaagttaatatgtggcttcctgggttgtttccttgggcagtagtccgagtggaggccacgctagccaggaaagagtgcggtgatcaatgaatgatgtctagcatagacacagcatcagaaacagggacatatttttgtttcagtcctgaaaccaagggtttccgtctgtggcctttcaaataatgttgattgaatgtaggttctactctggctcagccattagctctgggtaaccttagtttaatcattttatatgccagagcttgacagtttccttatttgtcaagcgggagaaatagtccccatcttttccaccttcattgttgaaaggatctaatgagaaaagaagcatagagccctgtaaggaggagaatcagatattgaagatatgaaggagaatcagaaacagacatggttcctgccctgctggggtggacattctagtagggaggcaggcattctttaacctttatgtaagttcacatgtgtgacactgtgagatcccaacgtgtggataaaagagcaaatacttctggtcccctgagagatgaaagttcaaaagtttattgctaatgaattaattttaaaagtgtagataatcttataataaaagaattcagaaattaaaataaaataaaaggagatttcataaaattgtcaaatgaaaaacaaataagaaaagaaagtgtcagcaaaccaccatggcacatgtatacctatgtaacctgcacgttctgcacatgtatcccagaacttaaagtataataaaaaaattaaaagaaaagaaaagaaagtgttgatgaaaaaggtcaaactctgtcaaatacttgaagagatttattctgagccaaataggagtgaccatggcccatgacacagccctcaggagtcctgagaacatgtgcccagggtggctggtctgcagcttggttttatacattttagggaggtatgagacatcaatcaaatacatttgagaaatacataggtttggtccagaaaaatgggacaattcgaaggggatggtgagtggggagcttcaaggctataggtaaatgtaaacatttcctggttgacaattggttgagtctaaagacctgggatcaatagaaagggaatgttcaggtgaagataaaagattgtggagaccaaggttcttttgaagtcttatagtggcagcccttagagacaatagaagacaaatgtttcctatttagacttttaaaaggtgctagactctcagttaatctctttacgattgggagggcctggaagaaaaaatctagctatgttaatagagcttatttacacatgtaggttttaccccacaaaaaaactttttttttgcagggccatttcaaagaacgacaaaaaaacatgttttggggtaaaatattttgactttcttctttgtcatgtaatgttgtgtcagagtcagataggaaagtaagtcacgatatatagcgttaaataaaacccatctgatgagaatttatggtttgtaggatatgactcccagaccccttagatagaaatctgggcaagataagaaaaaatcagagcttagtcctcaaaagaaagaacgagaaagagaagtaaaaatgaaggaagagagggagggaggaagagagagaggaagaaggaaggaaggaaggaaggaatccttcaatgctggagagagtgtagttaaattgagtggaaattggtaaaactcttttgtagaatagttggcaatatgtatcaagagccttaacaatgtttatactctttggccaaataattctactttttataatccaaatcaaaggtcagcaaactttttaaagaaggactgggtagtaaatatctcaggctcttcaggtctcacggtttctgtcagctgagtttcaaccagcactcaattctaccacagcagaacaaaagcagctatggataatatataaatgaatgggcatggttttgtgtccaataaaaccttgtttacaaaatcaggatgtggccagatttggccccgtgggctatagtttgccaatccctgatgtaaattaagaaaacaggcctggtgcggtagctcacacctgtaatcccaagcactttgggaggccaaggtgggaggattgcttgagccccggagttcaagaccagcctgggcaacatggtgaaacctcatttctacaaacaaaaaaatacaaaaattagcctagtgtggtgatgcttgcctgtggtcccagctactcaggagaatcatctgaacctaggaggtagaggctgcagtgagctatgattgtgccactgcactccagcctgggcagcagagtaagatcctgtctgaaaaaataataataaataaataaataagaaaacatttttagaattatgctaaattcaaaattctaaatataaagagaggtttaagtgaaaagttgctattacatacaactgtatttgtaatagcaaaatattggcacaattagaacactcattaataggggaattaattaattttgatagttccactcaatgaaatactaggtacacatgaaaatcctgtttattaataatttataacaacatgaagaaatgcttgatagaacattacttgagaaatagaaacaaacttatttataatgacgatgataatggtggtagataatatctaagcactttacacagatcatatcatttaactctccaaacagacctatgaagtatacttttttattgtaatggctttccttatggagaagctgatgctgacaaatgttaagtaatttagtcaaggttaagctgctggcaggtgtcacagttgaaatgtgaatacaggtctggtttaactgctaaaagcaaaaacaaaagcaaacaaaccagcggagaaaaatcccaaattaaactctgtttattaaaaataccagaagaaaatacacccaaaagttgttatcggctgtcttgattggtaggtcatagataggaagatcacttaacatgttcactcttttctctaatgaaaatgtatcattttaataaaaaagaaacaacacgcgaatttcataggcaaaccaacgatggcagaatggtaggtgggactgtggggggagaagtgtttatttcggaggtctagaggttcccttggggatgcctttaatcctcttggtcctgctctttgtttgtgaaaagggcatggtgctgcccttccctctgtcttgttctaggtggagtttctagtgtgtcttgtttggactgttggcccatttttatgctgttcttgggttgacatgccagtctctaactctctctctctctctctctctctctctcttctctttcttccccttcttcatccacccgttccgatgtgtagctgacaaggtcaatgacgacttctacaccaagcgacggcacctggctgagctggctgccaaggggaacttacctctgcaccccgtaagagtggaggacgagccccgggccttcagccctgagcacggtcctgccaagcagaatggacagaagtcccgcaccaacaagatgcccccacatcccctggcctacacctctaccaccaactttaagggctgggaccccaacgagcagtccctccggcggcaggcttacagcaacaagggcaagcttggcacggccgagacaggctccagcgaccccttgggaactcgcccccagcactacccacccccacagccatacttcatcaccaacagcaaaacagaagtgactgtctgagctttcaccacagggagcaccctggagaccacactcaactgagagaggcaaaaaacaaccccgcccacaccctccccatcctcccctaatacatgcgtccacacactcactctcaacaagaaccaactctaaacctactggggacacagagtcgcgcttttcctaggtcatgcctgtaacgtgtcggcgggcagctgagaaagaccgaagcgtggacattcagcaatacagcaaaggggaaaatgaggcacactctttccacttcaggcccaagatggccaactcacatgcccaaaccgtggggctgagttttcttttcctcctaacttgaaactgaaatccatggtgacaaaatataaaagtagcacaatttagagaaattgtccatttgagcacatacactacttgccacgtgctgtctgtttctaggttcgaaagccagggtggaaatgggggtagagaatgagggaggacacaagagaagagtgtattctggaagaggagttgttctgggaggaatttgcccacattagaagcatttttctaattccaagaagtggtgacgtggacgtaaaattttgacgagcatgaaacagtaactggaccccaaccattctatttatagtacttttcatatcatccatgttgaaagcaaaaaacaacacaccctcaaactcacagaaagtaaatagaccctgaacccaccgacaatgatgggaaggaaaaaacaaaaaacaaaaaacattttagagaactcccataaggaccatgaccgtggaaatgggagggatgggcttttacggagagggtccggagagtatcaaataactttttaaaaagaggattaaaatgtaagcccactacaaaacagataaaaacggcaaattaggtgttttttttttttttcaaaaatcttgaagacttgttgacattaacaacaacaaatccacagttggaaaagtccacaggagatcagatgaggatccagaagcctctgatttctgggttttgcctccaagacctgaaacagccacagaaacaagtcctctataaactgtatgtccctgacatccctttcccttcagcgcgttgccgccgccgctgccaaacttcaactgctttggactgaaaatgtcataagcgtgggtggtgccttcaatgtgttactgttgtttaatgacagtcttgtttcccaagtgcaacctgtgttcttttagccttccttcctcttctttttctgcagtagtagaagatgtttccatccttcctttgtaggtgagcccaccccataacaccctctgaggggctgctacaatgtcaggggtacccaagaacgaagacctccctactctctacactatcaaaattagtccttccattttctagccctctcaaacctgtcagatgtttcttggtcccgtaattcccatggtccctccaaattacctccccacatacttcatgtgttcatctcccatccagaatgtcctgaggttgtttttctggttggttctcataatccatagtccttggggtcccagcaaagtcagttttcctacaagttgtgtttgttttgtggaagcccaaagaagtggattgagagagaagagatttttatctaaggtggaaggtttttcaactagcccctaaaggtctttggtagttaattaacattcaacagacccacagcaactctggtgtcagaagctataaatggtctggccaaacaagactcagagtattttctgaaatcctgagctgcaaggttctgcctcacctgtctctccactctgacatcacgaaatcagcaaaaccagatatttattctcctcactcccagcagatacgaggacaccaacaatgcagttgatccctctgggcctgagtctcccatctgaaacatggggaattggggtaggtcaagctttttgaaactgcaaaacctctacctgtttttaaaaatgagatcttttgaccaggcacagtggctcacacctaaaatcccagcactttgggaggctgaagcaggtggatcatctgaggtcaggagtttgagatcagcctggtcaacatggtgaaaccccgtctctactaaaaatacaaacattagctgggcatggtggtgggtgcctgtaatcccaactactcgagaggctgaggcaggagaatcgcttaaacttgggaggttgcagtgagctgagaccacaccactgccctctagcctgggtgacggagtgagactatctcaaaaaaaaaaaaaaaaaagaaaaaaaaagagatctttcaaagaacgcataataggagatctccatgtataaaaaggtaccatgctgtacaaagctggggtcagagatttagtgcccaccttctcagcctccttgggaagaccccagagcttcccagagtcaagtaaataccactgggcatggtcagagtttccttgacgttaatgagctatgtacctgcaacacactttggcatctctgtatatcaccttcacaatatttgtatctaaattgattcattttaatgcattttgtttttaaaatgaaaacttcctgtcttcatcacaaatttaaaaaaaatcatcagttgccataaatagaaagcaaacataaaaataagtacaaaggaaacaagcagcgatgattaaattccagctggagtctgttgtctgtgagtctgaactaaagcctggggttctttctttctctctccatctctctgtttctgtttctctctctctcttaaaatgatatcatcaggtattaaataattgttaaaaataccagcacccaatgaagactttctctttgtactaataagatggaccaaaaagtaaatgaaaggggaatcatttcctatgcaagtcagtgttgaacaatgctgtagctatgtactgcctatgatcattgtgcatacactaggggtgcatagcccacacttcagaaaaccctgggttgacttatctgtgaggctctttccagctcaaagtttccataattcttatctcccttttacctcgtggttgctctttgcccccagtccacttcgtcccacccttatctcaactctgattaagagtctttcttggcctctaaatctgtagtattgtattccttctgcatgctccttctcctctgaataaacttcatcaattgaactgggctccttggggtctgcagttgtaattttggcagcaaaggtgcagactggtcattaagatgtagccacaatgatggcccaagaaggacacgtactttccaagtagtcctgtctaggatggaaagctcaggaagtgcttcatagtttattatcttccagttggttttgggagatgaactgaagagggaagtttggatagggaaggtctttttattcttttttttttaatgtatccatggagtatttattattattattattattattattattattattatactttaagttttagggtacatgtgcacaatgtgcaggttagttacatatgtatacacgtgtcatgctggtgtgctgcacccattaactcgtcatttagcattagctatatctcctaatgctatccctcccccctccccccaccccacaacagtccccagagtgtgatgttccccttcttgtgtccatgtgttctcattgttcaattcccatctatgagtgagaacatgcagtgtttggtttttttgtccttgcgatagtttactgagaatgatgatttccaatttcatccatgtccctacaaaggacatgaactcatcattttttatggctgcatagtattccatggtgtatatgtgccacattttcttaatccagtctatccttgttggacttttgggttggttccaagtctttgctattgtgaatagtgccgcaataaacatacgtgtgcatgtgtctttatagcagcatgatttatagtcctttgggtatatacccagtaatgggatggctgggtcaaatggtatttctagttctagatccctgaggaatcgccacactgacttccacaatggttgaactagtttacagtcccaccagcagtgtaaaagtgttcctatttctccacatcctctccagcacctgttgtttcctgactttttaatgattgccattctaactggcgtgagatggtatctcattgtggttttgatttgcatttctctgatggccagtgatgatgagcattttttcatgtgtcttttgactgcataaatgtcttttgagaagtgtctgttcatatccttcgcccactttttgatggggttgtttgtttttttcttgtaaatttgtttgagttcattgtagattctggatattagccctttgtcagatgagtaggttgcgaaaattttctcccattttgtaggttgcctgttcactctgatgatagtttcttttgctgtgcagaagctctttagtttaattagatcccatttgtcaattttggcttcctcttgggagggtagacagacctcacaatatggaaagacgggacaacctatggaactatctgtgacttccatgtaccaagacaaggacgctatagctagggtagtgagacctagaagagagaaaccagaacaaagcagacaggctgtcctcttcctaattccatgccctgacatcagcccctattttttgcctttagctgtcccccagtttccaacccaatgggaccagagtctgacttccctttgccctttcacagtgtctcagcctccatctgccttgggctccgcctggcctccccatctaactcttcccagttttttgtgtaaatggagcatattttatgtgcgaatattttagtaaccgtatgttctgcaagtaaacctgtgttaatacttgtcaacaactgcagagtttatgatacgaataattcttcctacaatgaagaaaaaaacacatttgtttgttttctaagaatgtttatttgtaaacatatgtattcactatattaatatgaatttcttacctggcaataaaactgattatatgtga

SEQ ID NO: 10261 - DNA, 1132 bp, Homo sapiens
atacttgtgtgtatatgcatacatatatacttgtgtgtatatgcatacatatatacttgtgtgtatatgcatacatatatacttgtatgtgtatgtacatatgcatacatatatacttgtatgtgtatgtacatatgcatacatacatatatacacacacgtacacacatgcatatttcttctctcaacttggcaagggcaggatttgcagattataacctagatctcattcatgctgcattttttcactcaccctattgttctagttttcttggattccaacctgggcttatctccaatctgcatttttttttgtttctcctccctagctgaatatatttgtggaaaactcacaaagcaactgggttgccaggtctggtctctatcttcctgtccagtgaaaagaaaatgacatttagaaaacctagtcacaaatgtctgtttaataaattttgtttgttgccctgaaactggattttaatatttctgaatattcagtgcctggaagctagcacaaaatggctatctaaaactgccagaaatttgctttatgtggttcttaatgtgaaactggaaatgcaccttctggatggtgtcacttcttttgagagggatcgctttggtggggtattatggttgtgtctacttatattaagtaactactcactgcccctgaggtgtctcaggacttgggataaataatctaaaagcaaatactttataatggaatatcatgtattctgtttaataatataaaagtgtgtcccaacatattcagtgaggaacatctctgtagaattattttttttctttaacgaagtgtttagtattttctctggcagacctggacacagggtttgagcctagtaggttgagtctgagactgacggatcaaacagatgagagaaaggacttatactggaggataataggctttgaaggttcaaatctttaattagacagtctagtgtttgggatgtatttccaggggtaggggggcctaccattgagacattagttagcttactaatgtccttgggcacgctctatgcacgagtcagccaaattgttgtttgaaatttctgctgtagctctgtagaaaactgaggggcaatgcattttccatctcgag

SEQ ID NO: 10262 - DNA, 229 bp, Homo sapiens
ttttttttttttttgagatggagtcttgctctgtcacccaggctggagtgcagtggtgcgatctcggctcactgcaacctctgcctactgggttcaagcaattctcctgcctcagcctcctgagtagctggaattacaggtgcatgccaccacacccggctaatttttgtatttttagtagagatgggatttcaccatgttggtcaggctggtctcgaactcctgacct

SEQ ID NO: 10263 - DNA, 234 bp, Homo sapiens
tctgattggcccagcatagatcacatgctctcctctggtccaatcatcattataagaaggaggtattgggattggtttgattcaggctccatgctcgcttccatggccaggggtctgaattactgtatagcacaatgagccctcgctagctgggcacatactcacctgcttttcaactgccagctcttacatccctgagcgagggtatctctggccactggagctagctttgcc

SEQ ID NO: 10264 - DNA, 5373 bp, Homo sapiens
tgtcaaacaaaattattttaataccataaaaaattttgcacttcaactttcttctgaggaatggatgattctagagttttcccagctgggcttcattggtaagaaaagtgtcacacttacctacttttcataaataactgtgactctcagaatctaaaaccaagtagctacttgtcctaaagatgtctttttttcctatggaaatgggttgttttagagaaaacttaagttaggtaaacctctttgtatgacatgatgaaagtcaacccagaatagaatttggagacttctaagattattgtatttactgtagcgttcttcacaatgccaaccgtggtgctggtgagcatgtttgattttttcttctctggcatttccagctcctttgttaacataagattgcagttcttttaaaaacaataccacaaagagttttctcatataaattcctagtattttcatgcaatgcatgaagtcctaattcagtgattaatttttattcgtttttctcttaactagttggggcactcatttctaaatggtttttggctgatgtttcaaaattagccagcttaagaatatgtttaaagttagccaggcgcagtggctgcacgcctgtaatcccagcactttgggaggccgaggcgggtggatcacctgagctcagaagttcaagaccagtctggccaacatggtgaaaccctgtctctactaaaaatacaaaaattagcctggcatggtggcagacgcctgtaatcctagctccccgggaggctgaggcaagataattgcttgaacgggggaggtggaggttgtagtgagctgagatcgcgcccctgcattccagccttggggacgagagtgagactcaatctaaaaaaaaaaaaagagtatgtttaaagttgaagaattgaaggaaatttacagggttcaaataatattgagaggttaacatttcatctcctatggtactttttaacactttaagcatttagaggctggacctttgacaatcttgatcatttaactcaaaacttaaaagtcaaaaaccatctttacttgcaaatgctttagtgaaaacaaaattaggagtccttattttttgcatttattgattcagataaaattttttacctaaacctctcaatgttaaatgggaagaatcttagtaagacacgaagggaaaatctctgacttgctttttgaatgctttgggccagtaggtatacgatagattattatagtaacatcgggaatttactatatctgtttacacccaggtgacagctcaagagaaagtttagccgaagcaactttgtttaattttgataatacaagtggggaaattgtttatgatgatttatagttgaaagcgcaagcctcagtgtatgtcgtgggcaagatttcatgaatgtaagccattttggtgcttggtttcttcattgcagctattgactgggaatatcttttcaggtaaaatgtttcaagcgccggatcttactctgattgtagaattcatattcatgttttacaaggagaaacccattgattggctcctggaccatattctctgggtgaaagtctgcaaccctgaaaaagatgcagtaagttaattcctcaccagagtggagggagtttcacttctgtatttcgtgaaagtgacttttagagattttgcaaataaatagttaaataggtaggtgatataaaacttctttcctgagctgataaaaagtttctatattagaagaacttttagatagcagtggaagatcctgtaaagcaggaagctgttacaagatgacgtacattctttaaattgctgataaatgtttctagtgtttgtaagccctggtggtttactaacattggatgtagatgttggtcatatctgttcttggcatgggataccatttcagtttgttttcttcatatttcctgttcactctctttttccttgtatactggggacgatattagaccctaacacatctgtaaatgaggaataaaatagaagtaatattttataccaaaacaatgagacgttaaagtacctttcagcgtgttacaaaaagccagtgttcataataatatgattacctttgggataatagttgcagtcaagtaagtgaataataatttttgctttgatcattcagatagcatgttattaccatagagatcttattgttaagagtaattaggccaggtacagtggttcacgcctgtaatcccagcaccttgggagcccaagactggaggatcacttgagcccagaagttcaggacaagcctgggcaacatatcaagacccatctctacaaaaaaacaatgatttttttttaaaaagagtaattaggtatgttttccttgtccaatttgaattgtgtctctgaaaaaaaactatagcttttaatttatttgatgtaagcataaacaatatgtaaaagtacaaattctttaaaatgtccattttgatgtgtaatgataagtattactgtaagaacatgtcattatagagttgacttaccattcattgtaacaaataagcattagtttgacttcatgaccttctactccctagaatagttggatcctcatacctgctaggttttaggatactaccttctggtgtctgtaggctatcattgcattctgtttaaaaaaaaccacaaaaattttaaaaaaccccaacacattcttagttagaggaaatcatggaatctagcaatggcagagtatctgttttccgacaattagttgaacatataaattgttttaaacaaatcattttttagagatctcagtccttatgcacattttcactgtgacttatagaaatttttattgtaggacacagaaaaagttaacgtcatctttaacctcctacaatacacttgcattccattcgtcctgtgcaattttatttaatatgtggttaggttctaaaatgagcctgtgaggtgaaaacatctatagtagaaattaaaaccacaaaaaccctctaaatcctccataaatttgggtacatgaacttttggacgatttcatccattccttcactcttctgtagtccatgtttttgtgtggcctctaattcttcagttgcttcccctagaatctcgagggtgctgtcgccacatccttgacagtggcctgggaaacccttcgaatcatttatacattgtcccaaagggttatcagcgtgcttgggcccttcggccagagtccttccattgccactggagtgacaggctgagttccagacactgcctcggtggttttgctctctcctcaaccttgcgctccccagtcttctctctctcttgccctttgcccttccctttgactcttcctccctttctttctccttccacttgagtatttgtgcaaagaaaatacactatttcacctttattgtagtgtcagtaataatgccagtgaagtgaaacctcttgagaagtaggcattttagcacccagtatattattagaagtcttctacagtgtaaatttcttttttttttttttttgagacagagttttgctcttgtcacccagactggagtgcaatggcgcagtctcagcccactgtagcctctgccccccaggttcaagcgattctcctgcctctcagcctcctgagtagctgggactacaggcacgggccaccacgcctggcaaatttttatatttttagtagagaccaggtttcaccgtgttggccagaatggtctcaatctcgtgacctcatgatcccccaacctcagcctcccaaagtgctaggattacagacgtgagccaccaagccggctgctaatttttgtatttttttttcttttttttcttttgtgagacggagctcgctccgtggcctaggctggagtgcagtggcgcgatctcggctcactgcaagctccgcctcccgtgttcacgccattctcctgcctcagcctcctgcatagctgggactacaggcaggcgccgccaccacgcccggctaatttttttttttttttttttttttgtatttttagtagagatggggtttcaccgtgttagccaggatggtctcgatttcctgacctcgtgatccgcccacctcggcctcccaaagtgctgggattacaggcgtgacgactgcgccaggccaatttttgtatttttagtagagacagggtttcacacgttggccaggctggtctgaaactgctgacctcaggtgacccatctacctttgcctcccaaagtgctggtactgcaggcgtgagccaccggccccagtgcaagcgtaaatttctaacaaagatgtgtctctcgattttttttggccccaaacttttgtaagttattgaaaatgaaaagtctaaataaatatttgtcaaggtggccctcggtgttgcacagccttcacacgccaggcccatgcatgaggacaggttgagatggaacgtctggaccgtggggcactacgagttgaaacataggtgtcccttcctgtgttgacagagattgtctgtggaatttttaatatcatttacttgcttctaggcaaatgattgcctcacattttcaagttgctttcatgcaacaaaatgcgccatttataatttgcaaattcattatattattaaataaaaaatattttgtatatttgaactaaccccctagtctatagtttattcattttaatattaaaagtcaaatctttgttgacatgtgttgaaggatggttgaaattaaatccttcactcttcccttaactatgcttattttaaatttctggatcatgactatttatcaaggaagtagcaaatctattagtgcctcaaagactagaaaaaaatatgatttgtaattatgacttgaagttgttttcttttcaattttgttgttgttgttttgtttgtttgtttgtttttgtgacagagttttactctgtcacccaggctggagtgcagtggtgcgatctcggctcactgcaacctctgcctcctgggttcaagcgattctcctgcttcagccttccgagtagctgggattataggcttgcacacctggctgatttttgtgtttttagtagagatggggtttcaccatgttggccagactggtctcaaactcctgacctcaggtgatccacctgccttggcctttcaacatgctgggattataggcatgacccaccgcgcccagcccttcttttcaatattttaataaaggacttctcattttccaggtgagggcaagatttcactttatgatgcaacactaacgtgattttttttaatatttagaaacattgtgatagacagaaagcaaatctgcgaattcgcttcagaccttcccttttccaacatgttggtctgcactca

SEQ ID NO: 10265 - DNA, 3086 bp, Homo sapiens
cttcaactttcttctgaggaatggatgattctagagttttcccagctgggcttcattggtaagaaaagtgtcacacttacctacttttcataaataactgtgactctcagaatctaaaaccaagtagctacttgtcctaaagatgtctttttttcctatggaaatgggttgttttagagaaaacttaagttaggtaaacctctttgtatgacatgatgaaagtcaacccagaatagaatttggagacttctaagattattgtatttactgtagcgttcttcacaatgccaaccgtggtgctggtgagcatgtttgattttttcttctctggcatttccagctcctttgttaacataagattgcagttcttttaaaaacaataccacaaagagttttctcatataaattcctagtattttcatgcaatgcatgaagtcctaattcagtgattaatttttattcgtttttctcttaactagttggggcactcatttctaaatggtttttggctgatgtttcaaaattagccagcttaagaatatgtttaaagttagccaggcgcagtggctcacgcctgtaatcccagcactttgggaggccgaggcgggtggatcacctgagctcagaagttcaagaccagtctggccaacatggtgaaaccctgtctctactaaaaatacaaaaattagcctggcatggtggcagacgcctgtaatcctagctccccgggaggctgaggcaagataattgcttgaacgggggaggtggaggttgtagtgagctgagatcgcgcccctgcattccagccttggggacgagagtgagactcaatctaaaaaaaaaaaaagagtatgtttaaagttgaagaattgaaggaaatttacagggttcaaataatattgagaggttaacatttcatctcctatggtactttttaacactttaagcatttagaggctggacctttgacaatcttgatcatttaactcaaaacttaaaagtcaaaaaccatctttacttgcaaatgctttagtgaaaacaaaattaggagtccttattttttgcatttattgattcagataaaattttttacctaaacctctcaatgttaaatgggaagaatcttagtaagacacgaagggaaaatctctgacttgctttttgaatgctttgggccagtaggtatacgatagattattatagtaacatcgggaatttactatatctgtttacacccaggtggcagctcaagagaaagtttagccgaagcaactttgtttaattttgataatacaagtggggaaattgtttatgatgatttatagttgaaagcgcaagcctcagtgtatgtcgtgggcaagatttcatgaatgtaagccattttggtgcttggtttcttcattgcagctattgactgggaatatcttttcaggtaaaatgtttcaagcgccggatcttactctgattgtagaattcatattcatgttttacaaggagaaacccattgattggctcctggaccatattctctgggtgaaagtctgcaaccctgaaaaagatgcagtaagttaattcctcaccagagtggagggagtttcacttctgtatttcgtgaaagtgacttttagagattttgcaaataaatagttaaataggtaggtgatataaaacttctttcctgagctgataaaaagtttctatattagaagaacttttagatagcagtggaagatcctgtaaagcaggaagctgttacaagatgacgtacattctttaaattgctgataaatgtttctagtgtttgtaagccctggtggtttactaacattggatgtagatgttggtcatatctgttcttggcatgggataccatttcagtttgttttcttcatatttcctgttcactctctttttccttgtatactggggacgatattagaccctaacacatctgtaaatgaggaataaaatagaagtaatattttataccaaaacaatgagacgttaaagtacctttcagcgtgttacaaaaagccagtgttcataataatatgattacctttgggataatagttgcagtcaagtaagtgaataataatttttgctttgatcattcagatagcatgttattaccatagagatcttattgttaagagtaattaggccaggtacagtggttcacgcctgtaatcccagcaccttgggagcccaagactggaggatcacttgagcccagaagttcaggacaagcctgggcaacatatcaagacccatctctacaaaaaaacaatgatttttttttaaaaagagtaattaggtatgttttccttgtccaatttgaattgtgtctctgaaaaaaaactatagcttttaatttatttgatgtaagcataaacaatatgtaaaagtacaaattctttaaaatgtccattttgatgtgtaatgataagtattactgtaagaacatgtcattatagagttgacttaccattcattgtaacaaataagcattagtttgacttcatgaccttctactccctagaatagttggatcctcatacctgctaggttttaggatactaccttctggtgtctgtaggctatcattgcattctgtttaaaaaaaaccacaaaaattttaaaaaaccccaacacattcttagttagaggaaatcatggaatctagcaatggcagagtatctgttttccgacaattagttgaacatataaattgttttaaacaaatcattttttagagatctcagtccttatgcacattttcactgtgacttatagaaatttttattgtaggacacagaaaaagttaacgtcatctttaacctcctacaatacacttgcattccattcgtcctgtgcaattttatttaatatgtggttaggttctaaaatgagcctgtgaggtgaaaacatctatagtagaaattaaaaccacaaaaaccctctaaatcctccataaatttgggtacatgaacttttggacgatttcatccattccttcactcttctgtagtccatgtttttgtgtggcctctaattcttcagttgcttcccctagaatctcgagg

SEQ ID NO: 10266 - DNA, 160 bp, Homo sapiens
tgagacggagtctcgctccgtggcctaggctggagtgcagtggcgcgatctcggctcactgcaagctccgcctcccgtgttcacgccattctcctgcctcagcctcctgcatagctgggactacaggcaggcgcccgccaccacgcccggctaatttttt

SEQ ID NO: 10267 - DNA, 1502 bp, Homo sapiens
gcagtcagggctctggccagccctcatggttcaattacataaaacagcaaatggcatttcctgttgtccaaattattacataccgtactaaaaacactaatttttacattatatcttttccactctttagaccccaaccaataattatctcaatcacattttaactaaagaggggaaaaggcacatggttactcatgcagttggtttatgtgttgtggttattaataatcaaagtcaccaaaggcaaagtggaaaaataacagctatgcaatcaagaacagagaaagaagcaagctcaatatagtttccaataaaccttaaaattgggctttgcaaatattaacaaaatatgagaactaaatgatgtgattgtttgtctcttttttatctaaagtggaccagagaaagttttgtgcagcgcagcaagacttctgcatcctgattgaatacagggtcacacaacccagaactcatttctgtgtatgatttctctttaagtgtcttgccctgtaaccctccctctcccagatattttagttgcaaattgagctcttttctaaaattgacaaaaataaaatattaataaactttcaactactggaactataaagaaaaagcatgacgtgtgatattggtggaaggtagagctcattcctcaggcatccatcatggtgccaggcttttcaacagcctgaatgcagaattcttagatcatttcaaacttacaatcttggcaatgacatgacagctggtgcacgtggcatattaattcagcaaacatcaatgccaactgtgtgccccatggatcaactcaccaccttttcttcaacaaagcagcagctgtctggtttttaaatgcttagttacaggggaaaggggtaatattagacatacttatggaagcataaaatcatgtatataagcacgaattgatgtgaccatcgtgatggaataaatttgcataatcaaatcattccgaacaattatttaactctttactagttaacttttagtccttacagtttgaaaatgtaattataaacaaaatctcctcctaacccagaaatgttcacaaaagtggaagaaacagaaagctatttttattgcataagcattaaattagaattcaatgcacatcacatgcattttgctaagagattacaaaagcagaaagaaatcttaccaagcagaaacaaatcattacatacatgctctcaagacaaactataactagtcctcatgtaagaggacatgatggcacagtttgtcacacagaattcattctaaattcatttggtaattgggtgaccatcttgttagctaattgactttatccaaaggaaaaataaatttctaatatctttatcacaggaggcagttttgccacttagagcaaggcatctaccaaagataagcttctcccctcccactgaaactggtagatagggatgctgtcttccttaatgattgcatttcaaagaaatagttcccaggtcctcgag

SEQ ID NO: 10268 - DNA, 51308 bp, Homo sapiens
  SITE (34955): n equals a,t,g, or c
  SITE (34963): n equals a,t,g, or c
  SITE (34965): n equals a,t,g, or c
cggcatgggcaaatacgggcctgagtgtgactggtggtctctgggtgtctgcatgtatgagatgctctatggagaaacgccgttttatgcggagtcactcgtggagacctatgggaagatcatgaaccatgaagtaagacgttgcattttttttttttttttggtacctggctcaggcctaaagtacagagagcacaactagtgcaggaagatccgttaggaagcaacgcgagtagttgaggaagaggtgacggggtttggaccaaactggggacaggcagattggagtagacattggagagggcatccagaggcggggtcggcaccaggagatgtgggcgccagaggaaggggaaggaggttctgagggtgacccccacccccactctcaggggaaggacgctggcctgctccaagctggcttcctggagggaaggcaggtttctgtagacagacgcgtcgtctgcacaggcgcatggagtgaggcgcccgggggtagccagtggggaggtccaggtgggccctttgacctgtggctctagattcactggttaggtgccaactttgattctcaagtctgttccccagaaatcagtccctgtaaatgatcatgtgtctccagatggtggagcccttcatcctccccatcctgtttcctcttttcctccttccctttccgaactgttcactttctcacttccatgtcacctctctccacctcctttgttttcctttttatcattttctcttctgtctgatattttttatttctttttaaaaattttccttagtcatgtgtctttcttttttgagatggagtctcactctgtcgcccaggctggagtacagtggcgcagtctcggctcactgcaacctctgcctcccgagttcaagcgattctcctgcctgtctttttatctttttttttgagacggagtttcgctcttgtcgcccaggctggagtgcaatggtgcaatctcagctatgcctcccaggttcaagcgattctcctgcctcagtttcctgagtagctgggattataggtgcctgccacaacacctggctaatttttttgtattagtagtagagacagggtttcaccatgttagcaaagctggtctcaaactcctgacttcaggcaatccacccaccttggcctcccaaagtgctgggattacaggcgtgagccatcgcacccagtcagtcatgtgtcttcctaatgccgatttcaccctctctaccagcgtgctcatagcatttccctccccgctgtctcctgtgcacatgacagatcccagaatgatcctgattgagtgctggcctgtcctccagccagggcctcccacagttcgctctcacagggagcagattaacactgaagcgggaactggttttccatttaactccaaagcaaagcaaaagttacagttttaaaaaacgtttttcccaaagtagaagcatatttttatttgtaaattaatatataccccctataaaaacttcagacaatgcaaaaatgcatattgtagataatgaaaattgtctcatccacttcttagtgacaaattctgttaaagtaacaactgggacttcgttattactaagagcctgccagcagtcactgagtgccgaccacctgtgggctcttgggtcaggcactccgtgaagcaggtgacattgttcttcctttctgtagatgacagaggtggtggctcagctctcagcccactctaccatgagggtgtgtggcctcggcagacctcagctcgtgtgtgtgcgtgcgcatgtgtgtgtttagatacgtggcatcatgttacatatcaacagttttttgtcattgtatctgtggtgtctttctatagcagcacacagacatgttcctttttctttgtgccccatcttttttgttttgagctggaatctcgctcttgtcacccaggctggagtgcagtggcacgatcttggctcactgcaacttgcacctcccgagtttaagcgattctcgtgcctcagcctcccaggtagctgggattacaggccgccaccacgcccggtaatttttgtatttttagtagagacagggtttcaccttgttggtcaggctggtctggaactcctgacctcaggtgatctgcccacctcggcctcccaaagtgctgggattacaggcgtgagtcactgtgcccagccggtatcttttttaacgagtctcttttttgatgggcatgtaggtaatttgcagttttcttggtcaaaatacagtgcagtcctgagcatgttgtgtttcctcttagtaactgcttttttagtgtgagtttccagaagcggagctgccgtgacgcgtgcactgtgcattctgacggggctgcgcctgtccctcttcccgcgcacggcatgtttcccacattccttgccacttccataggtaaaatgtgtcatttacatgcagtgtggtcacaagtctacaatgagtaaaaccagaaggaccactggttttcttgtttgccttttgggaatggaaatttattagctttggattgcatttagttcccatgaagtgacctgctttgaagctaccatttctactttgtttcctatcatatctgtacaccttaaactctctgaatgcgtccacctgtccaccggtgtttttgccaccccttgcaggagcgattccagttcccatcccatgtcacggatgtatctgaagaagcgaaggacctcatccagagactgatctgcagtagagaacgccggctggggcagaatggaatagaggatttcaaaaagcatgcgttttttgaaggtctaaattgggaaaatatacgaaacctagaagcaccttatattcctgatgtgagcagtccctctgacacatccaacttcgacgtggatgacgacgtgctgagaaacacggtgagtgtgaaagcaccgttctcagggttgctggctgtgggtctgacatgcagtgctgtgttgagggcgttgcttatcaagtcagtacaccataaagctgtgaaatttggcacttaagacagtgtgctttttattccagccttcagctgggtccttaatattcctttaaaaaatgatggatgactcaatttgagtaaaattcagttaaacagctcatttgttttgcaactcaacagaaatacttttgcttttattttcacagtacttgatactttttttttttgagacagtcttgctctgtcgccaggctggagtgcagtggtgcaatctcagctcactgcaacctctgactccctgtttcaagccattctcctgcctcagcctcccgagtagctgagattacaggcatgcgccaccatgcccagctaatttttgtatttatagtagagacggggtttcaccatgttggccaggatagtctcgatctcctgaccacatgatccgcccacctctgcctcccaaagtgctgggattataggcgtgagccatcgcgcccagcctacttgatacttttcaaagcagtgtcacatacatcattgtattagagcttcactgtgaccctgtcaccacattttaggttttttaggttgaaagacaccaagacatgggcttagcctacagtcccataggcagtgtggcggcctctcagttactggtcttttccctacatgtgagagcacgttaaatctttctaacattacagcgctttgtgtctgcattggtgtttctttatacagcaagagttcagaataaagatgataatagcagattttgagtctccgcactgatgtttaagatcaggattttccgagttgggttccagctgtgggacttgtttggtgttccagtcggctctgacagggcctctttgacacactagccagtacctttggtcctggagaattttgctcatatctcgtaaaattcttttgttctcatcaaacccatacatgtgtgacttcgtttggggatagacaagctgaggtttaaccaaataaaaggaaaatcttcttcgttgcttattaatttagagagtttcttacaccgaagcatcatcattcactctgtatgtttcatccccaggacctctggaaatgaatgaccatgaacctggggaaactcctagtagtttagtgggaggagcagaggttcttagaaactatgaagtaccccttgtagggtcatggaaaaggtaaatctgggccgggtgcggcgagtcacccctgtagtcccagaactttgggaggctgaggtgggcggatcacctgaggtcaggatttcgagaccagcctagccaacatggtgaaaccccgtctctactaaaaatacaaaaattagccgggcatgatagcgggtgcctgtaatccagctacttgggaggctgaggcaggagaatcacttgaacccaagaggtggaagttgcagtgcctgagaatacgccactgcactccggcctgggtgacagagcgagagtccatctcaaaaaaaaaaaaaaacaagaaaagttaaatctatttgcaccgaatacttgctttgatggcttcacattcaaaataaaggctgaacttcagaccacatggagaaaatgctgagaaaagtattgtcattgttgaaaggattgttgtcctagactctgactccagactccaactccttccacactgaaatttcccagataaagaactttgcttatattttttattttttgagactgatctccttctgtcacccaggctggaatacagtgatacaacctcagctcactgcaacctcagcctcccatattcaatcaagtctcgtgcctcggcctcttgagtagctgggattacaggcacgtgctgccacatccagctaatttttgtatttttagtagagacggggtttcaccatgttggcctaggctgatcttgaactcctggtctcaagcaagccacccacctcagcctcccaaattgctgggactacaggcgtgagccactgtgcctggcccctggttatagtttttaataaagaaagatcctcagaatgaaaaatagagttataataaacttatctaaaataatctacctttgggttcctttttgccttggggcctcttgtcttaggtcaagaacctgagagtccccaggctctgtccggggtcctcagagggaccatacctgttcacactgttggactctgcacacagttgtgttaagcagtgaattctgtggctttaagaagtctttgaaaatcactaacctggtgacggcctgtgccactgtcatcatcgaaatcagagtgtgtctcctgtgagctttattgtacatacagcgtacagggccaggcttgagaaagacagatctgctatactcatctcccctgcagaggacaccatggaatccgcattctccaaggccacatgttctgcccagtgcctcctgtcaccatgactgtaaccatctttcctctttttacctgtttgtttgaatgtagatttcatttgtgttgtatatgttcttatgcaggaaatattacctcctggttctcacacaggcttttctggattacatttgccattcattggttttacattcacaacggaaaggtatgtctggatttatcattccccagggagacacttcccctgtggtagatgaacagtcagacaccacagtctgtccctgggggcgggctagtgggtggtgtgtgcgctgggaggccattacttaagggagatggagatgggtttttggtcttaaaatatgcacacctgatgactacaggtgataccatagcaaggttgcaggctttttctctacagatatccaggtcgtaaagaattcaggtttcatggcctttgttgtatgttcttctttttacaaccctttaaaaatgttaaaaccattcatgctcgtgatggtgcagaaacaggcctcgggcaggatttctcccagaggccaggggggtgagatttctcccagaggccgtagtttgccaacccctgaccaataggccgccagcattggcagggttagctctgatccagtcggtggccacagcaagcagagcagttgccatgcgcactcagctgagagctggcttccatcagagcactctgctggcttttgtaaggattgtgtgttgtgggcccctgtcccaaatgggcctctttgcaaagttgtgtcgcctgagatggtccacctcgattttaaaaggaaactggggccaagaggagaggggttaggaagaaagagaggtgaaatgagacaatggaagctcccactgtgccacagaatctgattcctggcgtcctctggcagctggaaccacagttgaaaatgtcttgggagggagatatccccatgcttcttttttttttttttttttttttggagacggagtctcgctctgtcgcccaggctggagtgcagaggcacgatctcagcttactgcaacttctgcctcccgggttcaagcgattcccctgccgcagcctcctgagtagctgggactacaggcgcccgccaccacgcccgactaattttttttattttagtagagagagggtttcaccatattggccagatggtctcgatctcctgacctcgtgatctccccgcctcggcctcccaaagtgtcaggattacaggcgtgagccaccgcgcccggctgatatccccatacttctgctcgagcttggaagaaatctcttttggtgtgagaggccagggttaaacagcccataagccaaagtggcagctgctgtcttccagcccacaggaggctttctgggtgggcatattgatttaccagcccccagtgcagaggttcttgatctttctaatacatgccagctcaccaaatgcttgtcacacttgcaggtcccaagcccatggctgtagtttggccagataggcctagagctctcctcttgacagatcccgcagggctggagcagcccagcaccctcagaccacctgtggagaaacactgaccaggtcttctctaaagggggctgggtgcctttatggaactctgcgtaggagctcaaaatttccctgacttcattgtcacataaagagctaagcagaactaagtaactcctaaagcagcccaagaattaagctattaaatgagagccatcctgggcttcagcctgtgcctcggctgtgtgcgtcatcgagtggtctggtccttggtaaggggcttagtgtgctggtcagtgctagaattggtggcttagcctgcaggggaagaagagttgaaagagctgtcctggattgcttggccagttggtggccaaaccaggaagctttcagtggtccatgcgtaccgctgacctgcagacgagctggggctgccccctaagccttgctttacgcaggatccatgccttctggttttgcatttatagttaagtgtgggggatgatttagaaatgccatttcccctcctttgcagaggcgctttctttgaccagcgatggggagggcccttgtcagtgtctccttgaccatctggtcacttgtctaactttggttccataaaccataaagtcttatctcaggtgtttttgtttgctgatttaaaaagactatctttcacctcaggaagattgaaaatgctaatgaaatcgctaaattttcagtagatcaaaaaaacctgttgcttggtttcccagctgtttttctgatcgaggctctctgaagagcataatgcagtccaacacattaaccaaagatgaggatgtgcagcgggacctggagcacagcctgcagatggaagcttacgagaggaggattcggaggctggaacaggagaagctggagctgagcaggaagctgcaaggtgagggcagcgccggctccggggccaggcgggggcgctgcggccaggctgcacctcacgctgtctctccatccctcagagtccacccagaccgtgcagtccctccacggctcatctcgggccctcagcaattcaaaccgagataaagaaatcaaaaagctaaatgaagaaatcgaacgcttgaagaataaaatagcaggtatgtgtttaaaagtgtgacttcttagtctctatttttggtcattactgtcttaaaagggaatttcagagtccttttcataaagtgggaaagcagaaaaaaagcttaggctttagcaagcttatttagagttctcaaattttggtcagttgtttttttttagacggagtttcacttttgtcacccaggctggagtgcagtggtgcgatctcagctcactgaaacctccacctcctgggttcaagcgattctcttgcctcagcctcccaagtagctgggattacaggcatgtgccaccacacccggctaattttgtatttttagtagagacagggtttcaccatgttggccaggctggtctcgaactcctgacctcaggtgatctgcctgccttggcttcccaaagtgctggaattacaagcatgagccactgcgcccagccccaattggcttagttctaatgatattattttatagtcaccagctagaatcagttcctgatattttatctgtacgttctctggctattttctgcttctctgttacagttttcctttttgtggctttcagacagttcctagagctgctttcctcctaaagcttaatcagtgactctgcctgctccttggtgttgtaggtgctagacctgctgtcaccactttcttttggcggttcctaggttatcaaagttccctaaaagctccaatcagtttttgtttttttgtttttttgttttttgagacggagtctcactctgtcacccaggctggagtgcagtggcatgatctcggctcactgcaagctccgcctcctgggttcacgccattctcctgtctcagcctcccaagtagccccccaccacgcctggctaattttttgtatttttacaaaatagagacaggatttcactgtgttagccaggatggtctcgatctcctgacctcgtgatccgcctgccttggcctcccgaagtgctgggattacaggcgtgagccgctgcgcctggcctggctccaatcacttttaagccttaacctcacacaggttggctctgcagttgaccttcacctccaaagcacactttgaatctcaccttctctgcatttcctatcaggaaccccactgtcctgatccaaaaacagacttctttgattgagtcacttactaactaaaacttttcttgcacgctgagaaaggacaagggccaggcactgtgctgggtgacacaggttagagggactgagcagacgagtgtgtgcgccacccaagggctcccagtgctcaggggagatcgctgtcagatcagagtaaagtctagggagcctgttcagcacaggcatgcaggtagctgtgcctatgacactgtgtgtgtgtgtgtgtgtgtgtgtgtgtgtgtgtgtgtaagtaaaaaaacctctgaatgaaaaagtgttgtgaattattaaataatttcctgtcagtaagtcagctaacataaagtttacatatagtcattgcacataaaggaacagagtttatttcctcttttgtccagattcaaacaggctcgagcgacagcttgaggacacagtggcgcttcgccaagagcgtgaggactccacgcagcggctgcgggggctggagaagcagcaccgcgtggtccggcaggagaaggaggagctgcacaaggtaggtggctcagtttggggtgagaaaggcttacgggactttgcagaattctgtaaggtcacgttcatgccgatgatggaagacctcttgggactcctgcccatgggctgtccctgctgcatgcaggacgccagggccaagcctggccccggggcccctgccacgcctgcctgctgcacagcccccgcgtcggctggcagagcttggctcccagtggcaggtgccttccacccccttgcccccagcggttatccacctcgcaatcagcctctccagtctccacttcagacccacagagaaagcagcaccccactgcattctaaagcgaggaaagatgtcgatagggcatggtggccgtgcacagggcatggtggccgtccacagggcatggtggctgtgcatagggcatggtggctgtggcaacacacgctgcgtcccgagccaggccctccccttctctccaccaggcctctgctcttagaaggggacccttagtaatgacagggaactgcagcagagaccctgtgttaaaatctgggtgatttccccccataattcgtttataaatttcatttttagtaatatatgggaaacttttatgctcaggtgtcagcatgttactaacacaattatatgcgtgttttctaaaatacattcattgatacatgttattcttgaacctgtagtttgtgatctgttctctaaaatgtgccaggtatcaaacccagattgtttcttaagataatctgtgggtcatccacgtgagtgatttgtctagaagtgcagtgtggggcacatggcatctcattgcttgacagggtcatagtacctcccagcgggcccagagaggcctggggaggcctccccttcacgtgtgggagctgccctgccagcttgctcagggtcttgtcacttccatctcagaccagcaggtgtgacagtgactgaactgccagatagttgaccagattggctgcagggaggtcagggtcatcagcgtggtgagtgcagagtgacagccagtatccgcacatcagtctgcattgaagggcaggctgtccagcgattgtttttatacagttcttcactgtgacttcaccttcagcactttgtgtcatatgtgttctttttgattttgcttatgtttaagtaactagattgagtgcccaaatgcttcattcagctttgcggctgtgcaggtgacactgggcagaggctgacattacggagcgtcctcctgtaagcacgctgcccccatgtggttgtggggcttttttttttttttttttttttttttttttttttttttttttttttttttttttttgaggcagagtcttgctctgtcgcccagcctggagtgcagtggcacaatctcggctcactgcaacctctgcctcccaggttcacaccgttctcctgcctcagcttcccaagtagctgggactacaggcacccaccaccacgcccagctaatttttttgtatttttaatagagacggggtttcactgtgttagccaggatggtctcgatctcctgacctcaggtgacccgcccaccttggcctccaaaagtgctggggttacaggtgtgagccactgtgcccggcctgtggggcctttcttggtgtgcagttggtctcagcacctgagcccaggcggccttcccattgcctgtgtggctggcacgagacagagcacaggtctttttccaagcagctcagatctgtggctctaatctgtaaccagcattggctgtcgcttttaactcctcaatatcatggaagaccgaacctccagccttccaagcctttgttaggcaaacgtaaaacatctataattgtttttgttcagcaactggttgaagcctcagagcggttgaaatcccaggccaaggaactcaaagatgcccatcagcagcgaaagctggccctgcaggagttctcggagctgaacgagcgcatggcagagctccgtgcccagaagcagaaggtgtcccggcagctgcgagacaaggaggaggagatggaggtggccacgcagaaggtggacgccatgcggcaggaaatgcggagagctgagaagctcaggaaagaggtagctgtggagatggttcagggatggtatcgactggacatttgtgtgacttttataaaacgtctttgaaatcttgggctgcattactgtaaaaggggtcagaaattttctgtggagccaagtaagttgatcggccgagcatttattttgttgttctcattcctcaatattggtgaaattacaataaggttcttgtggtgctgattttctttaattcccttttaagtaaatagagggtgtttatgctgtgctgtgatgcagcctggcttatgtgaataagacacctgcagtccacacagggcaggtggcagtagaaaggcaaatcacgggccgggcacggggctcacgcctggaatcccaacactgtgggaggcgccaagatagatggatcgttgagtttaggagtttgagaccagcctgagcaacatggcaaaacccttcagcacacttcaggccgccgcttaggtgagtgcttctgaagtgtcttggctcagcaccattcgacactgttggaatgattacaaccccaaagagctttcttatgtaggctacagctctcaacatgcaccatggcagaaattaaaacaaaatcttgttaatacaatgaaaacccatttcatgttaacataagtaacatgtttaatgaaaagtaactatttctttaaaaatttggcaggaagaatggcattttttacattttgttagctgttctttaatatctggctgaatggaaaacagttgagttctcatggctgtttcttcaatccgttttgctacaccgttctggataaagtacatgaagaaatcctggcccccacagatagctaattaggaaaggaagggccttgcacacccctgatgtctcaggaccccagggtttgcagccctgtgccgccctgggtgttctgagtgttctgctgtgaatggttgacatattgtaagcgatgcttagtttagaactctattaaaatttccttgataaatcccataaatgagaaggcctggaagcacatgctcctgttcctttcaagttcagggctctttgttctttagccccagaggacctgtttgttttcttcttagtctattttgcaacccaaatatatttgtagttacaggcagttaaaactgaagttagtgatacccctaatgaggaattagcattccacatatgggggaagtgataacagtgcctgggattgccctcgagtggtttgggcacaggcagagatgaagcgggcttggctcgggagctcactgttgaagctgggtgccggcacgtgtgttcgctattctgctcgttcttcgtgtgcgtgtttgaaatggcccatttaataaatgaattcaagttctacagatatcaaaagtactggttttcacgaatcagtgaaatttaaatttcaagaaatgtatcctttcttgaaatttaagtgtcaatttaagctagaattgaaccttgttttattagtaaccaaccatcccagttgaacccagaagtgtatttctcaaactttaatttgtgataagatttgatgaagggtgaacacgcgcagagctccttcgaggtcttgttcttgtggaggtcccgtgggtgctgctgtaactggtgaagcagggctcgctttttgttaatagaaactggatcttccttttgtagctggaagctcagcttgatgatgctgttgctgaggcctccaaggagcgcaagcttcgtgagcacagcgagaacttctgcaagcaaatggaaagcgagctggaggccctcaaggtagtgctgggcgggggtctctgcccttaactgagagggatgcttatctttgctgacgccaccacatggaagtcaccttgtgtaatgtgtggtccgggccgagtgtcacccgaggctgttcagacaagacccacatgtggagaggtggggggtgtgacccctgccttcgtgactgctttcatttttaaaggccaagttcatgtttttcctttgttatataaaagtttcaggcaattcacagtaagtcctaggaaacgaatatctaattggctcatttcctactccagccccatcaattcatagccttcttcacatcgtggtattctaaattcggtgcagttgagttttggaaaagctccttaaagcccgtagcctgctgctgactggggaagagacaggctggccatcagtcggggcccactggtggggctggagggtagcagggaggccgcggagggcgggagtggggaaggccacagtggccaagtgggcaaggggccggaggcggatctccttggcagtatggcgtggcctggatctcctcatgtgtgagccgcgtgcgatgggtctgccctctcccttcgcctcagtgatctggcaactcttcctctgggacgtgggcctgagatgctgttcctccctggcagcgggcttggctggacctcggcatgtggtgcccgaggctcctgcccctttctcagcccttgagtctcctctctgcacagcaggcagagtgagcttggcagaccaaagccggatcacattcctgtgcggcagggcctccgtggctccgcagctgtccagcagctaccctcctgcctgctccagcccagcagtgcctctcctgcccctccttgccccgccacaccagacacactggcctctctgcatgctgcaaacactgccaacacgtcccacctcactccagcctgtgcccttgttctttgcccctagcctgacacctcacttaataggccagcaccttacagaagccgccccagccatcctggcacgccctccactccctacaacctggctggggtgcacggcccctctgcccctttactggtttgctgtcagttcccgccagccccaagagagcagagacctcagtgtcaccccagtcacaaggagggggcccagcacagagtcagccctcagaagaatgctgcaagcatgaatgaacagggtgtggggcagagcttcgggggtcccaggcagacctgggcacatccccctgcaaggccgtctcctgctgtgaccccctagaacctggatcacgttagccaggtcagctacgtcatctggtgtagaccaggcacacacagtccttgggaaggtgtctgcacttgcttgggatgaaaggggttgaaaggacagtgtgacccttgaggacacagaggtttgtcaatttatgttaacctttgtcttcaggtgaagcaaggaggccggggagcgggtgccaccttagagcaccagcaagagatttccaaaatcaaatccgagctggagaagaaagtcttattttatgaagaggaattggtcagacgtgaggcctcccatgtgctagaagtgaaaaatgtgaagaaggaggtgcatgattcagaaagccaccagctggccctgcagaaagaaatcttgatgttaaaagataagttagaaaagtcaaagcgagaacggtaggttttcatgagcttctcagttcagaagatgcaagctgatacccacgccatagatacgaatatcagtgaagttacgagcttttaaaactgtttctcgctcaccttggcaggcataacgagatggaggaggcagtaggtacaataaaagataaatacgaacgagaaagagcgatgctgtttgatgaaaacaagaagctaactgctgaaaatgaaaaggtaattaattcaaagtacctgagttagcactttgtgtggaagttgtaatttaaaaaaaaattatttttaatttgtgtgggtacatagtaggtatatatatttatgggggagtagaatgtcgtcattcttgagtcttggaagtttggttttttttttttgagatggagtctcgctctgtcgctcaggctggagtgcagtgacgcgatcttggctcactgcaacctctgcctcccaggttcatgccattctcccacctcagcctcccaagtggctgggactacaggcgtctgccaccacgcctggctaagtttttgtatttttagtagagacgggttttcaccgtgttagccaggatggtctcaatctcctgacctcatgatccacccacctcagcctcccaaagtgctgggattacaggcatgagccactgcgccggccgaagtttggtgtctttttacagtgcagtaatgtgccatataacgatgcttccatcaatgatagactgtgtgtacaacaggcgtcccgtacgatcataatactgtactttactctacctcttctgtgttgagatacacagatacttagcattgtgctacagccgccggcagcgtcccgcacagcaacatggtatgcaggcttggggcctggaattgacaggctgtaccacagggcctggtgtgcggcagccgcaccgtctaggcttgcgtgagtgcattcacgctgtgtgtgcaaggacacgtttctcagaccgtgttcttgctgtttcactacacgtgactgttttaatttttgaatggagtcatgtgtttggtcttttaaataggatgtttgtattcagcgaaaagatgccaattgcctgaagtcactagctccagctccatcagtttaggtttagatttgaattgaaatgtgacttaagctagatacagtgaaaaaaatccatatcatgaacttagtttggaaaaatctcatgacgattaaagaaaactttcagagtcttcaaaagaacttccagtgttaaatccagcatacttaaaggatgcccgattaacaagttctgtggtgaaattgtttcatttcagctctgttcctttgtggataaactcacagctcaaaatagacagctggaggatgagctgcaggatctggcagccaagaaggagtcagtggcccactgggaagctcagattgcggaaatcattcagtggtacgtgcgcggccccattagcggccgtgaatccgctccctgctcagtccatggggtctgccccgcctcttctgcctgatcctgtgctccacgccaggccgtgcctctcaggctggggtgcaggtctcactgctgttccccagaacttctcatgtctggggcagtggttctgttggaatagaggtggagatacgcccccaccaacccactgaaggacttggggcaaaccgttcacaccccttgcgttctcagagacaggggaggcagagccctcccaaagcggctgcagaagcagcagggagacttggagcgagctgggacctggccctccgctcctaaggtgtgaagttgtaattaaaaaaagagtttttatttttaatttttgtgggtgcgtagtaggtatatatatttatggagtaatagaattttttcattcttgagtcttggaagtttggtgtctttttaaactgcagtcatgtgcaatgtaacgacgcatccatcaatgagatcccgtgtatacaacgggtacactgcgggcactctagctgacgtgacactgtgtcactgtgtgccgaggaaggcgggaacgtccccttcttgtttggcttctccctgatagccatgcttcgtgagatagaacatctgttccctcctccagggtcagtgacgagaaagatgcccggggttaccttcaagctcttgcttccaagatgaccgaagagctcgaggctttgaggagttctagtctggggtcaagaacactggtaggttttgtgtaatgcctgcatttctattactgaataattcgctaatggttttaagtataaatgtgacatataagtactatttagggaattacagtgatgcaagagacttctgtgtaaccagttccccaatttaaggaacgccaacatttgccagctctcagatcatcatggcttctctcgacagcattcattcgtttagcaaataattactgagcactgagctccgtggtgtcaagttaagactggattctgccctcagagagcttgcttttattaatttcattggttcatttagtgatgtgtgtattttatttttttcctcccgcgacagtctcactctgttgcccaggctagagtgcagtggcgtgatctcggcttactgcaacctccgcctcccggcttcaagtgattctcctgcctcagcccccccgagtagctgggattacaggcgtgtgccgctacacctggctcatttttgtattttagtagagacgggtttccaccatgttggccaggctggtctcaaacccctgacctcaggtgatctgcccgcttcggcctcccaaagtgctgggattacaggcatgagcccccacacctggccttcctctgtccattttcttctctttactgttatagatggaaaatgaagcattctcaattgtgttcaatgaaaggttttcagtttgttttaaaaaagaaaaaacagcaagatggcatctctggacttctttgatacctctcgaaagttgatgtcatacattgggcaactcagtaagaaaacaggaggatgatgttagtgaactggcttattccactgttgcttcatcctaggtcactctgtcattcttcccttattattttagtcttttttttttttttttttttttaatcacaggtaggaatgagtaatgacataattcccaggatggtgaaatagcaaaacgtttcaagttatgagaaaaagataaccgaaccctataatgtaccttaggtttgtaaaagggtccagggtccagtggacccatatagaaattgcattacagaggccaggcgcagcggctcatgcctgtaatcccagcactttgggaggccaaggggggtggatcacgagagcaggagttggagactagcctggccaacgtggtgaaaccctgtctctactaaaaatacaaaaattagccaggcatggtggtgcggcacctgtaatcccagctactggctactggagaggctgagacaggaaaatcgcttgaacccaagaggcggaggtcgcggtaagctgagatcacgccattgcactccagcctaggcaacaagagcgaaactacatctcaaacaaaaaaaaaaagaaaagaaaagaaaagaaattgcactacagaatcacttttattcttctaaaagataaagtaaattatttagttattttttagaagatttctgaggaagagtaaaaaaagtcataaaatatcaaaactaaaactcctgaggcacctccataatttagagttaatatctaaatgagaccgtaatggcttaaggttagacaaagataacttatttgttaacattagtttaacaagcggataactgaaaatgcatttttaacgccatgaccgtgtctcaaggacccgctgtggaaggtgcgccgcagccagaagctggacatgtccgcgcggctggagctgcagtcggccctggaggcggagatccgggccaagcagcttgtccaggaggagctcaggaaggtcaaggacgccaacctcaccttggaaaggtacttggtgccagggtctgactccaggtaggagcagtggctgtgtggcctcgagcccgccctgagcctcacgggctccgatgctcctcgcctggaaaatcggggccacggcgtttgctggagccttaggaggcagcacgtcgggttcacctgcaggagccccgaatagcaggccgttctggcactgaggtggccgcgagggtgcagggccttgcctgccgcgggggggtgtggtgcggtgcgagccgtgttttgacggcagcgggtgcttgtgcccccacgctgggtagcgagactcacaccgctgtctgacaggagcccctctcactgcttagtcacctccgtgccgctccattcactaattcaagattgttcctttcaagctaacgtgaatattttaaaacagaggttgaagatggcattctcacttgaaatttttccctaactccaagcagtaacgagaacgccattttcacacagcagtgattcagtcagtatttgctgagagtctcctctttgcagatctggttttacgaggatacgataatgaacgtcagtttcataaaaaccaggccagctctgctgtgccatgaggcaggcgaggacctggaagggacagtgtctctaacagaattaccaagtcccaaatcctgttagtttggggctaaaaaattaatggtaataggtttcagttaaattgactttctttatactgggaattgctgtaagactgttctgttgttaaatcctgtgaccctcccacagcccaacagggtaggcagtcttgttactcccacttacacacactccgcaggtgatttgcccactgtcaccccactgatgagtggaccagcccccacaaactgcatccctcccggccaggtgttccccgtggcagcctgacttcctctgtcccctgcacgaagttgctggaattgcaaggctacccgtgcgggtggtgctggtgcttcttggtgcagccaccatcttgccagttatgggaaagatattgatggggctgacggctgagcggcctgggccctgtgtccctgaagaacagaggactcgcctgggaacaagattaggaaggtcaagagctccattaggccttcatgagacacgccttcctaagccatgactttttaaattcctgtttgaatgtttatatttgaaatattcgtactgttcatggtgtttgcagtagaaaggcccagcatgagctaccgtgttctggacagtcctgagtgctggggagaaatcccggctctctcatcctgacctgccccataccagctcacagacaacctcttctcagtgcacttaaagccatttattttttattttagcaaactaaaggattccgaagccaaaaacagagaattattagaagaaatggaaattttgaagaaaaagatggaagaaaaattcagagcagatactggtaaattaatgttgtgcgattctgcattatttgaatataagtatttttcaaatgaatgtttttattttcttttcgacttaatagttactttagaagcacctacagaattccaaattcagtattttccaaaatcagcattttcaaacaacatcttcaaatatattttccccaaaggtagccattgtttttggtttatccttcctttttttttgagacagtctcgctgtgtcacccaggctggagtgcaatggcacaatctcggctcactgcaacctctgcatcctgggttcaaggattctcccgcctcagcctcgcaagtagctgggattgcaggtgcacaccaccaccacccctggctaatttttgtatttttagtagagatggggttttgccacgttggccaggctggtctgcaactcctgacctcaggcaatccacccacctcagcctcccaaagtgctggaattacaggtgtgagccaccgtgcccagcctatccttcctttcatcttgaaagcatatggcaaatccacacaaatctaggcacacatttgtatcccctgataacacaaaaggcatcattttgtgctggaggggccaccccggcctcctctgcagctgcactgtgcgctgccgtgggctggccagccactgggatggtttattccctggcatttgctgtcacagaaagtgctgccaggagtggctgtatggatagaacatttcctgtttttgtcggtgtatttcgggatagagttctagaagtgggattgccagggcaaagggcaaacatgcctgtacactcttgctgcatgctgacggacaggcctccagaggctgtgcagtgacgttcctcccactttgcatgaggggtttctgccccacagcctacccacaaagtaggatttcagacttttggatttttgccgctctgaataggtgagaaatagcatctccgtagaggtttaacttgcatatttctcataagtaagattgagcatctttttatatgtttgagggacttttgtattttgtgcattatatgtttttattgtttgcccgcttttaaaaattcaggttgttagtcttgcggatttctaaaagccttttgcattttggggattagtgccttttgtttgtgatgtaagttgcaagtatttttcctagtttgtctttgcttatcatttatttatttttttgccaaataaaagtggttttgcagccggtgcggtgctcacgcctgtaatcccaacacttcgggaggctgaggtgggcggatcacctgaggtctggagttcgagaccagcctgaccaacatggagaaaccccatctcttgtaaaaatacaaaattagctgggcgtggtggtgcatgcctgtaatcccagctactcaggaggctgaggcaggagtattgtttgaacttgaacctcaacccgggaggcagaggttgcggtgagccgagattgcaccattgcactccagcttgggcaacaagagcaaaacgctgtcttaaaaaaaagtggggggggttttgccatctctactaaaaatacaaaaattagctgggcgtggtggggcatgcctatagtcccagctactcaggaggctgaggcaggagaatcgcttgaacctgggaggcagaggttgcagtgagctgagatctcgccactgcactccagcctgggtgacagagccagattccgtctgtcaagaaaaaaaaaaaaaggtggttttcaaaattttttgtgtgtcaagttttcagtcttcttccttttttgagtcataaataggaaaatacacctaactcccagttgttggagggattccctcatgcttctcatacttgtgtggcttcatgattgattgattgattgattgattgattgattgattgattcagggtcttgctctgttgcccaggctggagtgcagtagcacgatcagggttcactgcagcctcaactttctgggctcaagtgatcctcccacctcagccccctgagtagctgggactacaggcacgtgccaccacacctggctatttatttatttatttatttatttttagagatggggttgtgccgtatttcccaggctggtcttgaactcctggactcaagcaatctgactgccgtgtctcccaaagtgctaggattacaggcgtgagccaccgtgcccagcctcattttttaaattagaatactgatccatttgaaatttgctctgacatacggttcgaggagtgtatccagttttatcttttgctaatggctagctggttgtccaataccagttattaagctatttttcctgctggttttatgtatgactgttgtcatgtacaggatcaccatgggcttgggtctgtttctggatcttctcccctgttccattgttcatggggaagaaccacttgattcttgttttttgatatgtgtttttttgtgtgtgtgacagggtctcactctgtcacccaggcaggaatgcagtggcacgtgcagcctcaatctccccagctcaagtgatcctcctgtctctgtctcccaagtagctaggaccacaggcacatgccaccatgcacagctaattttatttatttaatttttatggagatggggtctctctgtgttgcccaggctggtctcaaactcatggcctcaagcagtcctccgaccttggcctcccaaagtgctgggatgacaggtgtgaaccactgtgcctggccatgattcttattgtagaggccttagtgaatctgctttaatatctggtagatctgctcctcctccacctacgcccagcccagctgcccctgtggttttgaggggttttgttttttgtttttgtttttttttgagatagagtcttgctctgtcgcccaggctggagtacagtggcatgatcttggcttaccacaacctctgcctcctgggctcgagattctcctgcctcagcctcccgagtagctgggatttcaggcacataccaccatgcacagctaatttttgtatttttagcagagatgggatttcaccatgttggccaggctggtctttaactcctgacctcaggtgatccgcccacctcggcctcccaaagtgttgggattacaggcgtgagccaccgcacccagtcccttggttactttttcaagtgaactttttgattcttgttactctctggggaaaagcctgaccccttttttttttttttttttttttaattgtgatcatgtcagatgtatcagttactcaaggagaattgacatcttgaagacactgagtctgtctgaaaataatatgtagactttagtttttttgccttgactattctttgtttctttttgcagggctcaaacttccagattttcaggattccatttttgagtatttcaacactgctcctcttgcacatgacctgacatttagagtaagtcattgttttttttttaagtgacagatgagtttatgataagttagaaatagtgtcatatatgattttaccactcatggggccacaaacacaccagtaaatatacattcagtgtttatctcagcgttgtgctaactgtgtaattgacccacatgtaatcaacccacattaaacgcatcaggtgacagacatttagggtatttgaggtgctcccagagaagctttctcaactcagattaagtagagatgagattaagaaagtgctcagcctcttcagggagaaatctgcactggcctcagctgtgtagtgagtatttttttttttttttttgagacggagtcttgctctgtcacccaggctggagtgcagtggcatgatcttggctcactgcaacttctgcctcccgggttcaagtgattctcctgcctcagcctcccaagtagctgggactacaggcacccaccaccacgcccggctaatttttgtatttttagtagagacagggtttcaccatattggcgaggctggtctcgaactcctgacctcaggtgatccacccaccttggcctcccagagtgctgggattacaggcgtgagccaccacgcccagcctgtagcgattatttcaagaaaataatacaaattctcacactgggatgggtgcagtggctcacgcctgtaatcccagcactttgggaggctgaagtgggaggatcacttgagcccaggagttcaagacgagcctgggcaatatagcgagaccctatctcttaaaaaaaaaaatcccacactagagcgaataaaaatactttagttgtgtttccatctgtgtagctgtagagttcggcattggggatcgatgggaaaggtggttgatgggaacagtctggcaccaggtgccttgccgagaccctcacaaggaggccaaccccctcaggcagtcggagccgctggtcatctacttgggaattagctgtcgagtgaggagcagaccccactgcctccctccatgggccgcaggttcttggtggcattccgtggaggcaggacagcctttcctcctctttgaaacctgtagggatgcacccttgatagcagcacgcaaagcatattggagcagggagagtggagctcactaatggaactcctgatggggtgcagggtggggaaggtggttccagcctttgatttagaaaactccagccctgcaggcgagtgggaagaatagggtgcatgtgtacatgtccctcacctggggttttgctacatctgctttctctctctcaacataagagactttcttcctctgaagtatttgaaagcgacttgaaggtatcagcgaccccaacatacttcagcagttatttcctacgattggggcattctctcacataaccacagtgtcactgtcatcaggcattctgtgctgatgccgtgggacagcccatatccatgtgtcccttgtcgtcccaggaatgccctttcctgctggcttttcctcctagttctggatccatctggaggtcatgaatcgcatttagtcttttgtttcctttaatctggaacagttccccatctgttcccttttatgacaatgatattttggtgttacccaggccagttgtcctgcagaatgtccactctgggtttgtctgatgtttcatcttcatcagttgtgggttgaacctttggcacaaactctcctcaggaggagctgtgccctttccacgcacagaggccggcctgcccagggtgggtgatgccaagtctgatcgttgggttgaggtggggttggctagggttgctgcctgtgtgagtagggggcagtcagcaggtgcccatgtgggcatctgcccgtagcagcctcccttggggtggactcttagcatcctggcctgtgtctgtcattacaacacccaagcaggcttgcattgctcacagccactctggacgcacacctgttcaccttcacctgtcaaaatgtttgtttgttttatcaaactggcaatgcttgtcttttccctgaaatccacagttttgaagaagcaaatctatttaaccggtaagtgcccgccagatctttgataagcctgtttctgcacaagtcattgcctctctcgttgctgcggagccgggcactgctgtggggaggaataagtggattccagagaaccagagatggtgcttgatcactgaatggaggcggccaggaaagcggtagctttctgtaacattaacagagtagagggcccggtagcaagtgagtttacagccagtactgtccatgagtgtgtgagtcacagctgtggagagtgggcagcagagatggagacagaggcggcatcttcatgcctcattctctacagccagcacgcctgcccttgctaatccctcatccctccctttttttttttttttttttttttttgagacagtcttactctgtcacccaggctggagtgcagtggtgcagtttcggctcaccacaacctccacctcccaggttcaagcaattcttgtgcctcagcatcccaagtagctgggactacaggcacgcgccactatgcccggctaatttttttttttttttttttttttttttgtatttttagtagagatggggtttcaccatgtcgcccaggatggtcttgaacttctgacctcaggtgatccacccacctcagcctcccaaagtgctgggattacaggtgtgagccaccatgcctggcccataattgatttataaattgtgatataagcacacataacataaaacttaccatcttaaccattttttagagtcagggcttccttctgctgcccaggctggagtgccgtgccaccatcatagctcactgcaacctcaaactcctgggctcaagcgattctcctgcctcagcctcctgagtagctggcactacaggtgctcgccaccgcacccagctaatttttaaatttttgtagagatggattcttgctatattgcccagaccggtctcaaactcctaacctcaggtgatctgcccgccttggcctcccaaagtgctgggattataggcatgagccaccgtgcctggccgctaatccctctgtgatttaaatgggaaggcatttattgttgaacagaaaaaaccctccatcaggggctgggtctgttagagcttccagactcttttgaaaattgtctttgagaaacttcttatcccacgctgcctgcatgaaacatgttggtttttactagaaacagtttgtcaccaagattaagtcaatatatcttcatgccagtgttgactgggtgggaaatgatgtttgttcctcctgtctgttacctccaaggactctctctcctcctcgtctgcatcttccctgctagccttttgggaagaagtaagtggctgccagcgctggcttcccgcagctttcactcctgttagtgcacagcctcctcaatgttcctgttcctgaatctgcatccctttgattaattaaccaactaaatgaaacgagtggggcttttacatgcctaaaattaatattctttttctcatttatctaaagatggaaccgtaacacttaacataccttgtttatggggcagatttgcttacatttttgagctttggtaattagccagtcgagctagcctttcccttgtgaatttgcagtacacagttgtgtgtgtgttttatgtgtgtatgctgccatcccatctgaatttggctccttcctcagtggcctaattaattgcaactgttggaaagtgtttatctgatttggttcattgggattctgatgtggaacacaaaatacagctgtcaatgctttaggcgcctacccagccatgtctgtgtcccatcacactgcttgctggtgctaacacttgctactcagcatacctacatgtgcgtctgtaaacagcagtggcctgtgatgataaactattagtttcaggaatacttgttgaaatagagttgtttttaagtggtttcagagtgtagctttagcttcaaataaatcactgtgaaattagaactcttaatttgttaaaacaaaacattgcttccctgtgtcataaaattttcaaggaaattcttaaatctactcatgggcccaccgacctctgttgatgttcgaatttcttcttgatccttgaaatgaggttaagaagcatttggctatttgatcttttcttctttctctttttcttttgagacagtcttgatttgttgcccaggctggagtgcaatgacttgatctcggctcactgcaaccttctcctgggttcaagcgattgtcgtgcctcagcctccagagtagctgggattatgggtgtgtgctagcacacccggctaatttttgtatttttagtagagacggggtttcgccatgttggccaggctggtctcaaaatcctgacttcaggtggtctgcccccctcagcctcccaaattgctgggattacaggcgtgagccaccgtgcctggcctggctaattgatcttaaggctgctaggcttagataacattacttatgaataaaggtcaggaaggatcagcatttccaggtcttgccctttcagtgaccggggcaaggaggctgcaggagggggcgggtatgctcagggctgtgcattagaggtgtctccaggcaaattctcacctcagcggggtgactgtgacttgtcagactccacctgcccacgcaatcaccactcagctgaggaagccaagtgcaggggtcctcagggcaggccggccagctgggagtggagcaggggtctgtgaggagacccaaggggtgataggatccaggagtaagaaccgctgggacttctgggctagacagaatctgcttttattagtaaagaacttgtaagtagagtctggatcatgtagaatatgtcctttcaccccactctttctttcttggttctcacagaccagctcagctagtgagcaagaaacacaagctccgaagccagaagcgtccccgtcgatgtctgtggctgcatcagagcagcaggaggtgagacagcgttgccctggtgatgctcccacctggggtctgccctcgtgtccaggtgaccagatgctgctcacctggcccctgcataacagtttgcagcgagggcctctgcccaggtgctcaagcccacctttcattttgagaattaactgtcagtccctcccctagatgagggaggcttccgcagatgtctcaacattgtagcaaattaaaaatgcagaactgttcactgttaacacattcttgagagaagtgcaccccgtagggccaggtgtctcagccatgctgagctgggccgacactcacctgtcctgcttgtctcccaggacatggctcggcccccgcagaggccatccgctgtgccgttgcccaccacgcaggccctggctctggctggaccgaaggtaggggccttgctttcacccggggcgccttcttagttatttagttgtttatttattctcagttatttagaaaataagttttgtataaataaaacatacttagtcatttttgcatacacacagtagcgaccctcatgttctgtaggaaagttgttgagaatggtgtgtaattcaggaagctgtcaggaccctgtgttttcttaatgataccagtgctacacaaatatattttaattggaaaagttcagcattcagtctccccactctccttctctcattccccaagccatattcccctctccacaggtaggcagcttacttctccacattgattttcatttgtctgcctgcacttagagaaccttacagaaccatgtggctggtgggtgagaatgactcccagcataaacggccctgcagtgcatgtgcggttctgagcctcatcctttccacaagtgcatcctggagagccagcacagcggccccactgggcccctgctcccctgtcctggcctcggcttcttctgtaacatccccttttctttcatataaacatcaacgcagatcagaaagtctccagggtgacgggcccctgagttccaagcattgcgagtacgtagccctgtggcctaaggtggtttttgttgttgttaatgtagacacggcctctgcctgtgcttcctgccacaggcagctatgccggctggacgtaagaagccaaacttctatgaggctacctaagggtttggcttttggactaagactcttgcagagtcagggaccaagtcgcgaggtcgtttatttggttaccatatttgatagcaactctgcagagtgctggtgtgtcactcctagtcctgatggcccggccaccgccccacggcctccctgcccacctcagccagcctcttcccccacagctctctggagtttgtgtcggtcactcccctacttcttgcaagtggtctcacccacatctgtttcctgctgaggatcgtattggtctctgctgcgcctgagcttggtaaacaggcggtcccgcatggcctgcaccacgaccctctgttcagccttggggctgctgcagttgccgctgggttcacaatgtgtccactcctgatgagggaccgtgagcctttccaggcgtttgctgttatgaactgtcctcctgtcggtgattcttgggtgtctcttggacacatgcaaggcctgtgtgcagcccaacctaaatgtggccccaggtcggcccccaagagccagttggtgctggtctccaggaggccaggagcatgagccagaaagagcactggccatgccacctcggccctctggcccagctgacctcgctttttggtagcagtgctctcccactgaaggaagtatttgttggcctctctctggctcaggctcgtaggtggttttcaccactatttgatgagccctgttagggaacacgtagaccaagaccagaacttgcacatttccaccttttcaggataatgcccaagctgtgtataaactggatcacaggcagatggatctgactctcaagagtccatggttcacctcagtgttcttgattttctccttccagccaaaagctcaccagttcagcatcaagtccttctccagccctactcagtgcagccactgcacctccctgatggttgggctgatccggcagggctacgcctgcgagggtgagtgtcgttgcagctcctggggtcagcgtgcacagccccacacccctgcagctaagggcaccagccggctccagggcagccctgatgcaagcaaaccaaactaaagtgaaatgtcattggcatgatttgaggacagggttttttttagggggagtggggagatagggtctcactctgtcactcagacttcagtgcagtggtgcaatcacagttcagctcaagcgattcccttgtctcagcctctcaagtagttgagacctcagacacacacaccaccagcatgcctggctatttttaaattttttttgtagagagttgagggatctcactttgtttcccagaccggtctcaaactctgggactcaagtgatctcccgccttagcctcccgaagtgctggaattacaggcatgagccactgcacccagcctggcaggtttatttttacaaatcctcagtaaaggtctgtggaaccgtggatccctgctgtgctgggggctccattgtgctgtgcgcctctgtggtgactcaactcatctactgagaattactacgaagtagatcatctgcagctgttctagaaaatcagagaggaaaagtaattgtgtaaaaccttccactgtcaaattatctaaagataaccacaattatttgtctctgcttctggtcgtcattcgtattttttttctttttttctatttctttttcgagacaagagtttgactctgttgcccaggctagagtgcagtggctcaatttcagcttactgcaaccgctgcctcccagattcaagtgattctcctgcctcatccgcccaagtagctggggacaggcccacgccaccatgcctggctaatttttgtgttcttagtagagatggggtttcgccatgttgcccaggctggtctcgaactcctgacctcaagtgatccacctgcctcggcctcccaaagtgctgggattacaggtgtgagccactgcgcccagcccatcatatttttaaggctatatcttgtgctcttgccctgtgctgggattcgacatgctcttaccccctcagtgattgccccatttcacagatgagcaaccaccccaagccacccagtgctgtgggagggtcctggagcccagactcgcactggctctgagcactcacgccttcctgaccatgggtctgtgaacagagatgcccttcattctacattatagcagaagcattgttttttgttatttcaactcatgcacattttgattggctgccaagaccccacgtccccatgaccgctggcctgaattgccgtgtagaaactcccacgtgtgggaggcggcccgggctggcagggacagcatggaagcaggcttctgccatgggccctttccctgtgcgcatgctgaagacgcattcatgccagaaaccctgagcttttgtgtggattctgccttgcaactgttcttacctttttgggtgtctggacttgatgtgagacttgatcattattttttgtttgttttgttttattttgtttttttgagatggagtctcgctctgtggcccaggctggagtgcaatagtgtggtctcagctcactgcaacctccgcctcccgggctcaagcgattcttctgcctcagcctcccgagtagctgggattacaggtgcgcttcaccacccctggctaatttttgtatttttaataaaggcgggatttcaccatgttggccaggctggtctcaaactgctgacctcaagtggtctgcccacctcggcctccgaaagtgctgggattccaggcgagacctggtgattattaaattgcctcctcagggcataggttctgcagtgacttctctgtaggcagcaagctttgaaggcagtgttcttgctctcttccagtgtgttcctttgcttgccacgtgtcctgcaaagacggtgccccccaggtgtgcccaatacctcccgagcagtccaagaggcctctgggcgtggacgtgcagcgaggcatcggaacagcctacaaaggccatgtcaaggtaggcggcttcatctccgccctcagccctcggtgcctgtgaggtgcagtgaccaatagccatgcccagccactcttgaaagcagccccttgctgcggcaggtggccctggtgccagtcctagggggcttaccctcctgggcactgaggccatcaggtcggcgcagccgctgttctgaatggcctgggcatcctgaggcctccacgcagacgctcactcagagtccatcctgggctgagtgtccagccagtgggcagaagctcagtctgaaagccactgtgccaggcccacctctacgagactgtcgggctgcgtgtaccacagcaccctgcatggggtggacacagcgttggctgagctgccagctttccctggcaccgtctgctgccacgcatggacccctccccagcaacgccttgagccttcttgggcaaacatccctctgtccaaacagctctgccgccagcctggcagctggaaggagattgtgaacgagtgtaatggggcctggcggcctgcctggcctggtggaacgtggccactgtttgtttttattcataggtcccaaagcccacgggggtgaagaagggatggcagcgcgcatatgcagtcgtctgtgactgcaagctcttcctgtatgatctgcctgaaggaaaatccacccagcctggtgtcattgcgagccaagtcttggatctcaggtctgcgtttgggcagcactgtccttgctctgtgaatcttcctcagctatctttagccaaaaggacggtgtgttccttagtagtctttcacctcattagtacttcacctgcttcattattgtatggttgcaaaaatgggtacagcttagtcatgacttcaggcgctcacatgcgtatgaacagacatgcatacgggcctgcgtgcgcaggaacgggagcgctgtagacgcttcctgcctcgcatgtgtttgcgttgagaagtttgccacaggggaattaatttaacataagaaaaccacatgcccaagaacaagcagaagatatcccagagaaaagccacgcggcccacagccgtctgtgcgttttagagaccgcagcaggtgctggtgtgtggaagaagtctggagccgtgggccatgtgggtgtgcgtggccgtagcgtttgctatgtgaccctgtctcagtgccacccagtgtcagctgcaggagcaggcggggcctccttcccacttcctcttagagttgacatctgtggctcatctgttagtgagaagaggacagtggtcatgttactggcatgtggaatgttgttgtgaaggtaaacgcatcactaagaggcctagctcagcccggggcctgcacacggagccatgctactgcctttgtgtcatctctgtgctgtgcccgtgcaccgtctgttgtgtggtgcacacgggactgctctgggctcaggccggggctgggtactccatctgtagcattggttcttgggggcagggctgctgggtgggtaccctgaggacagcgagggtgagtcggcatcacctggcagcatactccactttccatgtcccttcccccggggcacccgccagtccctggctgtgcacaggtgtgcccctggcctggtggtgaagggccactggtagacgaaaagttggcatgagcccaagtcaggggccccatcggagggctcagcactctttagggaacctcttcagaacagcatttccacacggatccaacaccccgntccccctntnacctcaacacccaccccctgctcccccctcacctccacacccacccccactccctcacccccccacctccaaacccacccccgactccgcgtctccacagccacccccccacctctgcacccaccccacctccgcacccaccccaccccctcatctccacacctagcccccactccccctcatctctacacccaccccactccctctcacctccacacccaccactccccctcacttccaagcccaccccccactccccctcacctccctccaaacccaccccccaccctctcttcacctccacacccaccccaccctccccgtcacctctccacccaccccaccctcccccctcacctccacacctaccccccacccccctcacctccaaacccaccccacccccctactccccgtctcacctccacacccacccccctacttccccctcacctccacccccaccccacccccgactcccctccacctccacacccaccccccactcccctgtcacctccacgcccaccccccaccaccccccactccctcccactcccccctcacttccacacccctcaccccacttgtcctctgcacttggctgttggagggactgcctggctgtgccaagtgcaaaccgagtcttctgtaactggcatagtctggaggcaccagcacagtggggatgaggctccggggtttcccttgcggcatccctaagccctgaaacacctgccagagtcttgagtttgttggccctgcccgtgtttcttacatctggggaggcgagggacccgccctccactgcagaacacggtggtggaaggacatggcagggcagggcagggcagggcgtgggagggccttgggtcctgtgcgcgtgtctcccagcggggtcaatgtttcttccttaccagagatgacgagttttccgtgagctcagtcctggcctcagatgtcattcatgctacacgccgagatattccatgtatattcagggtatgaatttttcattaatctttttaacaaagcacatggttaaaactgattgttctaggcatgtcattgtgctgcggcagccatcagcgcacctccagtgtggccctagggtctcaacctccagcctggctccaggtccttgtgcgtcccgtcctggccaagtagcagcctgtgcccgtctcggggagcctcctggctggcttcttcccagacacccctcttcactgaccctcccttctcctacatctgaaactcctcttccactcagtccacgtcccggccactgtcctcacagcgtgtgcactgccaggcgggcgctgtggcaggttaggcatgaaggtgcctctccagtgccccccagccaattggagccagcgtttttgttgactgagtgagtgctccctcactgagttagtgttagacattgtagcattaggacgttcctagaagactgaattggggaaagaaaccctccagccccctccactgggaattttcttataaacagcaaaattttgataacaaaactaagtctataaattagcttttactaaatcacagctctattcagaaacaaccctgtcatacacagtacaggaaattaccatcattgttactggaacgatggtcatttggtagcatgcgtgctcagaggctgctcacagggaggcatgatttgggccagtgtttttgagatctgcttttcctggacacattttcagaatctacttttataatgattattcaagaaagcagatttaaagtaggcagctactcgtagttttgacaaaagcagaattaacgaaaatgggaccaggaagcgatctcacggggctgtttagaaccccgccccttccgtgtcctgccgcgggagcctctgcaaggcgcccagcgaggtggagtcaggggtccctgcctgggaagcacatcagcccccgttgctcctggggtgcgtggctccagcagggccgtggtagctgcgtgcggctttggcgtttgatgacttctctcttctcttctgtttcctgtcatgaaggtgacggcctctctcttaggtgcaccttctaagaccagctcgctgctcattctgacagaaaatgagaatgaaaagaggaagtgggttgggattctagaaggactccagtccatccttcataaaaaccggctgaggaatcaggtcgtgcatgttcccttggaagcctacgacagctcgctgcctctcatcaaggccatcctgacagctgccatcgtgggtacgtcccaaaggttgtgtccttcaggtgtctgaagcaacagcacttccggcggcgctgcagtgcccatctgaaaatcagatgaaggtcacaggtccatttgggtttgtagacagtttctccatgcatgttaagaagcagacgaggccgggtgcggtggctcacgcctgtaatcccagcactctgggaggccaaggcgggcggatcacaaggtcaggaggttgagaccatcctggctaacacggtgaaaccctgtctctgctaaaaaaaaaaataaaaataaaaataaaatatagctgggcgtggtggcgggcacctgtagtcccagctacttgggagactgaggcgggagaacagcatgaacccaggaggcagagcttacagtgagccgagatcacaccactgcactccagcctgggcgacagaccgagactccgtctcaaaaaaaaagcagatgacctgtgcggacagtacagttggccccggctaagcctgagggtcagctccaggagccccacacacacccaaatccttgcagactcaatcccacagtcagccggccctgtggagttcgtgtagagagaaagtcacccccgatactgaagtgtcacatccctggaatgctgtattctcatccacatatggttgaaaagtatctgtgaatgagcccacccacgcattcaaacccatattgttcacggtcggctgtactgactttgtgtatgttacttacccctccacagatgcagacaggattgcagtcggcctagaagaagggctctatgtcatagaggtcacccgagatggtgagtgagcagggcgtttccagcctgggatgtcacaggcccagcctggcctctgcagacagcacagggtcagtagctcctaagggttaagacaaatgcgcttgatgaaggcgccggaggggccagcgtgccgtgaagaccggcatcgagtgcatggcgacgcggtgctaagttgcgtatcacatccatcgagttcttcaaggggagcactgagcgggagtgggtggggggtcaaggaaagccccctgggaggaggaacagctgcagctttcccacatgtgctgaggcttcacttgagaagctttagtttctttgcttccaattttgacacttcagtcttcccagcgaggaagggcaaaggtatcctggcatgcacccgctccacagccctgggtctaggagcagaaacgtcaggagactggaactggccatgggcagggggcaggggcccaggggagcatccctcaaggaatccagcgacatttcatgtgagccatagtcctttcccgacagacccagcatctctgcatgtgatggccgtggagcgagaagggcggggcagccgctgggcgaggccgtaccctggcagctctgtggggagatctgagcaagcgaggggcttgggttagcctgggggccgtgtgagggcggcgtcttcactgggggccgtgtgagtgtgagggcagtgtcttcactgggggccctgtgagggcagcgtcttcagaggatttgtctcagggtcccagtgggttggggacagctctttgtccctcatgtgcagcgtgagggccctctggttcggggatgagctggaaggaggcccagatcaccccagggccttgctgcgcgaggacccaggtggaagcgctgcccagctggagccctggtgcactgaggggtgtgcacagcagcagaggcagaggagcctttggaccagcccccgaggctgccccaggagcgcgctgtggatgtggggcagcttctccggggggcgttcaagccactggctctgtgggcagagacgggctcagggccgggctcaggctgtgcacacaggaagggagcccaggggagggccccagagtgttccaggcaagtctttagccaaggccgtcagcccctgggagctgctggctgtcccgtcggcctcacgctcttgtcctccttgccacagtgatcgtccgtgccgctgactgtaagaaggtacaccagatcgagcttgctcccagggagaagatcgtaatcctcctctgtggccggaaccaccatgtgcacctctatccgtggtcgtcccttgatggagcggaaggcagctttgacatcaagcttccggaaaccaaaggctgccagctcatggccacggccacactcaagaggaactctggcacctgcctgtttgtggccgtgaaacggctgatcctttgctatgagatccagagaacgaagccattccacagaaagttcaatgagattgtggctcccggcagcgtgcagtgcctggcggtgctcagggacaggctctgtgtgggctacccttctgggttctgcctgctgagcatccagggggacgggcagcctctaaacctggtaaatcccaatgacccctcgcttgcgttcctctcacaacagtcttttgatgccctttgtgctgtggagctcgaaagcgaggagtacctgctttgcttcagccacatgggactgtacgtggacccgcaaggccggagggcacgcgcgcaggagctcatgtggcctgcggctcctgtcgcctgtagtatgtatatgttttctgttgcatatccctgttgctgcttttcccaccgacagtcagcatgtgttcgattttgctttggtttgtcttccagtcccttagttgagtagtcacagagcatcgggagaggtgggccccatgccagcccgcagcagagagcatggttcagatctcacgtctcagaccagcagtaggcgggctcagcaacctctctccctgagcacatggggccggttcttccagaggcctcagcagaggaccccgtcggcgggcataggcccctgggcagaagggctcggcgaaccgagaacggggcgtggcattcatctctcatttaaaaggccttcctcgtgataatacagaaacttacacagtagtaaagacaagcttgaggggttttggtggccagaaaataattcacctctggtgtcttaagttacagtccctctaaggacaagtattttctgaaagtggtaggggctgtttttcaaacagttgggtcactgaattcgcctagttggcatgactttctctatgaatggtggcactggggaacaggtaggaccagtggacacttcccgactggcccgctgtccgattgcttttaaaaccttaaaccgggtggagagcggtggctcacacctgtaatcccagcactgtgcgagactgaggcaggaggctcacttgagctcagaagttcaataccagcctcatctctactaaataacaaaatatggctcacacctgtaatcccagcactttgggagcccaaggcagggcggatcacgaggttaggagatcgagaccatcctggctaatagggtgaaaccccatctctactaaaaatacaaaaaaaaattagccgggcgtggtggcgggcgcctgtagtcccagctactcaggaggctgaggcaggagaatcgcttgaacccaggacacagaggttgcagtgagctgagatcgcaccactgcactctagcctggacaacagagcgagactccgtcttaaacaaacaaacaaactagccaggcacggtgccacatgcctgtagtcccagctactcaggaggctgagacaggaggattgcttgaacccgggacgcagaggttgtagtgatccaagatcgcgccactgcactctagcctgggcaacagagcaggactccgtctcaaacaaacaaactagccaggcacggtgccacatgcctgtagtcccagctacttgggaggctgagacaggaggattgcttgagcccagaagatggaggctgcagtgagccatgatcacaccactacactctagcctgggagacagagtgagaccctgtcttttaaaacagaaaggaaaccttaaacctcagaatccctctgatctatcagagtggcctgcaccatcaaatccacagatcaagaggaggccgggaggaagacgagccgcgcatatgggggtaacaggccaagagttggggaatgacattctccctcagttacctgaagctaaacccctttgtctgccccattgtcagccttgctgagacggcatcatacccagggcgtcgtggctagacaccaggcctgtgaggtgcacggccagctccacccacgggcttactgcagtgtgtcccggctccatcccgatggccacaccacagcagacatgtgtgggcagtggggctgggccgtgggcctgcggtgaggtgcaggaaggggccagtcccgctgcctcagcaccccttgtcctggactcttaccccccaacaccctgtcctcttcataggcagccagcacagggtttaaaaccacacaggatttacatttttgcaaagcgtaacgttgaagagggcccaggtcacttagtgcaatgtatttataatcttggccacacgtgtctggcgtagacacctgaagttcctcggttctccgccttggtgggtcttctctcctgcgggcacagtgcagatgcagatgagtttcagagctggtcaaaagtaattccatcacctgtaggatgcagaactgctcattctgcaccctttgctagtgccctgtgtgggtggcctcccctgcccctccccatcccttagggcaggtgttatcagccctgttggagaggaggcagctgaaggccacaggggccgcgtgctctgtatcagtcacatgtcacatctgtcaggctccagagcccatgttcttttcactagaatctgtttcactagaatcttttcactgggcatctgtttatcactgagtcagcaaactagacttcttcctgcttccttgcaagcgaatccccacatactcggcaggcaagggccttcccagaagcccgtgtggagagtggttccctgaagggcagtgtctggggctgcttttgacttggttctcagaggcctcacaggtgcatctgaaatgctccttctgagacagtttggtgaccaggccagtatcttttgtctttcttgcaaaccctgtttgatttccctttttgtattcagaagaaaagtcctgatcttgtagcctgtttggagtctgtgatagaaacagagcagaaggcttttaaaatgcatcttcagacagtgaggtgtgtcctgatgcaggattaaccttgaactccggaggcagaagagccaggaaggagcactgagctggagctctcttgcatttggggcttgccgcctcccagctctgcgtttctgcaagctgatggccaggagccaagctacgctgaggggctgtgggggcagtgagcgtgccacccacacagagggactgagcggaagacgcacaccgctcccttgtcgtgtggcacagctgtgtcactgctcttctaaacgtggagaaagccccttaaactccaaatggccaaaggctttgcagtccttggtttcacatccgtggcaccttgggtggagttgcttctgtaagccaacagatgagcaggtgaggagcacagcgcggaccccagagctccctgcaggacgcccttagcctcgcttgcatatgccctcagaccgggctgcagaggggcttcccacgcccccatagcacgggttcctaggggtctagggtcattagtgtggagggcagacaggcagggttgttgcccagaggtcagcagtggtttctgtgtggtttttaatacctacctggaaaccggacttgccatctcctacggaagaattagcctcaccatactgaacagtcggcccctacctgaatttccaaagtgttgagcctgaattagtagctttcaggataatcacatctcatgagagctaaatgaaaaaccagactttttaaaagtcaccttcaacatctgtactgtagtattcaaaatattagttacggaagtgattgtggagcatttaaacattggattgtgtttgtttaaactttgaaatgaagatgaattccagagtgggaacatgaagtctttggtgacgtgaaccagctgagggcagtgctgccgcctctgcacttgttcaagtgccaaggcttggcctccggcccgagggcaggtgagttcctgagccactgtggctcaccccgccctgctccgtctgcgctaggttgcagccccacccacgtcacggtgtacagcgagtatggcgtggacgtctttgatgtgcgcaccatggagtgggtgcagaccatcggcctgcggagggtaaggcggcctcggtgccctcctgtgcgggcgggcttctcccggtgcagtctgtgcgtggccgcgcttactgtccctccctggtttccaatccagataaggcccctgaactctgaaggcaccctcaacctcctcaactgcgagcctccacgcttgatctacttcaagagcaagttctcgggtgagccttcctctgcaccgggagtggagggaagggaagttggaggggcgtgtgtccctggtgccgcagcaccgtcaccgcgcgctctgcttctgcaggagcggttctcaacgtgccggacacctccgacaacagcaagaagcagatgctgcgcaccaggagcaaaaggcggttcgtcttcaaggtcccagaggaagagagactgcagcagaggcggtaggagcggggcctcacggggcctgctgggcctcgctctagggagggggccaagaggattctcacgtatccatgaatctcaaaagtgtgtcctttccccagagagatgcttagagacccagaattgagatccaaaatgatatccaacccaaccaacttcaaccacgtggcccacatgggcccaggcgacggcatgcaggtgctcatggacctgcctctggtgcgtgcacggccgggatagggcgggcagggcaccccatctcctcctccccgctcaggcagccatgctggctgagactgtcccaaaggcagtgcctgcgaggctggcgctgtgctctgacctggcgctcctgtcacacaagcccgtctccgctgaagctctgttcacgagcacttaccctgtcacaaggccttgtgcacaggcctcgggccgccctgggcagtgatgctgcaggtacttgtgagagtccaccacgtttcggcctgtgagggcttcctaaggacgtttgccatgaggtggtgatttctcagtaacaccttcgtaccaacagatagcatactttctcttttttacttaagaagtatgtttttggctgggcgtggtggctcatgcctgtaatcccagcactttgggaggccgaggcgggcggatcacgaggtcaggagatcgagaccatcctggctaacacggtgaaaccctgtctctactaaaaatacaaaaagaaattagctgggtgtggcggcaggtgcctgtagtcccagctactggggaggctgaggcaggagaatggcatgaacccgggaggcggagcttgcagtgagccgagattgcaccactgcactccagcctgggtgacagagcaagactccgtctcaaaaaaaaaaaaaattatgtattttaggctgggtgtggtggctcatgcctcttaattccagcactttgggaggccacagtgagtggatcacctgaggtcaggagtttgagaccagcctggccaacatggagaaaccctgtctctactaaactacaaaaataagctgggtgtgatggtgggcatctgtaatcccacctactcaggaggctgaggcaggagaattgcttgaacccaggaggcagaggttgcagtgagccgagatcacgtcattgcactccagcctgggggacagagcaagactcagtctcaaacaaacaaacaaaaaaagtacgctttttataggatttgacctgccctgaagttgctattgccagttcttagttccagactgtccagaacccttgtccaatccagagagccctcttggcccccattttgctcatcaaggtcacgaggccacagccaccgtaggttgcacaaacttcgcagccggccctgccgggtgtcaaccaagcatgctcacgtgttgctatttctgcccagagtgctgtgcccccctcccaggaggaaaggccgggccccgctcccaccaacctggctcgccagcctccatccaggaacaagccctacatctcgtggccctcatcaggtacaggggaagcctggcccccgcagccctgggggaggtggggggtagggggtgctggaatggggagaccccaggcatttgattccgttcttgactttctccctaagaggaaagctgtccttgttctgtaggtggatcggagcctagcgtgactgtgcctctgagaagtatgtctgatccagaccaggactttgacaaagaggtgagacttgcccaggtccagtgctgaggctatgagccaccactgcaggaggaaaagcagcccgaagatctggggccctgggtggtgtcacagcccttttggagcaccccacttgcggtgtgagggtgacgggggcaggggtcggggtggctgtcccctcccccaggaggctcgtgcagcaatctcttggtcagaccccaagctcctttgggaacgctgactagggacagggctgtcacactgccccaggaggaatggaagctttcccgccaacctgcctctttcctctggactccctgtgttgttttatgtacttcaatgtgatacatcagcagtctctttggtctgggctgaccttccacattggttggtctgtctgcccctcccttgggatggcgcttggtgtcagagtgtggggaccacctccaggacaagcgccactgttgtgcgcagctcagccacactgctctggcctcagtttcccctgtgcggaatggggatgagaatgcagtcgagggaggcgaggagctgcagtgctgagggctgaggagtgagctgagggcttagcccccggcgccatccttggagggagggagggagggatgcaggcggaggggccatgctcatctctccaccacacatctcagccccagcactgagatgttttaacatcagctgccgaacggacgggcagatgccttgcacatgttgctggttctgccaaggtcagcgtctcttcctctggaagtcctttgtcttctccatcctttgtccatcctactgttccaccctttattctgcagcaggcccccagcctgtctttgtctggtgggacagtcacatttttgtagcaagcactgctgttactttacagaacgctcctgagtttgagtttgtccgctgtttcctggtcatgggatttgaagtgtgtcttaggctgtcacattatacagaggacatggtgtccctcttagggtactgtgtcctgaggcagccagtgcctgtctcgtctgcatgaccttgtttgttcttttaaatttaagtgaaattcacaaaacaacaatttttttgttttttttattttcataataatatagaggcagggtctcactttgttgcccaggctggtctcccaactcctgggctcaagctgtcctcctaccttggcctcccaaagtgctcagattacaggcgtgagccagcacaccgggcccaaaataactactttaaagttactttaaactactcagtgacatttggtacatccacagagatgcagtcaccacctctttctcattcagaaacatttccactctagctgggcaccacggttcacgtgtgtagtaccagctactagtgaagctgaggtggaaggatggcctgaggagttcaaggccagcctgggcagtgtagtgagatcttgtctctaaaacataataaaaaagacattttcatcatttcaaaataaaccccctgccctttaagcactctctccccgtccctccctcccctcagcacctgggcagccagtagtttcctgtgatttccctgtctggacatttcgtggaaatggaatgcccagcctctcgtatggcagtgtgtttgaccttttgtgcctagctctcacctggcatactgttttgtggctcacccccgttgtgtagcatgcatcagtgctggcgtttctattgctaaataatattctcttgtatggctagaccacggtttgttttcccattcttcccctgaggcacatttgggctgtttctgtccttcagctgttgtgagtggtgctgctgtgaacacgtgtgtgcacatatgtgtttgagtgcctgttttcacattcgggtttatgcctgtgagtgggattgctggatttatgtggtaattctatgtttaactttttgaggaaccaccaaattgttttctgcagcagttgtaccattctatattccaccagcaatgtgagggttctcatatctcgacatcctcaccaatacttgttcttgtttttcttctttttaatagtcgtcctggtggctatgaagtagtacctgattgtggttttgatttgcattctctaaagacttatgtttagcatcttttcatatgcttgttggccatttccgtaccttctttagagaaatgtctactcaaggcctttacccatttttgaaatgggtggtttgtccttttgtggctgggttgtaggagctcctggcatgttctgagtaccaggctcttgtgagagatgtgatgtgcagatgtcttctcttgttctatgggttgtcgttatttacattcctcataattaatgtcttttttttttttttttttttgagacagagtgcagtggcacgatcttggctcactgcaacctttgtttcctgggatcaagtgattctcatgcctcagactcccaagtagctgggactacaggtgcccgccaccatacctggctgatttttgtatttttagtagaggcggggtttcaccatgttggccagactggtctcaaactcctgacctcaagtgatctgcccgccttggcctcccaaagtgctgggattacaggcgtgaggcactatacccggcctagtacagccatcttaacaatatttttactccacgaacatgagatgtgttccatttatttaagctattttttcagcaatgttttgtaatttatagtgtacacatttttcccttctctggttaaactattcctagctattcttttggatgctgttgtaaattgaattttttttttcagtttccttttcagtgtgttcatttctggtgtatagaaacacaactgacttgtgtgtgttgatcttataccctataactttgctgagcttattagttttttgtggattcttttctttgggattttctacgtgtataatcatgtcatctgcaaagagagatagctttacttccttcctaacttggaatccttttcatttctgtttcttccctgatcgctctgcctagaacctctagccccatgttgaatagcagtggtgaaagcaggcatccttgccttgttgctgatcttttttctttttttcttttttttttttttttgagacagagtctcactctacatgtagcccaggctggaatgcagtgatgcgatctcggctcactgcaagctccgcctcctgggttcacgccattctcctgcctcagcctcccgagtagctgggactacaggtgcccaccaccatgccaggctaatttttttttgtatttttagcagagacagggtttcactgtgttaggatggtctcgatctcctgacctcatgatctgcccaccttggcctcccaaagtgctgggattacaggtgtgagccaccgcacccggcccgtggctgatcttaggggaaaattttgtctctcaccattgggtatggttagctgttttattttgttgaggaggttcccctctattcctagtgcttttctcaggaaagagtgtcgcgtttgtgactttgactgcttggttgcaggtgcgcaccactgtgcccggctgatttttgttttttttgttttgttttgttttgtgacggagtctcgctctgtcgcccaggctggagtgcagtggtgcagtctcggctcactgcaagctccgcctcccgggttcacgccattctcctgcctcagcctccccagcagttgggactacaggtgcatgctgccacgcccggctaattttttgtatttttagtagagacggggtttcaccatgttagccaggatggtcccaatctcctgactttgtgatccgcctgccttggcctcccaaagtgctgggattacaggcgtaagccaccacgcccggcctgatttttgtgttttcagtagagatggggtgttaccacattggccaggctggtctcaaactcctgacctcaagtgtgatccacccaccttggcctcccaaagtgctgggattacaggcaggagccactgcgtccggccccatctgatttcttcactacagagttgctgtcttttgtaatgataattaccatgttatttttgagtgggattagacatcaatttgtgactctcaccagcacgcctaagggccccacgaatcgctggtgtagagcgtgtgtgttttcataacatgaagggagaagagcagttgcgacagttgtccctgagcaaacatttgcatccagctgggcacgcgtgcctccccaggctagggcagcgggtgctcaccctgccctcttcctgttcacagcctgattcggactccaccaaacactcaactccatcgaatagctccaaccccagcggcccaccgagccccaactccccccacaggagccagctccccctcgaaggcctggagcagccggcctgtgacacctgaagccgccagctcgccacaggggccagggagctggagatggcctccagcgtcagtgccaagactgagcgggccctccagtgttgtccaaggaaatgtagaatcactttgtagatatggagatgaagaagacaaatctttattataatattgatcagttttatgccgcattgttcgtggcagtagaccacatctgttcgtctgcacagctgtgaggcgatgctgttccatctgcacatgaaggacccccatacagcctgtctcccacccctgacaacccgagagggcatatggggccctgccaacaccacttcctcagcagaaacccgtcatgacgcggctgcttcggaagcagacatctggggacacagcctcagtacccagtcttttccctagttcctgaaactttcctaggaccttaagagaatagtaggaggtcctatagcattcccagtgtcactagaattttgaagacaggaaagtggaggttagtctgtggcctttttttcatttagccattgcacagtcagctgcagaagtcctgctgaccacctagtcatggacaaaggcccaggaccagtgacaccctgcgtccctgtgtgcattaagttcattctgggtcgcagccatgaagtgtcaccagtatctactactgtgaagtcagctgtgctgttttccattcgcttccacggcttctgcctcctgccataaaaccagcgagtgtcgtggtgcaggcaggccctgtggcctgctgggctgagggaagtcagagccccagggcgccacgaagcagccactgggataccccaccccgccccgccctgcccgcccccccccccaccagtcctgcccccgcatggagcccccgtgattagtagcccgtatgatcacgtagacccacccaacacactcctgcacactggccccggcccacggcacagcaatcccctgcgcgtggatttcacctcaccctttgtaccagatgttgagtgaccagctctgtggccctgtgtcgtcagaggcttgtgattaactgtggcggcagacacagcttgtccacagcttgggccaggcttcccctgtcctcccaccggtcggctgcttggcaaggctgttcaggacgtgcacttccccaagtcggcactgagtggcccagcaccgcctagccctgccaccccactgccctcctgggccttctgctggatgggcacctggggggttctggtttttacttttttaatgtaagtctcagtctttgtaattaattattgaattgtgagaacatttttgaacaatttacctgtcaataaagcagaagacggcagttttaaagtt

SEQ ID NO: 10269 - DNA, 512 bp, Homo sapiens
ccatatgatctgccttcgcacccagcagcttggtaccaggagggatgcccaccccttttccgtccgccccaccaggcacggcctttggctccgtccaccccttgcctctctcccgcccctccctccagctcctcaccctcccctcaccggaaggcgggggaagccccactcctagttctgggttcaacttcgcagatcccagcctctggccgcccaggtgacgaccagcgctgcctccagcagtggccagctagacccctcccatgtcccccagtgcgaatgcggcgcaaggctgggctcctagtcctcatgggcggggccggtggcggcatagccaggctgacagcaggtgcaggaaacacctttactgagtaaggccaccctgtccttggcccccggaggagggggaaaggaaggggaggtttgggggctggacgaggaggtggctagcccccagttcgactggggccagagggggtggagagccccaaggtcgacggtcaggcggccgc

SEQ ID NO: 10270 - DNA, 488 bp, Homo sapiens
gaggtggagttctctgctgatccattcagcctgagcagttctcacaccactggctctggggtgctgcttggaccctgtgtctctcttcccagaggggaccctcgggagagcctggccttccccagacaggcctgtggttgttgtctccagttcctgcctgagcctcagtcttagagactcagcccgtcaggatggccctatactctccatcgttctctctgcttggatgatttctcagcttcaccaggctcctcccgcttgctctgaggtggcccgtgccctcgcagctttctgcagaggtgtcactgtactctggcacctgcctgctgatgtagatagcaggggagctgttttctcccttgcgggggtaggagcggtcttagcctcctggtgcgctgtccagggaatgcctgagcacccggctaatgcctggaccaacttctgcatgttcccatgaggaagaccacagggtcggctgcaggtgagca

SEQ ID NO: 10271 - DNA, 5976 bp, Homo sapiens
tttattttattttattttatgattattatactttaagttttagggtacatgtgcacaatgtgcaggtttgttacatatgtatacatgtgccatgttggtgtgctgcacccattaactcgtcatttagcattaggtatatctcctaatgctatccctccccctccctgcaccccacaacagaccccagtgtgtgatgttccccttcctgtgtccatgtgttttccttgttcaattcccacctatgagtgagaacatgcggttttttgtgagaacattttggttttttgtccttgtgatagtttgctgagaatggtggtttccagtttcatccatgtccctacaaaggacatgaactcatcattttttatggctgcatagtattccatggtatatgtgccacattttcttcatccagtctatcgttgttggacattagggttggttccaagtctttgctattgtgaatagtgccacaataaacatacgtgtgcatgtgtctttatagcagcatgatttataatcctttgggtatatacccgtaaggggatggctgggtcaaagggtatttctagttctagatccctgaggaatcgccacactgacttccacaatggttgaactagttttcagtcccaccaacagtgtaaaagtgttcctatttctccacatcctctccagcacctgttgtttcctgactttttaatgatcgccattctaactggtgtgagatggtatctcattatggttttgatttgcatttctctgatggccagtgatgatgagcattttttcatgtgttttttggctgcataaatatcttcttttgagaagtgtctgttcatatcctttgcccactttttgatggggttgtttgtttttttcttgtaaatttgtttgagttcattgtagattctggatattagccctttgtcagatgagtaggttgtgaaaattttcttccattctgtaggttacctgttcactctgatggtagtttcttttgctgtgcagaaggtctttagtttaattagatcccatttgtcaattttggcttttgttgccattgcttttggtgttttagacatgaagtccttgcccatgcctatgtcctgaatggtattgcctaggttttcttctagggtttttatgattttagatctaacatgtaagtctataatccatcttgaattaatttttgtataaggtgtaaggaagggatccagtttcagctttctacatatggctagccaattttcccagcaccatttattaaatagggaatcctttccccatttcttgtttttgtcaggtttgtcaaagatcagatggttgtagatacgtggcattatttctgagggctctgttctgttccattgatctatatctctgttttggtaccagtaccatgctgttttggttactgtagccttgtagtatagtttgaagtcaggtagcatgatgcctccggctttgttcttttggcttaggattgacttggcaatgcaggctcttttttggttccatatgaactttaaagtagttttttccaattctgtgaagaaagtcattggtagcttgatggggatggcattgaatctataaattaccttgggcaatatggccattttcacaatattgattcttcctacccatgagcatggaatcttcttccatttgtttgtatcctcttttatttcattgagcagtgtggtttgtagttctccttgaagaggtccttcacatcccttgtaagttggattcctaggtattttattctctttgaagcaattgtgaatgggagttcactcgtgatttggctctctgtttgtctgttattggtgtataagaatgcttctgatttttgtacattgattttgtatcctgagactttgctgaagttgcttatcagcttaaggagattttgggctgagacaatggggttttctagatatacaatcaattcatctgcaaacaggtacaatttgacttcctattttcctaactgaataccctttatttccttctcctgcctaattgccctggccagaacttccaacactatgttgaataggaggggtgagagagggcatccctgtcttgtgccagttttcaaagggaatgcttccagtttttgcccattcagtatgatattggctgtgggtttgtcatagatagctcttattattttgagatacgtcccatcaatacctaatttattgatagtttttagcatgaagcattgttgcattttgtcaaaggccttttctgcatctattgagataatcatgtggtttttgtctttggttctgtttatatgctggattatgtttattgatttgcatatgtggaaccagccttgcatcccagggatgaagcctacttgatcatggtggataagctttttgatgtgctgctgaattcggtttgccagtattttattgagattgttgcatcaatgttcatcaaggatattggtctaaaattctcttttttggctgtgtctctgccaggctttggtatgaggatgatgctggcctcataaaatgagttagggaggattccctctttttctattgattggaatagtttcagaaggaatggtaccagctcctccttgtacctctggtagaattcggctgtgaatccatctggtcctggactttttttggttcgtaagctattgattattgccacaatttcagatcctgttattggtctattcagagattcaacttcttcctggtttagtcttgggagggtgtatgtgttaaggaatttatccatttcttctagattttctagtttatttgggtagaggtgttgtagtattctctgatggtagtttgtatttctatgggatcggtggtgatatcccctttatcattttttattgcgtctatttgattcttctctcttttattctttattagtcttgctagcgatctattgattttgttgatcttttcaaaaaaccagttccaggattcattaattttttgaagggttttttgtgtctctatttccttcagttctgctctgattttacttatttcttgccttctgctagcttttgaatgtgtttgctcttgcttttctagttcttttaattgtgatgttagggtgtcaattctggatcttttctgctttctcttgtgggcatttagtgctataaatttccctctacacactgctttgaatgtgtcccagagattctggtatgttgtgtctttgttctcgttggtttcaaagaacatctttatttctgccttcatttcattaggtacccagtagtcatacaggagcaggttgttcagtttccatgtagttgagtggttttgagtgagtttcttagtcctgagttctagtttgattgcactgtggtctgagagacagtttgttataatttctgttcttttacatttgctgaggagtgctttacttccaactatgtggtcaattttggaataggtgtggtgtggtgctgaaaaaaatgtatattctgttgatttggggtggagagctctgtagatgtcaattaggtctgcttggtgcagagctgagttcaattcctgggtagtccttgtttacttttgtctcactgatctatctaatgttgacagtgggatgttaaagtctcccattattattgtgtgggagtctaagtctctttgtaggtcactcaggacttgctttatgaatctgggtgctcctgtattgggtgcatatatatttaggatagttagctcttcttgttgaattgatccctttaccattatgtaatggccttctttgtctcttttgatctttgttggtttaaagtctgttttatcagagactaggattgcaacccctgccttttttttgttttccatttgcttggtagatcttcctccatccttttattttgagcctatgtgtgtctctgcacgtgagatgggtttcctgaatacagcacactgatgggtcttgactctttatccaatttgccagtctgtgtcttttaattggagcatttagcccatttacatttaaagttaatactgttatttgtgaatttggtcctgtcattatgatgttagctggttattttgctcattagttgatgcagtttcttcctagctttgatggtctttacattttggcatgtttttgcagtgggtggtaccggttgttcctttccatgtttagtgcttccttcaggagctcttttagggcaggcctggtggtgacaaaatctctcagcatttgcttgtctgtaaagtattttatttctccttcacttatgaagcttagtttggctggatatgaaattctgggttgaaaattctgttctttaagaatgttgaatattggcccccactctcttctgtcttgtagagtttctgccgagagatccgctgttaatctgatgggcttccctttgtgggtaacctgacctttctctctggctgcccttaacattttttccttcatttcaactttggtgaatctgacaattatgtgtcttggagttgctcttctcgaggagtatctttgtggcgttctctgtatttcctgaatctgaatgttggcctgccttgctagattggggacgttctcctggataatatcctgcagagtgttttccaacttggttccattctccccgtcattttcaggtacaccaatcagacgtagatttggtcttttcacatagtcccatatttctcggaggctttgttcgtttctttttattcttttttctctaaacttcccttcttgcttcatttcattcatttcgtcttctatcactgagaccctttcttccagttgatcgcatcggctcctgaggcttctgcattcttcacttaattctcgagccttggctttcagctccatcagctcctttaaggacttctctgcgttggttattctagttatccatttgtctaattttttttcaaagtttttaacttctttgccattggtttgaatttcctcctgtagctcagagtagtttgattgtctgaagccttcttctctcaactcgtcaaagtcattgtctgtccagctttgttctgttgctggtgaggagctgcgttcctttggaggaggagaggcactctgctttttagagtttccagtttttctgctctgttttttccccatctttgtggttttatctacttttggtctttgatgatggtgacacacagaagggtttttggtgtggatgtcctttctgtttgttagttttccttctaacagacaggaccctcagctgcaggtctgttggagtttgctagaggtccactccagactctgtttgcctgggtatcagcagcggtggctgcagaacagcggtggctatagaactgcggtgactatagaacagtggatcttggtgaaccacaaatgctgctgcctgatcattcctctggaagttttgtctcagaggagtacccggccgtgtgaggtgtcagtctgcccctactggggggtgcctcccagttaggctgctcgggggtcaaggacccacttgaggaggcagtctgccttttctcagatctccagctacgtgcttggagaaccactactctcttcaaaactgtcagacagggacatttaagtctgcagaggttactgctgtctttttgtttgtctgtgccctgcccccagaggtggagcctgcagagacaggcaggcctccttgagctgtggtgggctccacccaattcgagcttcctggctgctttgtttacctaatcaagcctgggcaatggcaggcgcccctcccccagcctcgctgctgccttgcagtttgatctcagactgctgtgctagcaatcagcgagactccatgggcatacgaccctctgagccaggtgtgggatataatctcctggtgtgccattttttaagcccgttggaaaagcgcagtattagggtgggagtgacctgattttccaggtgccgtctgtcacccctttctttgac

SEQ ID NO: 10272 - DNA, 6070 bp, Homo sapiens
tttttttttttcttttatttatttatttattttttcttttttttttttaattatactttaagttttagggtacatgtgcacattgtgcaggttagttacaaatgtatacatgtgccatgctggtgcactgcacccactaactcgtcatctagcattaggtatatctcccgatgctatccctcccccctccccccaccccacaacagtccccagagtgtgatattccccttcctgtgtccatgtgatctcattgttcaattcccacctatgagtgagaatatgcggtgtttggttttttgttcttgtgatagtttactgagaatgatgatttccaatttcatccatgtccctacaaaggacatgaactcatcattttttatggctgcatagtattccatggtgtatatgtgccacattttcttaatccagtctatcattgttggacatttgagttggttccaagtctttgctattgtgaataatgctacaacaaacatacgtgtgcatgtgtctttatagcagcatgatttatagtcctttgggtatatacccagtaatgggatggctgggtcaaatggtatttccagttctagatccctgaggaatcgccacactgacttccacaacggttgaactagtttacagtcccaccaacagtgtaaaagtgttcctatttctccacatcctctccaacacctgttgtttcctgactttttaatgattgccattctaacaggtgtgagatggtatctcattgtggttttgatttgcatttctctgatggccagtgatggtgagcattttttcatgtgttttttggctgcataaatgtcctcttttgagaagtgtctgttcatgtccttcgcccactttttgatggggttgtttgtttttttcttgtaaatttgtttgagttcattgtagattctggatattagccctttgtcagatgagtaggttgtgaaaattttctcccattttgtaggttgcctgttcactctgatggtagtttcttttgctgtgcagaagctctttagtttaattagatcccatttgtcaattttgtcttttgttgccattgcttttggtgttttagacatgaagtccatgcccatgcctatgtcctgaatggtaatgcctaagttttcttctagggtttttgtggttttaggtctaacgtttaagtctttaatccatcttgaattgatttttgtataaggtgtaaggaagggatccagtttcagctttctacatatggctagccagttttcccagcaccatttattaaatagggaaccctttccccattgcttgtttttgtcaggtttgtcaaagatcagatagttgtagatatgcggcgttatttctgagggctgtgttctgttccattgatctatatctctgttttggtaccagtaccatgctgttttggttactgtagccttgtagtatagtttgaagtcaggtagtgtgatgcctctagctttgttcttttggcttaggattgctttggtgatgtgggctcttttttggttccatatgaactttaaagtggttttttccaattctgtgaagaaagtcattggtagcttgatggggatggcattgaatctgtaaattaccttgggcagtatggccattttcacgatattgattcttcctacccatgagcatggaatgttcttccatttgtttgcatcctcttttatttccttgagcagtggtttgtagttctccttgaagaggtccttcacatcccttgtaagttggattcctaggtattttattctctttgaagcaattgtgaatgggagttcactcatgatttggctctctgtttgtctgttgttggtgtataagaatgcttgtgatttttgtacattgattttgtatcctgagactttgctgaagttgcttatcagcttaaggagattttgggctgagacaatggggttttctagatatacaatcatgtcatctgcaaacagggacaatttgacttcctcttttcctaattgaataccctttatttccttctcctgcctgattgccctggccagaacttccaacactatgttgaataggagtggtgagagagggcatccctgtcttgtgccagtttttaaagggaatgcttccagttttttcccattcagtatgatattggctgtgggtttgtcatagatagctcttattattttgaaatacgtcccatcaatacctaatttattgagagtttttagcatgaagagttgttgaattttgtcaaaggccttttccgcatctattgagataatcatgtggtttttgtctttggctctgtttatatgctggattacatttattgatttgcatatattgaaccagccttgcctcccagggatgaagcccacttgatcatggtggataagctttttgatgtgctgctggattcggtttgccagtattttattgaggatttttgcatcaatgttcatcaaggatattggtctaaaattctctttttttgttgtgtctgtgcctggctttggtatcagaatgatgctggcctcataaaatgagttagggaggattccctctttttctattgattggaatagtttagaaggaatggtaccagttcctccttgtacctctggtagaattcgcctgtgaatccatctggtcctggactttttttggttggtaagctattgattattgccacaatttcagctcctgttattggtctattcagagattcaacttcttcctggtttagtcttgggagagtgtatgtgtccaggaatttatgcatttcttctagattttctagtttatttgcgtagaggtgtttgtagtattccctgatggtagtttgtatttctgtgggattggtggtgatatcccctttatcattttttattgcgtctatttgattcttctctctttttttctttattagtcttgctagcggtctatcaattttgttgatcctttcaaaaaaccagctcctggattcattaattttttgaagggttttttgtgtctctatttccttcagttctgctctgattttagttatttcttgccttctgctagcttttgaatgtgtttgctcttgcttttctagttcttttaattgtgatgttagggtgtcaattttggatctttcctgctttctcttgtggacatttagtgctataaatttccctctacagactgctttgaatgcatcccagagattctggtatgttgtgtctttgttctcgttggtttcaaagaacatctttatttctgccttcatttcgttatgtacccagtagtcattcaggagcaggttgttcagtttccatgtagttgagcggtattgagtgagattcttaatcctgagttctagtttgattgcactgtggtctgagagatagtttgttataatttctgttcttttacatttgctgaggatttcttcacttccaactaagtggtcagttttggaataagtgccatgtgatgctgacaaagatatatatgctgttgatttggggtggagagttctttagatgtctattaggtccgcttggtgcagagctgagttcaattcctgggtatccttgctgactttctgtcttgttgatctgtctaatgttgacagtggggtgttaaagtctcccattattaatgtgtgggagtctaagtctctttgtaggtcactcaggacttgctttatgaatcttggtgctcatgtattgggtgcatatatatttaggatagttagctcttcttgttgaattgatccctttaccattatgtaatggccttctttgtctcttttgatctttgttggtttaaagtctgttttatcagagactaggattgcaaccccttccttttttggttttccattggcttggtagatcttcctccatccttttattttgagcctatgtgtgtctctgcatgtgagatgggtttcctgaatacagcacactgttgggtcttgactctttatccaatttgccagtctgtgtcttttaattggagcatttagtccatttacatttaaagttaatattgttatgtgtgaatttgatcctgtcattatgatgttagctggtgattttgctcgttagttgatgcagtttcttcctagtcttgatggtctttatattttggcatgattttgcagtggctggtaccggttgttcctttccatgtttagtgcttccttcaggagctcttgtaaggcaggcctggtggtgacaaaatctctcagcatttgcttgtctataaagtattttatttctccttcacttatgaagcttagtttggctggatatgaaattctgggttgaaaattcttttctttaagaatgttgaatattggcccccactctcttctggcttgtagggtttctgccgagagatctgctgttagtctgatgggcttccctttgagggtaacccgacctttctctctggctgcccttaacattttttccttcatttcaactttggtgaatctgacaattatgtgtcttggagttgctcttctcgaggagtatcttcgtggcattctctgtatttcctgaatctgaacgttggcctgccttgctagattggggaagttctcctggataatatcctgcagagtgttttccaacttgattccattctccacatcactttcaggtacaccaatcagacgtagatttggtcttttcacatagtcccatatttcttggaggctttgttcatttctttttattcttttttctctaaacttcccttctcgcttcatttcattcatttcatcttccatcgctgataccctttcttccagttgatcgcatcggctcctgaggcttctgcattcttctcgtagttctcgagccttggttttcagctccatcagctcctttaagcacttctctgtattggttattctagttatacattcttctaaatttttttcaaagttttcaacttctttgcctttggtttgaatgtcctcccgtagctcagagcaatttgatcgtctgaagccttcttctctcagctcgtcaaagtcattctccatccagctttgttccgttgctggtgaggaactgcgttcctttggaggaggagaggtgctctgctttttagagtttccagttcttctgttccgttttttccccatctttgtggttttatctacttttggtctttgatgatggtgatgtacagatgggtttttggtgtggatgtcctttctgtttgttagttttccttttaacagagaggaccctcagctgcaggtctgttggagtacccggccgtgtgaggtgtcagtgtgcccctgctggggggtgcctcccagttaggctgctcggggatcaggggtcagggacccacgtgaggaggcaatctgcccgttctcagatctccagctgcgtgctgggagaaccactgctctcttcaaagctgtcagacagggacatttaagtctgcagaggttactgctgtctttttgtttgtctgtgccctgcccccagaggtggagcctacagaggcaggctggcctccttgatctgtggtagtctccacccagttggagcttcccggctgctttgtttacctaagcaagcctgggcaatggagggcgcccctcccccagcctcgctgccgccccgcagctccatctcagagtgctgtgctagcaaccagtgagactccgtgggcgcaggaacctccgagccaggtgcgggatacaatctcgcggtgcgccgctttccaagcccgtcggaaaagcgcagtattcgggtgggagtgacccgattttccaggtgccgtccgtcacccctttctttgactcagaaagggaactccctgaccccttgcgcttcccaagtgaggcaatgcctcgtcctgcttcgggtcgcgcacggtgcgcacacccactgacctgcgcccactgtctggcactccctagtgagatgaacccggtacctcagatggaaatgcagaaatcacccgtcttctgcgtcgcttactctgggagctgtagaccggagctgctcctattcggccatcttggctcctcctcctc

SEQ ID NO: 10273 - DNA, 604 bp, Homo sapiens
tttttccatttggttttggtattggttttttatttttatttatttatttttattattattatactgtaagttttagggtacatgtgcacaatgtgcaggtttgttacatatgtatacatgtgccatgttggtgtgctgcacccattaactcgttatttagcattcggtatatctcctaatgctatccctcccccctacacccaccccacatcagtcgccggagtgtgacattccccttcctgtgtccatgtgttctcattgttcaattcccacctatgagtgagaacatgcagtgtttggttttttgtccttgcgatagtttgctgagaatgatggtttccagtttcatccatgtctctacaaaggacatgaactcatcgttttttatggctgcatagtattccgtggtgtatatgtgccacattttcttaatgcagtctatcgttgttggacatttgggttggttccaagtctttgctattgtgaatagtgtcacaataaacatacgtatgcatgtgtctttatagcagcatgatttataatccttcgggtacatacccagtaatgggatggctgggtcaaatggtatttctagttctagatc

SEQ ID NO: 10274 - DNA, 6166 bp, Homo sapiens
ttctttttttaaatttttatttattttttatttatttttatttttttattatactttaagttttagggtacatgtgcacattgtgcagcttagttacatatgtatacatgtgccatgctggtacactgcacccactaactcgtcatctagcattaggtatatctcccaatgctatccctccccccctccccccaccccacagcagtccccagtgtgatattccccttcctgtgtccatgtgttctcattgttcaattcccacctatgagtgagaatatgcagtgtttggttttttgttcttgcgatagtttactgagaatgatgttttccaatttcatccatgtccctacaaaggacatgaactcatcattttttatggctgcatagtattccatggtgtatatgtgccacgttttcttaatccagtctatcattgttggacatttgggttggttccaagtctttgctattgtgaataatgccgcaataaacatacgtgtgcatgtgtctttatagcagcatgatttatagtcctttgggtatatacccagtaatgggatggctgggtcaaatggtatttccagttctagatccctgaggaatctccacactgacttccacaatggttgaactagtttacagtcccaccaacagtgtaaaagtgttcctatttctccacatcctctccagcacctgttgtttcctgactttttaatgattgccattctaactggtgtgagatggtatgtcattgtggttttgatttgcatttctctgatggccagtgatgatgagcattttttcatgtgtcttttggctgcataaatgtcttcttttgagaagtgtctgttcatgtccttcgcccactttttgatggggttgtttgttttttcttgtacatttgtttgagttcattgtagattctggatattagccctttgtcagatgagtaggttgcgaaaattttctccaattttgcaggttgcctgttcactctgatggtagtttcttttgctgtgcagaagctctttagtttaattagatcccatttgtcaattttggcttttgttgccattgcttttggtgttttacacatgaagtccttgcccatgcctatgtcctgaatggtaatgcctaggttttcttctagggtttttatggttttaggtctaacgtttaagtctttaatccatcttgaattgagttttgtataaggtgtaaggaagggatccagtttcagctttctacatatggctagccagttttcccagcaccatttattaaatagggaatcctttccccattgcttgtttttctcaggttggtcaaagatcagatagttgtagatatgcggcgttatttctgagggctctgttctgttccattgatctatatctctgttttggtaccagtaccatgctgttttggttactgtagccttgtagtatagtttgaagtcaggtagtgtgatgcctccagctttgtccttttggcttaggattgacttggcgatgcgggctcttttttggttccatatgaactttaaagtagttttttccaattctgtgaagaaaggcattggtagcttgatggggatggcattgaatctgtaaattaccttgggcagtatggccattttcacgatattgattcttcctacccatgagcatggaatgttcttccatttgtttgtatcctcttttatttccttgagcagtggtttgtagttctccttgaagaggtccttcacatcccttgtaagttggattcctaggtattttattctctttgaagcaattgtgaatgggagttcactcacgatttggctctctgtttgtctgttgttggtgtataagaatgcttgtgatttttgtacattgattttgtatcctgagactttgctgaagttgcttatcagcttaaggagattttgggctgagacaatggggttttctagatatacaattatgtcgtctgcaaacagggacaatttgacttcctcttttcctaattgaataccctttatttccttctcctgcctaattgccctggccagaacttccaacactatgttgaataggagtggtgagagaggccatccctgtcttgtgccagttttcaaagggaatgcttccagtttttgcccattcagtatgatattggctgtgggtttgtcatagatagctcttattattttgaaatacatcccatcaatacctaatttattgagagtttttagcatgaagggttgttgaattttgtcaaaggctttttctgcatctattgagataatcatgtggtttttgtctttggctctgtttatatgctggattagatttattgatttgcgtatattgaagcagccttgcatcccagggatgaagcccacttgatcatggtggataagctttttgatgtgctgctggattccgtttgccagtattttattgaggatttttgcatcaatgttcatcaaggatattggtctaaaattctttttttgttgtgtctctgcctggctttggtatcagaatgatgctggcctcataaaatgagttagggaggattccctctttttctattgattggaatagtttcagaaggaatggtaccagttcctccttgtacctctggtagaattcagctgtgaatccatctggtcctggactctttttggttggtaagctattgattattgccacaatttcagagcctgttattggtctattcagagattcaacttcttcctggtttagtcttgggagagtgtatgtgtcgaggaatttatccatttcctctagattttctagtttatttgcatagaggtgtttgtagtattctctgatggtagtttgtatttctgtgggatcggtggtgatatcccctttatcattttttattgcgtctattagattcttctctctttttttctttattagtcttgctagtggtctatcaattttgttgatcctttcaaaaaaccagctcctggattcattaattttttgaaggtcagttctgctctgatcttagttatttcttgccttctgctagcttttgaatgtgtttgctcttgcttttctagttcttttaattgtgatgttagagtgtcaattttggatctttcctgctttctcttgtgggcatttagtgctataaatttccctctacacactgctttgaatgcgtcccagagattctggtatgttgtgcctttgttctcattggtttcaaagaacatctttatttctgccttcattttgttatgtacccagtagtcattcaggagcaggttgttcagtttccatgcagttgagcggttttgagtgagattcttaatcctgagttctagtttgattgcactgtggtctgagagatagtttgttataatttctcttcttttacatttgctgaggagagctttacttccaagtatgtggtcaattttggaataggtgtggtgtggtgctgaaaaaaatgtatattctgttgatttggggtggagagttctgtagatgtctattaggtctgctcggtgcagagctgagttcaattcctgggtatccttgttgactttctgtctcgttgatctgtctaatgttgacaatggggtgttaaaatctcccattattaatgtgtgggagtctaagtctctttgtaggtcactcaggacttgctttatgaatctgggtgctcctgtattgggtgcatatatatgtaggatagttagctcttcttgttgaattgatccctttaccattatgtaatggccttctttgtctcttttgatctttgttggtttaaagtctgttttatcagagactaggattgcaacccctgcctttttttgttttccatttgcttggtagatcttcctccatccttttattttgagcctatgtgtgtctctgtatgtgagatgggtttcctgaatatagcacactgatgggtcttgactctttatccaatttgccagtctgtgtcttttaattggagcatttagtccatttacatttaaagttaatattgttatgtgtgaatttgatcctgtcattatgatgttagctgattattttgcttgttagttgatgcagtttcttcctagtcgcgatggtctttacattttggcatgattttgcagcggctggtaccggttgttcctttccatgtttagcgcttccttcaggagctcttttagggcaggcctggtggtgacaaaatcgctcagcatttgcttgtctgtaaagtattttatttctccttcgcttatgaagcttagtttggctggatatgaaattctgggttgaaaattcttttctttaagaatgttgaatatcggcccccactctcttctggcttgtagggtttctgccaagagatccgctgttagtctgatgggcttccctttgagggtaacccgacctttctctctggctgcccttaacattttttccttcatttcaactttggtgaatctgacaattatgtgtcttggagttgctcttctcgaggagtatctttgtggcgttctctgtatttcctgaatctgaacgttggcctgccttgctagattggggaagttctcctggataatatcctgcagagtattttccaacttggttccattctccccatcactttcaggtacaccaatcagacgtagatttggtcttttcacatagtcccaaatttcttggaggctttgctcatttctttttattcttttttctctaaacttcccttctcgcttcatttcattcatttcatcttccatcactgataccctttcttccagttgatcccatcggctcctgaggcttctgcattcttcacgtagttctcgagccttggttttcagctccatcagctcctttaagcacttctctgcattggttattctagttatatattcttctaaatttttttcaaagttttcaacttctttacctttggtttgaatgtcctcccgtagctcagagtaatttgatcgtctgaagccttcttctctcagctcgtcaaagtcattctccatccagctttgttccgttgctggtgaggaactgcgttcctttggaggaggagaggcgctctgcattttagagcttccagtttttctgttctgttttttccccatctttgtggttttatctacttttggtctttgatgatggtgatgtacagatgggattttggtgtggatgtcctttctgtttattagttttccttctaacagacaggaccctcagctgcaggtctgttggaataccctgccgtgtgaggtgtcagtgtgcccctgctggggggtgcctcccagttaggctgctcgggggtcaggggtcagggacccacttgaggaggcagtctgcccgttctcagatctgcagctgcgtgctgggagaaccactgctctcttcaaagctgtcagacagggacatttaagtctgcagaggttactgctgtctttttgtttgtctgtgccctgcccccagaggtggagcctacagaggcaggcaggcctccttgagctgtggtgggctccacccagttccagcttcccggctgctttgtttacctaatcaagcctgggcaatggcgggctcccctcccccagcctcgctgctgccttgcagtttgatctcagactgctgtgctagcaatcagcgagactccgtgggcgtaggaccctccgagccaggtgtgggatatagtctcgtggtgcgccgttttttaagcccgtcggaaaagcgcagtattcgggtgggagtgacccgattttccaggtgcgtccgtcacccctttctttgactcggaaagggaactccctgaccccttgcgcttcccaagtgaggcaatgcctcgccctgcttcggctcgcgcacggtgcgcgcacccactgacctgcgcccactgtctggcactccctagagagatgaacccggtacctcagatggaaatgcagaaatcaccgtcttctgcgtcgctcacgctgggagctgtagaccagagctgttcctattcggccatcttggctccttattctcattaccttcttgagttgtggctcagacactacaacagagctctgtcacctctttctaaaagctgggaaatggttattgtcaacgccagccccattttggaggcacctggttgcaggggaccacag

SEQ ID NO: 10275 - DNA, 6483 bp, Homo sapiens
tttttttccttttttttttttttttgtatttgcaaattcaaatctttttttttttttattatactttaagttttagggtacatgtgacattgtgcagcttagttacatatgtatacatgtgccatgctggcgctgcacccactaactcgtcatctagcattaggtatatctcccaatgctatccctcccccctccccccaccccaccacagtccccagagtgtgatattccccttcctgtgtccatgtgatctccattgttcaattcccacctatgagtgagaatatgcggtgtttggttttttgttcttgcgatagtttactgagaatgatggtttccagtttcatccatgtccctacaaaggacatgaactcatcattttttatggctgcatagtattccatggtgtatatgtgccacattttcttaatccagtctatcattgttggacatttgggttggttccaagtctttgctattgtgaataatgccgcaataaacatacgtgtgcatgtgtctttatagcagcatgatttatagtcctttgggtatatacccagtaatgggatggctgggtcaaatggtatttctagttctagatccctgaggaattgcgacactgacttccacaatggttgaactagtttacagtcccaccaacagtgtaaaagtgttcctatttctccacatcctctccagcacctgttgtttcctgactttttaatgatcgccattctaactggtgtgagatgatatctcatagtggttttgatttgcatttctctgatggccagtgatggtgagcattttttcatgtgttttttggctgcataaatgtcttcttttgagaagtgtctgttcatgtcctttgcccactttttgatggggttgtttgtttttttcttgtaaatttgtttgagttcattgtagattctggatattagccctttgtcagatgagtaggttgcgaaaattttctcccatgttgtaggttgcctgttcactctgatggtagtttcttttgctgtgcagaagctctttagtttaattagatcccatttgtccattttggcttttgttgccattgcttttggtgttttggacgtgaagtccttgcccacgcctatgtcctgaatggtaatgcctaggttttcttctagggtttttatggttttaggtctaacgtttaaatctttaatccatcttgaattgatttttgtataaggtgtaaggaagggatccagtttcagctttctacatatggctagccagttttcccagcaccatttattaaatagggaatcctttccccattgcttgtttttctcaggtttgtcaaagatcagatagttgtaggtatgcggcgttatttctgagggctctgttctgttccattgatctatatctctgttttggtaccagtaccatgctgtttcggttactgtagccttgtagtatagtttgaagtcaggtagtgtgatgcctccagcttcgttcttttggcttaggattgacttggcgatgcgggctcttttttggttccatatgaactttaaagtagttttttccaattctgtgaagaaagtcattggtagcttgatggggatggcattgaatctgtaaattaccttgggcagtatggccattttcacgatattgattcttcctacccatgagcatggaatgttcttccatttgtttgtgtcctcttttatttccttgagcagttggtttgtagttctcctttaagaggtccttcacatcccttgtaagttggattcctaggtattttattctctttgaagcaattgtgaatgggagttcactcatgatttggctctctgtttgtctgttgttggtgtataagaatgcttgtgatttttgtacattgattttgtatcctgagactttgctgaagttgcgtatcagcttaaggagattttgggctgagacaatggggttttctagataaacaatcatgtcgtctgcaaacagggacaatttgacttcctcttttcctaattgaataccttttatttccttctcctgcctgattgccctggccagaacttccaacactatgttgaataggagcggtgagagagggcatccctgtcttgtgccagttttcaaagggaatgcttccagtttttgcccattcagtatgatattggctgtgggtttgtcatagatagctcttattattttgaaatacgtcccatcaatacctaatttattgagagtttttagcatgaagggttgttgaattttgtcaaaggctttttctgcatctattgagataatcatgtggtttttgtctttggctctgtttatatgctggattacctttattgatttgcgtatattgaaccaagccttgcatcccagggatgaagcccacttgatcatggtggataagctttttgatgtgctgctggattcggtttgccagtattttattgaggatttttgcatcaatgttcatcaaggatattggtctaaaattctctttttttggttgtgtctctgcccggctttggtatcagaatgatgctggcctcataaaatgagttagggaggattccctctttttctattgattggaatagtttcagaaggaatggtaccagttcctccttgtacctctggtagaattcggctgtgaaccatctggtcctggactctttttggttggtaaactattgattattgccacaatttcagctcctgttattggtctattcagagattcaacttcttcctggtttagtcttgggagagtgtatgtgtcgaggaatgtatccatttcttctagattttctagtttatttgtgtagaggtttttgtagtattctctgatggtagtttgtatttctgtgggatcggtggtgatatcccctttatcattttttatcgtgtctatttgattctcctctttttctttattagtcttgctagcggtctatcaattttgttgatcctttcaaaaaaccagctcctggattcattgatttttttgaagggttttttgtgtctctatttccttcagttctgctctgattttagttatttcttgccttctgctagcttttgaatgtgtttgctcttgcttttctagttcttttaattgtgatgttagggtgtcaattttggatctttcctgctttctcttgtgggcatttagtgctataaatttccctctacacactgctttgaatgcgtcccagagattctggtatgttgtgtctttgttctcgttggtttcaaagaacatctttatttctgccttcatttcgttatgtacccagtagtcattcaggagcaggttgttcagtttccatgtagttgagcggctttgagtgagattattaatcctgagttctagtttgattgcactgtggtcggagagatagtttgttataatttctgttcttttacatttgctgaggagagttttacttccaactatgtggtcaattttggaataggtgtggtgtggtgctgaaaaaaatgtatattctgttgatttggggtggagagttctgtagatgtctattaggtccgcttggtgcagagctgagttcaattcctgggtatccttgttgactttctgtctcgttgatctgtctaatgttgacagtggggtgttaaagtctcccattattaatgtgtgggagtctaagtctctttgtaggtcactcaggacttgctttatgaatctgggtgctcctgtattgggtgcatatatgtttaggatagttagctcctcttgttgaattgatccctttaccattatgtaatggccttctttgtctcttttgatctttgttggtttaacgtctgttttatcagagactaggattgcaacccctgcctttttttgttttccatttgcttggtagatcttcctccatccttttattttgagcctgtgtgtgtctctgcacatgagatgggtttcctgaatacagcacactgatgggtcttgactctttatccaacttgccagtctgtgtcttttaattgcagaatttagtccatttacatttaaagttaatactgttatgtgtgaatttgatcctgtcattatgatgttagctggtgattttgctcattagttgatgcagtttcttcctagtcttgatggtctttacattttggcatgattttgcagcggctggtaccggttgttcctttgcatgtttagtgcttccttcaggagctcttttagggcaggcctggtggtgacaaaatctctcagcatttgcttgtctgtaaagtattttatttctccttcacttatgaagcttagtttggctggatatgaaattctgggttgaaaattcttttctttaagaatgttgaatattggcccccactctcttctggcttgtagggtttctgccgagagatccgctgttagtctgatgggcttccctttgagggtaacccgacctttctctctggctgcccttaacattttttccttcatttcaactttggtgaatctgacaattacgtgtcttggagttgctcttctcgaggagtatctttgtggcgttctctgtatttcctgaatctgaacgttggcctgccttgctagattggggaagttctcctggataatatcctgcagagtgttttccaacttggttccattctccgcatcactttcaggtacaccaatcagacgtagatttggtcttttcacatagtcccatatttcttggaggctttgctcatttctttttattcgtttttctctaaacttcccttctcgcttcatttcattcatttcatcttccattgctgataccctttcttccagttgatcgcatcggctcctgaggcttctgcattcttcacgtagttctcgagccttggttttcagctccatcagctcctttaagcacttctctgtattggttattctagttatacattcttctaaatttttttcaaagttttcaacttctttgcctttggtttgaatgtcctcccgtagctcagagtaatttgatcgtctgaagccttcttctctcagctcgtcaaaatcattctccatccagctttgttccgttgctggtgaggaactgcgttctttggaggaggagaggcactctgcgttttagagtttccagtttttctgttctgttttttccccatctttgtggttttatctacttttggtctttgatgatggtgatgtacagatgggttttcggtgtggatgtcctttctgtttgttagttttccttctaacagacaggaccctcagctgcaggtctgttggaataccctgcagtgtgaggtgtcagtgtgcccctgctgggggtgcctcccagttaggctgctcgggggtcaggggtcagggaccacttgaggaggcagtctgccgttctcagatctccagctgcgtgctgggagaaccactgctctcttcaaagctgtcagacagggacatttaagtctgcagaggttactgctgtctttttgtttgtctgtgccctgcccccagaggtggagcctacagaggcaagcaggcctccttgagctgtggtgggctccacccagttcgagcttcccggctgctttgtttacctaagcaagcctgggcaatggcgggctcccctcccccagcctcgctgccgccttgcagtttgatctcagactgctgtgctagcaatcagcgcgattccgtgggcgtaggaccctccgagccaggtgtgggatatagtctcgtggtgcgccgtttcttaagccggtctgaaaagcgcaatattcgggtgggagtgacccgattttccaggtgcgtctgtcacccctttctttgactcagaaagggaactccctgaccccttgcgcttcccaggtgaggcaatgcctcgccctgcttcggctcgcgcacggtgcacgcacccactggcctgcgcccactgtctggcactccctagtgagatgaacccggtatctcagatggaaatgcggaaatcacccgtcttctgcgtcgctcacgctgggagctgtagaccggagctgttcctattcggccatcttggctcccacctcccgaactcatccttttttatggctgcatagtattccatggtgtatatgtgccacattttctttatccagtctatcgttgatggacattttggttggttccaagtctttgctattgtaaatagtgctacagtaaacatatgtgtgcatgtgtctttacagtagaatgatttataatcctttgggtatattcccagtaatgggattgctgggtcaaatggtatttctagttctatatccttgcagaatctcctcactgtcttccacaacggttgaactaacactctcaccaacagtgtaaaagcgtgcctatttctccgcatcctcgccagcatctgttgttgccagactttttaatgatcaccatcccaactggtgtgagatggtatctcattgtggttttgatttgcatttctc

SEQ ID NO: 10276 - DNA, 6483 bp, Homo sapiens; identical to SEQ ID NO: 10275

SEQ ID NO: 10277 - DNA, 49375 bp, Homo sapiens
ttttttttttttttttatactttaagttttagggtacatgtgcacattgtgcaggttagttacatatgtatacgctggtgcgctgcacccactaactcgtcatctagcattaggtatatctcccaatgctatccctcccccctccccccaccccacaacagtccccagagtgtgatattccccttcctgtgtccatgtgatctcattgttcaattcccacctatgagtgagaatatgcggtgtttggttttttgttcttgcgatagtttactgagaatgatgatttccaatttcatccatgtccctacaaaggacgtgaactcatcattttttatggctgcatagtattccacggtgtatatgtgccacattttcttaatccagtctatcattgttggacatttgggttggttccaagtctttgctattgtgaataatgccacaataaacatacctgtgcatgtgtctttatagcagcatgatttatagtcatttgggtatatacccagtaatgggatggctgggtcaaatggtatttctagttctagatccctgaggaatcgccacactgacttccacaatggttgaactagtttacagtcccaccaacagtgtaaaaatgttcctgtttctccacatcctctccagcacctgttgtttcctgactttttaatgattgccattctaactggtgtgagatggtatctcattgtggttttgatttgcatttctctgatggccagtgatgatgagcattttttcatgtgttttttggctgcataaatgtcttcttttgagaagtgtctgttcatgtccttcacccactttttgatggggttgtttgtttttttcttgtaaatttgtttgagttcattgtagattctggatattagccctttgtcagatgagtaggttgcaaaaattttctcccattttgtaggttgcctgttcactctgatggtagtttcttttgctgtgcagaagctctttattttaattagatcccatttgtcaatttttttcttttgttgccattgcttttggtgttttggacatgaagtccttgcccatgcctatgtcctgaatggtaatgcctaggttttcttctagggtttttatggttttaggtctaacgtttaaatctttaatccatcttgaattgatttttgtataaggtgtaaggaagggatccagtttcagctttctacatatggctagccagttttcccagcaccatttattaaatagggaatcctttccccattgcttgtttttctcaggtttgtcaaagatcagatagttgtaggtatgcggcattatttctgagggctctgttctgttccattgatctatatctctgttttggtaccagtaccatgctgttttggttactgtagccttgtagtatagtttgaagtcaggtagtgtgatgcctccagctttgttcttttggcttaggattgacttggcgatgcgggctcttttttggttccatatgaactttaaagtagttttttccaattctgtgaagaaagtcattggtagcttgatggggatggcattgaatctataaattaccttgggcagtatggccattttcacaatattgattcttcctacccatgagcatggaatgttcttccatttgtttgtatcctcttttatttctttgagcagtggtttgtagttctccttgaagaggtccttcacatcccttgtaagttggattcctaggtattttattctctttgaagcaattgtgaatgggagttcactcatgatttggctctctgtttgtctgttgttggtgtataagaatacttgtgatttttgcacattgattttgtatcctgagactttgctgaagttgcttatcagcttaaggagattttgggctgagacaatggggttttctagatatacaatcatgtcgtctgcaaacagggacaatttgacttcctcttttcctaattgaataccctttatttccttctcctgcctaattgccctggccagaacttccaacactatgttgaataggagtggtgagagagggcatccttgtcttgtgccagttttcaaagggaatgcttccagtttttgcccattcagtatgatattggctgtgggtttgtcatagatagctcttatcattttgaaatacgtcccatcaatacctaatttattgagagtttttagcatgaaggttgttgaattttgtcaaaggctttttctgcatctattgagatcatcatgtggtttttgtctttggctctgtttatatgctggattacatttattgatttgcgtatattgaaccagccttgcatcccagggatgaagcccacttgatcatggtggataagctttttgatgtgctgctggattcggtttgccagtattttattgaggatttttgcatcaatgttcatcaaggatattggtctataattctcttttttcgttgtgtctctgcccggctttggtatcagaatgatgctggcctcataaaatgagttagggaggattccctctttttctattgattggaatagtttcagaaggaatggtaccagttcctccttgtacctctggtagaattcggctgtgaatccatctggtcctggactctttttggttggtaaactattgattattgccacaatttcagctcctgttattggtctattcagagagtgcatcaacttttgtttgagaaactaaacaattaatgtgtcatttagtttttcttgggtgagtcttgtgatttggtagagagacttggctgtatataaattactgctttttgattatggggatatagttgtaatctctgagcttcagttttctaatctgtgaaatgaaagacctactgatgtgctttctgagccaggcacttttttagatacttgtgcactttatgtcctttgtgttctagaagcaaaaaggctgaactgacagtatattgtgaaagtactttgcttttcaaacagacttgttttagatgaaaaaaaaaaagaaaaaccagtggaaaaggagagcataaagagaaagaggagatgattgagggaggaaggctgagagatattaggatgggacatgatattaaagagataaggctgggcgcagtggctcacgcctataatcccagaactttgggaggccgaggcgggcagatcacctgaggtcaggagttcgagaccagcctgggcaacatggtgaaaccccgtctctactaaaaatacgaaaaattagctgggtgtagtggcaggcacctgtaatcccagctactcaggaggctgagacaggagaattgcttgaacctgggaggcggaggttgcagtgagccgagattgcaccattgcactccagcctgggtgacaagagcaaaattccatctcaaaaaaaaaaaaaaaaaagataagccatagaaagaaagtaaagatcatttccatatctccatgacaggagttatgaatgtgaaaatggtatatatagagacagatgttttgaggtgaaaagagaggtacaaaagtgaggtacatcatgtacctcactttttggctgatcccacatagcctcatttgttaatccaccagatattactggagatagagctgtgaacatggaaacatatggtccctaccttcataaaaagaggagagatggtcactgaacagaaatggcaaagaagaagagatgagtttgtcttaaaaataaggaatgtcaggggtatgaagaattaggagaagaatggagcagccaatgtgaggaaggctcttaggcatcgttaggcggtgtcagagtggtggtgatggtggtggtgatggcagttggccaagaacagctgacagtacaactgcagtgagtatgagtgtcccttagcacagttcctttaacttctcgtgacctcaaggtgggaatggaaaaataacccttgggacagaccaggggttatgctgctcctaatgctacatgtagtagattttggaataatgatccacactagtgaaaattctacggtctatcatggaatatttaaaagccattagttttattatttttatgaatgttaaggagaaaaaaagcaccactaacaggaataaattacactttagtgtttatgttaatttttatcatatctgagttattttgagcacaaattaagtgtacattaaataattcttcttgagctgggtttggaaaaagtcaatgattttaaattgaattcttattaattactatgatagagactaactccttgctagaccagtttcttccttttcctgggcacatagcttgatgacatttcctggcctctcttaaagttgggtggggccatggactgagtcctggcccgtgcatgtgggtgagactgatgtgcaccgcttagatgctcagcctgtgaaaagcagccttgcataagcctccaattacactcttctttctcctgctggctaaatgcagaggaggcctcagaggtacagggattaaagaaggcagcattcctgatttccacatggaaggctgcccgctggaaacccagatgaactctctaagagtacaaagtaaaattctattgggctaggcttctgagataaatagtttgtttgttttagcagctagctagcatttcttcccctgacaaatcaagttagtaatcagatggaaagtcagattacttaatactcatacagttatctagtctgaaatatagcaagcccttcttaaccttgaatttcttttcacaaaaattaagtacatacccatttacttctcaaaacctttccaacaattagaaactgttgaataatgtatatgtggattgcaagtcaccagtactgaagattaatgggaaagtagtgaagagaagagggaggtgaagtatatgaaagcctgggaagagcctttgggatggagccaggggaaagtcagagaacctgaagcaaagtcttcctgggtcttgcacctgtatttctgacaccatagcggggaaatagacagcagagctgcctgagcagtagtgtgccgatgtctgctggaaagaaatttgccagcgaatgcaagttttttaaatcctgggagtgaggacaggggtttgagaaatacccccgggtgccaacctggagttcttttttttttttttgaggcagagtttcgctcttgctgcccaggctggagtgcaatggtgcaatctcgattcactgcaacctctgcctcccgggttcaagcaattcttctgcctcagcctcctgagtagctgggattacaagcatgtgccaccatgccaggctaatttttgtatttttagtagagatgaggtttcaccatgttggctgggctggcctcgaactcctgacctcaggtgatccacctgccttggcctcccaaagtggtgggattacaggcgtgagccaccacgcccagcctggagttctatacctagtgaaaatgttcttccagtaaaagaaaacacaagaacattttccagcaaataaaagctaaaataattctgtaccagaagattcacactgaaaagaatactagcaggaattcctcaggcataatgaaaacgatcccagatggaaaaacagagatgcaggaaagaaagagtaaatgtggataaatccaaatgaatgtacactctacacaatgatagtaatcatgtctcgtgtagtttaaaaatatgttaaactaaaatgcataacaacagtaacacaaaaggctctgggtggggataggtagtgaatggagttaagatgttttaaggttttagcattgcctaggaggtgattaaaatattaatatatgcaatgtagtaataaagaatgcatgttgtaatctgtagagtaactgctaagtaatagtaaaagaatacataataataaagtagaaaatgcagtaacatatttagtaaattcaaaagaaggaaaaacacaaaacaagtgggatcaattaaaatagtaagatggtagatatatatacaaagatatcatgaataccattaaatgtaaatgaactaaagttattacagatttgaaaaaaattaagctgcttctcactggatagaagcacataccaatcatgtactaggtacagtgaaactaagaaaattaggaatctatttatgtgcatttacaatgagattaaaagcaaagtatttgcaaaccacaagtaagtgaaggctccctcctgctcttttgtctttccaaatgaggtttcccaaggtttgaaacttcagtcagcagtgaggagatgggggaatgggaggaaaaaaaaacaaaaaaaggaaaagaattacaactctttaaaaaattgaattctagagcctttgtgaaaggcttgtacttaagaatttgcgtaggagataggtagttaatattttcaagatactgagaaaagaaagttatgagttagcgtatcaattcaattttttttttctccaggaaaaatgctgataaaaaaagaaaatcccataaagtcaactgcaaacatctaaaaacagaactgaatctggtagcatttcacatgggtatataaaaaatatttttttcttctaaagaatgcaaactactctaaaactaggaaggcttttgagtgtaggctctgagactcatggctagagaccatttaggggcaatctttactgcaagtttctcaaacttggacccccatatcccaaagatgaacaagttccataagaagttttaatgttattcatttaaataattttaaacatgtacataaatctcttctggctcatgtagtcaatgtgacctactactgttcccatgggcttctcttcacaatcacattggtgccaaggtcctatgatgtcatggcacagtataagaagaaatgttggacccttgttccaacaaagaaaagctgtgggagaattgttttaccacatggcacattgtagtgatgtagacccacagaatccaatagaaccattaaggcaatagttaattccatactcatattctgagtagatgtattttgcagatcttatgtttggtgtaccgacttcaccacatctatcagtggtaaatgtaataatgaaaggtcagtgaagaattctttgttaaatgtgtactttggggtccacaatgaaaaagattgagccattgaaataatggatctgtggtttaaaatgagttcattgtaaaatggaaacaacaacaacaataatgacaatgatagttcatcattttcaaaaccaaggtgtagctgggctcccttctctatggtccaaatgagagcttgaagacaacggtaggagaaccttgagtaaggaaccatgagtgtttatggctgggattgtttggcttaaggaatccttgacccttgagggaagagcaacatcagctgtgggaaacatcaccagactctttgggtccttaggaaatgaagaagcatgagaccttgctaacatgggagagcaagagaaaaccagggagcagagaataagttcctcctggaagcgcctgctataaaacgtcacagattgctaggcaatatacgtaaagtgagtctctatgagcagcaccaagagaaataacaaacccaaagagccaagcatcagtggagaggaagaactactaaaacaggctctaacacaccagagccatggaatgggactggttgtaatttgaactaacaaaaataataaaggcccttaaggcaattcaagtgtagctcaaaaaaattttctgaaattaaaaacatgagtttcaaacaagcacaacttagtaaatgaattgaaggagaagctgattgctttgagactgacatgctttgcctgtgtctggttgtttattcaaagtatcagttccctttgagtgttatggttggaattgttcatagtttcttcctgaaccccattataacctgaggaattttgttttggaccctttagagtctgagctgactagaggctggcttgtaatctctacaaagctatcatggtctgagggagtgagtgggggctgaaatcacgccaataactctgctccctaagccatgatccccatggtgagctgcatcttcccatagaaaagggtgtgctttcacctcacataaggttgtatgtatggactagcagatgcctggttttcacctcttcccattactgttgttttcggggaaaatggaaatggaaatgtgtagatctcttatggtaacctcaagcattgcctatggcttcccaaaacttatagttttgaaattccaagaagcttataaggcaaagtaattgaaaagagaagcatcagttcatcaaaaagacgtgggagaggcgtcatgatgaataaagtctactttaataattttgtaaaaaaaaatcactgtcccaagatgtttagatgtctaaataattcagaacaggactgaatggcaagtgtcaagacaaagaagccaggatagggagtaggggctatccaaagagtgacttagccaagttttctccaaaattccacatatatgttcagtaaacatttataaagtttcttggtttcaagatgatgaaaacaaagagagtagaagatttagcaaatcattagaacctctgctaaagctaaaaataaaaataagactaagactaagtcatctaatgtggttctttaagctggaccccacaatagacataaacctgtttaaaatgctttttaacttatttaaatcacatttttaataggtacttaggccccaaattaacagcaaaaaaattaaaaataagtcttgcagtaagttttgactaaaagaggcacaacttgatttaaccccaaacaactttgcaattacataatattttccatgaattagcacattaggttaaatgatatgaaacaaaaagagaaaggtgctgatgcctatattgcatttttcaactgtttattttcaggagacatttataggtagcttccagcatgtgtacttgcacatttgttaaagttcatatccttttagagtaattaggaattttcaattagacatacttaaatatcacatatactttaaatattcaatacgaatacttaattatgctttttcttctttttagaccgagtctcactcttactcaggctggagtgcagtggcgtgatctcagctctctgcaacctccacttcccaggttcaagctattctcgtgcctcagcctcctgagtaggtgggactacaggtgtgtggcaccatgcccggctaatttttttgtatttttagtagagactcggtttcaccgtattgtctgggctggtctcaaactcctgatctcaagtgatccacctgccttggcctcccaaagtgctgggattacaggcatgagccaccatgcctgggtcttaattatgcatttttaattggacatactgaaatatgaaatacagattttcatataaatgagaaagggcatctaactctgaaaactgtctctctcataatgttttgttcttccttaatggatgtgctgtatcttgttgagatttcttgttctctgccctgctccatctcacctgggtattcatttcccttgtctgtggtgcaggtggctggttctggaaagcagcacacacaaggtgagtgtgttgcttggtgtgctctccagggactggcatcacagctgaataaagaggtgtgagcctgctccatttggttataccaggccagacccaacacaacttttgttgactttctgcaggtttttgtgaatgattactacaatccttaaatctccacctccagctgaacctactactttcagcactggcaatggcttccttctttatgggagattttggtcatcaaaagtagacttcttcagcctgtgcctcacgacctcacaatacatcttcacaggccctcccttcccttccccttgacttccttcctctctgtggtgctctgagcctttctcacatctttgataactttacctcccacctcaaaaaggactttgtcacttcagctatcttttttctctaacaatttccactaacttatcctctacgtctaaatgagcccaagtatcattagcctgaaaaaagaattataagtttatccctcttttctcactactgtcctctttcttcttgataaggtggttttctggtcaccacaccccattctcccaccctctccctgtttaaccctctggggttgggcttcttcaccactgctttgctgaaagtgctctccagaaggtctccagtagccaactactcatccctcaaaggcttttctatgtcctgggccgtggattcttgcagagatttatgactacaaacaatctctgccttcttgaaactctttcctctcttcatatccgtgactactcagtgcttccctggatctgggccccatgttcactcaatcccctgacttctctggccacactgcacagtgtacaacagctctgaaatcacttaccgtgtccaaatcctggctcagccacttcctatttgggccatgttagaccagtcactttatcctgctgtaccttggtttcctcacctgttaaatggaaagggaatgatatatgccctttgggttttgtgaggattcaatggcatgatgaatgaacacaaagcactttgtgggttgccaggcttataataagagctcagagttggctacaagtattttctccctcttcttgtctctgatatattgtcttccaccacacctacacatagcttcctggactttctctgtgctttcctgccttgctgctcttgctcgcaccattgcccctccatcactcttccatccttccatcttcacctacacctcacctatcgtaatccttctacatcttcttcttcttcttcttcttttttttttgttgttgttgttgagacagggtcttgccctgttaccctggctggagtacagtggtgtgatcactgctcactgtggccgtgaaatactggactcaagcaatcctcccacctcagtctcccaagtagctgggaccataggcatgtgccactaagtctagctaatttttaaaattccttttgtagagatggggtctcactaatgatgcctaggctggtctcaaactcctgggctcaaacaatcctcctgccttggcctccaaaagtgctgggattgctggcatgagccactgcactcggcctctccacttaagaccacacttaaatgccaccttttccatgaagccctctcaggtcactcaagccaaaggtgatttttttctccagtaaagtctcagtctttttgctcatttttctggcatattctgcattgtgttataattgtttaatttgatgatttatctttcttacaagatttaagttccttgatggaaaaaagaacaactagtagcgtttaatagtaggtggccattaatgcaggaatatagtgaaggaactttgggaccatgtgtgctaatccagggaggaaagcattagattagattcagtggaaatgtcattacaaagtatatagatgatcccaagagagtaccgaacagagttgacttagagaattgtgaaacaagattatatgggaaaagcaaaagaatgagcacatggatttttaaatatgtttttaatgattacaaaacactgaggataatatacaggaaactgaaggttataatctcagaaaaactatttgactttaacatacacagtaatggaatgggaagcccaggggatttaggaattaaccaagtacaaaagataagtttatgtgttgagtccatgcttgtttctggaagctcaggaaacaaccaagagagagtttggatttgtctcaataggagaagagaagggaagagagacgctgggacaggtcctgcacacagtcagtcttcactgaatatgaatgtattagtccatttgtgttgctataaaggaatacctggggctggtaatttgtaaacaaaagtttatttggctcatggttctgcaggctgtgtaagaagcatggcgccagcatctgcttcttgtgagggtctcagaccacttctattcatggtggaagacaaaagggagcccctgtgtcacaaagggagagagggagcaagacagaaggcaaggaggtgccaagctcttttcaacaatcagctctcatgaaagctaatagagaactcactaattacatcaaagcatacatgaggactctgcctctatgacccaaacacctcccattaggccccacctgcaatattggggatcacatttcaacacaagatttggaggagacaaatgtccatactatatcaatgagtgtacaaacaagaaatggatttgtcagggtaaaatcttactgacttgaagttaccatatgcaacaagaatagattgatcttgattatttgcctatatggctttaacagggaggatttcactttgctaatatttgtcactgttgctgtttttttctttttttttggagatggagtctcactctgtcgcccaggctggagtgcagtggtgcaatctcggctcactgcaagctccacctccgggttcagaccattctcctgcctcagcctcccgagtagctgggaccacaggcacccgccaccatgcccggctaattttttgtatttttagtagagacagggtttcattgtgttagccaggatggtctcgatctcctgacttcgtgatccacccgccccggcctcccaaagtgctgggattacaggcgtgagccaccgcacccggccgcaagtttacttcttaatgttctctcatctcctggattctgtcaagataccgccatagcttttttcctacttctctggccaccctttctcagcttctcttcttcagtattccattctagcaacttgtcttttctcattttgctgtcggtatccttcctatgtgacccatctgtacccatggtttcaaccctcctccagatactgatacctctgaaatatgcttatgtgttccagacacacacacattcagccttctacctgaaactttcaagtttcacttgacatatgccgaccagatctcagtgtcaaggtcatgaaagacaagtaaatactaaagaactgtcacacattggagaagagtaagaaaaaataacaagtaaatgcaatatgagacctggataaagttctggaacagaaaaagaaaatgaatggaacaatgggtgagatgtcaataaggtctgcagtttagccaatagtattgtgaagctcactggtaaacttgacaatagacagaaattggaggtgctaagtataggcaacttttcgaggagtttcattgcaaagaagagctgactaatggggtgttagctggcaggggaactgagatcaaagaaaggattcttgagatgggaaagataacagcttattagcgtgctgtcaggaatgatccaggaggagaaacaaattgatgatgtaagcatgagacggaagcatctctggagtgacatcctgaaggagctgagaaggaatgagatactgaaggggtcactcttcagagtctttgctttaactccctgctcctccgaggcccaagcttcattgagtgtcagttaagtttaagttcttgaaggaggacaaaacttgccactcttattcagagagtgtcacatctgctcaggcacttaccattctgattttcagttccctctatgtttggtgtctcaggatttcatttctttttctgtggtatcaattatggtcttgaactaatttttaaagcttgtacccatttcatgtttttttatgtgaaaccttttctggctctctcagtgtatggtcttactggaaatgggatctcctagagtgatttttttcaaatgcaaatctgatttaagtaggtcattttcctacttaaatttctgtggtggtttacatttactgtaagaataacatccaagcttcttaagatgacatataaaacctttctttcctgtctgggctcttagctgtccacctctccagccttggtgatcccagtagctcctaggactccccatgccctccaggggctcccctttgcacatggtgctgcctgtggagaatctttctgacactccttatcaccaaacctggattaaatgcctgtctcatgtgcccccacagcctgtgcttagctctggtctagatgttcacacggtgttgtcactgtctgttgaattcctggtttcctctgtagagtcaattcctggttgactcttgatatggttaggctttgtgtccccactcaaatctcatcttgaattataaccccctgtaatccccatgtgtcaagggagagaccaggtggaggtaattggatcatgagggcaatttcccccatgctgtttttgtgatagtcagttctcacaaaatttgatggttttcttttctttttctttttttttttttttgagatggagtttcgctcttgttgcccaggctggagtgcgatggcatgatctcaggtcaccgcaacctccgcctcctgggctcacgcaattcccagcctcagcctcccgagtagctgggatcacaggcatgtgccaccatgcctggctaattttgtatttttagtagagtctgggtttctctacgttggtcaggctggtctcgaactcctgacctcaggtgatctgcctgcctcggcctcccaacgtgctgggattacaggcatgagccaccacccctgacccaaaatgtgatggttttctaagtgtttggtagttcctcctgtattcagacaccctgtgaagaaggtgcctgccttctcttcaccttccaccacaatcgtaagtttcctgtggcctccccagccatacagaactgtgagtcgattaaatctctgtcctttataaattacccagtctcaggaagttctttatagcagtgtgagaacagactaaaacaactctaaaaccccaagtgcttccatatgcttgccttggtacatatttgtgttgagcacaataaggtttatgatataaatcatataaattctcaaaatagatgtaaatcactggagaggaaaacatatcttatttctacaaaaacatattttattgattgctacatcctttaatacatcattgacacaactcagagaaatacagatccttagaagtttagatcttgaaagaatcttagagattacttaatctaccctctttatttcatggataaagaaatgtatcttttttgtatcaatttatgcatctaccagcagtgtacaaaaatgcctattcctgcacacactttctcactagctctgggtattttctgtgttttataacactaataagtgaaagtggacatatttttatatatttcttggcaatttattttcattctttgtgaaatgtctattcatatcttttccccagttttgattgaaatgttgatatttttcatatttatttgtgagtgcattttctgaggatattaactctttgtttttcacatatgttgcaaatgtttctctaggtttgtataactttctttatagtgtcttccttcatctaagttgtcaaacaggtcagttttcctctatggtgtctgaccttgatatcattctaagaatggccttatttactttgattataaaactcttctatatttaatacagtacttaatttttttttacatttcagattttagtccacctaaaaaaggtttaatgatacaagagagtaatctaattttacttttcctcacatttttagctgactgttccaatacgccttctgtaattgttttaaatagtgctgatacaaaatgaaggttctagcatatttttataaagagtgtatatttgggggtctgagaggtctgcgtttgagtaactctgcctctgcctgccttggtgagggttcatggagacagtttaagtacggcattggcacccaggggcattgactagtttcatggtgttgggcaccattatgatttattagtagtaatagtataaatggatgtttttggactctgttctattctgttgatctattcatctatacctgtgtcaggactatactgctttaacttcttgcagtttgagagaatattttaatatgtaatgaaagttaaacaaggaagttaaacaaacagagaaaaacacttgcaatatatatgaaaaacaaagggttaacatctttagttggaaaatatacttacaaatgcaaaatcccctctgtggactttaacactttgtaaataatttttaatcgtgtatgctgtaatgcttttccttactcttctttcccaagtcattagttatacaaacatttaaatatgttttggtattttatgatttagataggattcagaatgcaaccttaattcagaaatttgcaaaagggttacagaaaatggattcaataaagaaaagatgaatggtttaattgtaatttggattagcttgaatttcctcatgaagaagaaattaacttattattttccgttgctactgagaaccaaattaggacatatgtttaaattgcaaaatgagttccagtcagacaaaaacaaagttttttttgttttgttttatttgatctgagtctgactagggaatgaagaatgcttccaaagaaaaacattaaaccctgttttgagattgtgtcttttaatatctggctttccctaccttcaccccatgcttgactcttgtcctgttgaggggaagggaacaaaacccagctgatcgtttgagggacttctatccttgcatgaacgttaacctttaatgcaggctaacctacattttggggactttccacatgtcagaaccaatgtactgccatcctcatcagacagccttgcttaagcacagttttgtacaataatgtccaccaatgaaaaccttcgtttcctttgttttaatcagttcctcttgcattatgtttgaatcatactactgagtcattattttttcacattctgtcttaaaatacggcttttcccccttgtttatttttgcacatatatcatgggatggggagcagcaggaaatgatccttcactgaccattatcatttagtgctctgtggtttcttttgctccatggttgttgtttttttaaattcacattctcactaattttcttaacattcttcccatagtaatacacattactgatgctgctttatgcttgagaaaatggcaaaatgtcactcggtgagctgaaaagggaaataacagagacttacagcactgcagtttccagaaaagttttaatttcctgaaacattgctttcaatcaatatcaatcaatcaaatgttttctcgtggtatactggatgttttgtgagatacagaagaagtatttgtttagttattcatccatcaagtttttattgggagccaactgtgagccatacgacagatgctgagggtatactggacaagaaactagacgaagctttctctctggcagaggaggtaggcatcattgttataagtgctatgaagacaggtatcaaatgaacttatttaatacacatttcttgaccacctcctgctttgcgaaagcactgaagttacataaactgggaagtagatcagcagggttttctgtgaggagtgaccaactataggggctttttgtaaattggactgctctctctcctccaaaagcaaaaataaatatttttccatgtggggatgttatattttttctctttatttggtaatgagctctcaagacaggatgtgggtaaggatagcaagcacctgagaaagaaagtttgagctgcaatatattttattttcctctaccccaattaaataacaatagtcaaacacaatttaaaatttccttctgcctgagactgtcatcctcacctctggaattcctctggaaaatttttacctggttaataataatctctctctctctctttctctctctctctcacacacacacacacacaaacgttattaataataatcactctctctatcacacacacacatacaacacacccacaaacacagcctagctctctcacttggcatcattcttttgccttcatgggaacttaagccaagtttaataagagacttatagtgagttggtgatgtcccaaattctcatgctttcaggagaatggcagccagtaagtgatatcacctgatattcccaggtaacctgggaatgtttcctttgtggtatgttcctgggttggccaagccacagagattgggtaggaaaatgactggttggcatgcaagtacataggcgcactcctgattacgtggaatagagtaggactgtctaactttaaagtgcttgtgaaccacatggggatcttgttaaaatacagattctaattcagtaggttcctggagtaggctccaagattctgcatttcttttctttttcttttcttcttcttcttcttttttttttttttttgagacggtgtctcactctgttgcccaggctggagtgctttggtgcgatcttggctcattgcaacctctgcctcccaggttcaagtgattctcctgcctcaacctcccaagtagctgggattacaggtgcgtgccaccatgcccagctaatttttgtatttttagtagagaccatggtgaccaggctggtctctaactcctggcctcaggtgatccacctgcctcggcctcccaaagtgctggggttacaggtgtgagctactgcacttggccaagatgcagtagctcatgcctgcatcccagcactttgcaccctgcacttctaacataggtgtgcataggtgctctatgcagagaagaatggcctctccctgaccctcttcttcctacttcttccccatcacagaatttgagaactgttggtgggggagtggaattgaacttcttgtctagttgctcctaaaacactggtctacagaatgactacctggtgatttcaccagggagatctttaaaaaatctagattcccagagattctgattcagcagttctgggggaagtcccagtcacctgtattcattcaaagctcccaggccaattgggggagcaaaaaacactttgaaccattaatatctttcttattttataaataaggaaatagggtggttgcatgacctgcccaacctgacctagttgtggtcatcaatactagaacttgggtacccttttccagcccaataccctgctatttccaatctgactacccagggcaattgcttctactaagaaaggaaagcaatttcctacccctgaataagtgattcttaagcataaaataaatgtcaggttcagtgctgtttaatggatccagaacattttcctgtcgttggaagcaaacatgaatagatctaaagtgcaatttgtttccatcctactctaaaaggaagttggatgaagtgtgctatgggaatggaaatgtttcacattttattcctctgggagataatttcataatttaaaaggtctttgttcttgggtgtttttctgataaccaatgaaaatatcaatgctttcagatggcttccatataatcaacaatccttgaattgacatattgtattcctttcttcttgatacttgaagcgttcatatttattttcatttcacttgccatggctcatttattgggctgcctggtctctttgacactgaaactttgcacaagtctgtatcttcgtcttccctcctgagctgtgccaattcatgggctggaactatgatttggatttttcccatggtctgggtaattcctgtttcactgtttttagttctttctttttggaaagaagaaaacctccattaatgttaaataaaagtatctgctggtctagtcccacataaacaagcctattgaaaggctgagaaaggtattatggctttgggaggggtttcctgcagaatctgcatctctaaccccgaacttctctccatttacagggaagatatctcagcccagaagcctctccgcccgcatcctgcagccacactgggctgctctggcaatgagagactctagcccatggacactcttctcataaagagtttcctggtagatgggaaaccttatgaccgtccaggtccattctgcctgcatgcagtaaatcaatctctgtgacacaggttttgcaaaagagaaaagatttgttcacaagggcaccaagcaaggaggcaggagaacagctctcaaattcacctccccaaagataaggcttagggatattaatgggttagggaagtgggatgatctaagccttggggaaatgtgattggtagtaggaaaaactgaagtaacaggttcgttctgcacaagtgtggttggggtttatggcatttcataagacacatgtacagacaatggtggtggtagcatgatctgaggttggagtttttggacctctgacatcagaggcacctcttgggcatacccagttgaagggtcggtggtctctactggtttaaactggacaggagctggctcaggttcctgaacaacaactgaagcgaccactataggtcgcttggtgacctataaatgtgttatctgtaaagtagccagtgaaggttaagtttcagtgttcaggctgggcatggtggctcgtacctgcaatcccagccttttgggaggccatggtgggaggatcgcttgagaccagcctgggcaacatagtgggacctcatctctacaaaaaataatttttgaaaattagctgggcatgatggtgtgcacctgtggtcccagctagtcaggaggctgaggtgggaggattgcttgagtccaggatttcgtgggatcaagctatgatcatcattgcactccagccctggtgacagagttaaaaaaaaaaaaagttttggcatttagcagtgaggccttcagctactgtggccttcagcttcatggaaaagggggaaaaaaatcctaaaaagcaattaaccaaaagcaagcagggcagactcaccttatcaaattaaccccttggttttatgtttgatttgttctcatcctataaatgctacctctactgacagaacaaacaaaggaggaggcttcttgaagtgtattttctttctggagcagtctattaagcaagtagcctgacactaattttctttttcttttttttttgatatggagtttcactcttgttgcccaggctggagtgcaatggcgcaagctcagctcactgcaacctctgcctcgtgggttcaagtgattctcctgcctcagcctcccaagtagctgggattacaggtgtgtgcccacgcccggctaatttttgtatatttagtagagaccgggtttcaccatgttggccaggctgctctcaaactcctgacctcaggtgatccacccgcctcggccttctaaagtgctgggattacatacgtgaggcagtgtgcctggccaagattaattttcatttaaagacatgaccaacatgttgggagcactggctgtcagcaggtgtttctattatacagtggactgagccctggacaagggtgaaagagccaagtgcttggttctactcccctctgcatggtcagatgccctagggagcttcaggattcccaccgttataatggagggaatgccaccctgaccatttcaaatgagaagagatatgtgaaagcccaggataagctgtaaaccttgaaacaaatatatgataggattattagcaccaagataatgttctgcatgttatgggtaataatcaatcttcttcctattagacttttgtaagtggtataaaggatggtgtggcaactgtgtggtttctttggaaattctcctctcagatcttctaccacgggagcattgttaactgagggtctcagtgctgccgtctgaaattcctcacagcattaagcccagcccatgctttctagggccttagtccagccagtcgtaactgtggcaaggatactaagacatgagaaacataggattccgctaaagagtgatttttggctcgaagactcatcagtcatgctgaaattttcctagagctgcacaacagtcgaaggcctccctccctcccttccttccccatctccttcagagacctcaggactcactgtggcctgattgttcttcccacctccttaggctccggctccctccccattttttctcattggtgttgtgctaacaaatctcttgcttatcttaatctccttatagcatctgcttcttagagacccagattaatgcagaccatgaatccatcttcctgtgaatgtgtccagcacctggaattgttagcagtgagcattcccctgaacctggaaccttctttggcacaggcttcttggactaggtcagttctgtggttctactgagttcttcggcacatgaataattcccttgcaagcatcctgctttttgactcagcattctctagccactgactgccaaagagagtcacctgcagggacagaggaagtcacctgcagtcacttgcagagacagagcccagctgcccattccaggacccttggacccactctcgaatgtgctccccagcctctcccttggggccaccacttctctctttactccctcatgcacaaaaaccttcattccacttcctcctccaagtacacagtagcccttaatgtacccttaatagccctctattagaatgaattaggttatcatagaggtttttttttttttttaatgtcagcgatttaaagtaacaaaggtttatgtcctgctcattccatgtctaacatggattggcaggaggggctctgctcatcacagggacttaggatcacagactgggggagacttttctcagtacatgccgtcccaatgaccaagaaagggaagagcaggctggagtttgagtacctgcaattacatgcttccttccagaagtgacacatcaattctgctcacatttcatcagccaaagcaagtcacttgaccatgcctaactgcaagggggtaggggtgtaaaggcaagcaaatggaacacatatgcaaccatcccctcagaaaagatggctccaaaggagtcccagtttttagcacataaatgcttcaccatccctaaaagcctgagagaattaagtttcctgaggactgagaaaaatatttaaatccacacgagggttaagcaaaacatagcaaagggagaagggttaagtttttcacatcctgctgcagagttaacactacaaatgctgggcttggttatgagaacacaaccagcaaagccatggggtttgtgtaagcactgttgatgtcagtaaaacatcacatcccagacttgtatgtggcaataggtcagctcctcgctccctgccttgactgtacctctgcacctgttcaggaatcctggaggagaaacaggaactcaggcagacaagtggtgattcctgccactgtgtcagggtattttttcttgcaaaagtgggccccgactaagcaggacaatatacctatatattgtgaaactgacccttgaaatgcaatgaagtcctattgtcaaaacagccttacaaggacggaaacatcatcttgctcagtccctttgtgaccttcactctcagagaggggtggaaaaggactctcttctctggccttggctaaatggctgtctttctagagcttttctgtttggtccacacttttcctaggatatgggaggtttttaaatgctttggatttaaaataccaaatacagtgtggattgaatttccgttctgttcggtacctcaaacaggccaattcaatagaaaaattaagtcaaaagagtttgttatgttttgtaaggcaaatgaccaacaaatgaactacaatgttcatgtttccagtggctgtacaaaattaatttgcagaaaatgaaaacatgtaaaatagatgaataaagttaaataaaagtctttctgtttaggagataggacagtgtaaactaatttttaaataaagtagtttgaaatagtaaagtaaaattctatttgccttaaaataagacttgtggtcttagacttcaccttttctgggtgaccgctgaggtatagcaccctggtttctctaagcttaaaataattactcaaaaaatattatgtgcagtcctgagccaggctgtattctaggcaccagacagacagccacgggagctacctagtattttggcatgactgacagatgtagtgctctaaaatgtgctgatatgccttttcttggtcactgctcatgaggcaataaccaagtgttctttgctgctctgcaaaacgagaacccagttaggcttctgtgcatggcatggagcagtatgtcctctgggtgctgttttacaggcatacttgccaagttttatgatggaatgatagtttctccttaatagtttttatccaccctggaattacaaagacaaggcccatgtttgcctaaggaaggacaaacaggattgatttcagtctgtcaaagtctgttggtataaaatattgagagaacctttctcaaaaggcatttgtagaagagcattaaatcatcactaacacagtgttttacagagttcagagccctctcattctgtcttagtctagggagagtttggttaaagggtgtaaacaggtgctgaccctggtctgtctaaggatcagaattagagggagatgctttgcttcaacgttatggaaaatgcccttctttacattcatattaagcaaaatttctattagtaatttatagcatgggtcccaattggaatagaatgaagttttcccagaccttccttacaggttgactttttcagtattgggtgaaattattaatcttcccagagaggatcagcatatatagaacttgttttatcaaactagtttgtctccaggtgggactttagtgacactattactaatcatggcctttaatctgctaaaataaaattctagctgattatcgaggcaggcagatcacttgagattgagaccagcctcgccaacatggtgaaaacccctctctattcaaaatacaaaaattagccaggcgtggtggtacctgtaatctcagctgctcaggaggctgaggcaggagaattgcttgaacccaggacatgcaggttgcagtgagccaagatcatgccactgcattccagcctgggtgacagaggaagacttcatcttaaaaaaaaaatccagctgattatcaagcacaaaagtatagatgatgactacaatttacctaacatctacttatatagttatattctcagtactttacaggccttatcttgtttaatttaccaatcaacagatggtgtaattgagaccggactggcatttctcagcctccttcacagctatatctagccatttgaataaattattgtcaatgaaaagtaaacagaagcaatatatagaacttttgagatatctccaaaaaatggaatggtcaagaatcattttcttactcccacaaataatctagtgaagatgctgtttccaaagaaatctatcaagacttccaattaaacatactatatggaacacaaatttatatctgctgtctcccagaactccactataatgatactgaataaattaaacaagcaagtgggagtgaggtaccatatgagatcaggcggatgaagtgaaagactgtatattgaattgcgagattccttcctagtctcctcttcttggctacaaaaaaagttggctgccagatttgtcacctcgagaccccactttcccataatcccaccagccatgagaaaatgactggcctgtaaaaatatattaacttgaaaataatttcgcctagaataaaatgaaaggaaatgagtagatcacaaggcatacatgtatgtaaaaagaaacatagatgactgggcgcagtggctcacacctataatcccagcaatttgggaggcctaggcgggcggattgcctgagctcaggagttcaagaccagcctgggaaacacggtaaaaccccatctctactaaaatacaaaaaattagccgggcgtagtggtgtatgccagtcgtcccagctacttgggaggctgaggcaggagtattgcttgaacccgggaggtggaggttgcagtgagctgagatcgcgccactgcactccagcctgggtgacagagagagactccgtctctaaaaaaaaaaaaaaaaacacaacaacagagaaataagaacttggttgaaacaagtactttagaatcaggaatgagttatatgcctcgtgttaatgagacatgaataattaaaggattcttacattttattatatcaaggacacaatggttaaaaattctaagccaaacgggtgaagttctctgtaagtttggctttctgtttacacatgctctgacccttgaaaatataattatacttactcttaaatatttgcttactaagggcagagaatctccagacaagtaacatctaaatataacaattgtaatttataatcttgagactttgtatactgcagaaaattctatttggtagagacagctgtgtgttcacttgtgttataaactttattcatcatgggaaattgaattttctgtcttgttttgttataattaagccactaattatcaccatacttgttaaaaagttttcaatgtttaccatgtaaatttcccagatatttcctccttgtagttgtataggtgaaatatgagatggagtttataaaatattcatgtctaaaatacaacacaaaatctcatcttgcataggttcaagagaaaagacctataaacactgacacatgttgatcctctgaaataaaagcagcattcccccatgtcaccctccagggaagcagcccctctcctttagacaatctctgcccaagcatatagagattccaatctctctttttttcaatgcctcactcttaaatataaccggtcatccatgggacatccagatatttgagaaaatctttcaacatttaagatagagaacaaaataatcaagaagaaacctcccagagaaagcagagacaatgcaacagaagaacactttagattagaagagcaatgctatctataataaaataatcaagatgttatataaagaggggtgttcagaaatagcaagaaagaggataccatcaactttaaatgggaagtggagcaagaagacttgatggacaataggagagaaaagaacaaattaaagatcaatccagcaggcctaacattagtctaataggcacaaaagtaatagagaacagaaaaaatggagtggaaaaaactgtcagggaaagaatacaagacaattctgcagaactttaggatagaaggtttcaaatttaagagcccactgagtactcagcaacacggctaaaaaaagaccacaccagagcacatcattatgaaattttagatcgctaattataagggttaactttattgtatcagattttgacttcttgacttcaacactgaaaattaggtgcaaatgaagaaatgacttcagcattcagggaaatactgcccaaactattgatcaagaaggtgtgcagaataaaatgtcttagacatccaatttttcaaagactttacctgccatgcaccctttacaagaaggtagtagaggatgtgtctcaaaaacacaaggggttgaaaagcaaaaagaaggcataggatacaagaaagaggtgatctggcacaagaaaacagtaatggaattcccagaatgatggaggaagaacacccagaaatcctctagggcaactatgcctgaaaggagcaagatgacaaaagttgcagggaaaaatgtctcaagaggcaaagaaaggattcacagttgagtcctgctgaagggtttaatgatcattgaattaatgggtacatataaaaaaaaaagaaaatgaaaaaaaacaggcaattaactccaagaaaagtaaagtgctgtacagcaaaggaagtttaaccatagtaactataaatagcacaatgaaaagattttttacttagtcataaaatgccctatttgatataatccaaacctaagccaattcgctttcattataaagtggggtacctgggggagactgttatacaaaataaggcaatgttcctgtaatcctgctggaaataaaactgtttctacttgggatcaagtatgttagaacaggttgctatatacttcctgaagattgtttgcaagacacagaaatccacctgaggatgcttaagtaaaaaaggagtttaagggatatgcacagaatgcaaagcaggaagcaccccaggcctcatgggaatggaaagtcctcagagcacaaccttctccttccttctccttccctttctggtgtctcctatctatgcatatctcctttctcctctcaatgcaaactacttccttgagtcttagtttctgtttagaccctggcttgattgagattctgactttcctgatgctgtcagggagaaaataaagaaaatcaagagaggctctagatactttctgaataacaagtaaagacaagcacaaatttaagttccagaataattcagagaagctgtacagtgtaagttagaaatcacagtgcgagtttgtgtattccatttttaagggagtggcagagactaataagtattcaccattatctactgtctcttcttttgataatcaaacctccacattttagcaaggcacatggctacctagctagagatattcacaggcctcagctggagctggacagatgtggccatgtgacctggttttggtcaatagaatgttagcagaaattatgtgtctacttgcaaggaatatcttgctttccattgcctatattgcttcccacataccagaatccctagctactgtaacttagacttgctaatttttgaagtttatttcttttaaactcataatccacagatttcccctctgtccctttcttttcctgacaatttatctgttgaggaacccaggccctttgacatgtagtttctcacagtctggcttttgcaactgcatgctcacagtgaagcttagcctgttcctctgtcctctggtatttcccttccctggcagctggatttagaggattgatccaactcagattcaaagcccttgataggccacaggtggtactttgttttctcatcagtaatcctaattgagaatgcaaatttattattcaaaattcacaaaattaaataagtataacaaatttaaatacttaagcttttaaagcagaggtccccaacacccaggctgtggacccatctcctgtcagatcagtggcagcattagattctcataggagtgcgacccctattgtgaactgtgcatgtgagggatccaggttgggtgctcctcatgagaatctaatgcctgattatctgagtctgaggtgaaacagtttcatcctgaaaccatccctctatgctccccttccgtggaaaaattgtcttccatgaaactggtccctggtgccaaaaaggttggggactgctgttttaaaggatgtgttttataaattcctaacatttgttttcctgaaattttagaacttaatattgccctaaaacttttgggacactatatttataaagcgatgataaaatacctcctggattcatatggatactttggattcaaattcagcactctagggcttttactctcctcattttggtactactgtatctcctttggtttacattcaaatttcagattcccaaggaaaaaagagaattacaatatcagtgtttaggtattcttaaccataacattaaatatgcgtaataaaaaggacagcagatacacaattttgtgtaatccactctttgatttagagatacaattaatgaaattaatattgtatgggtaaactgttttaagactgtatatatggaaataaattattgtatgccccaatatctttgattcagccttgattaaaattatacttaacatagagtgcaaattgtttttaaacaggaacttgtaggaaacctccaggaagctgttgatacaagtgtctttgagagtcgaaagcattgaaagtgctggattaacagttagcctttatttagatagataaggcagatggtgagtaaatacttccaatatgatttgccataaactgtaacttaaatatataattactctgttttttactgtacgttttcggcttcaccttgtaaccaaacacaggtgcagttgctcaccacttacagagtgcaattaacaagagggagctctggtagaaagaaagtgactattagtggaaaccaggaaaggggaagtgaccggattcctgttcaaagctttgattttagggttgggggaggcaggggtttaaaaaaggaaaacttgataaggaaggcatgcaagaattaggctgagtacaatgtgtgtctggttcaggtggctatcttgggtcccagtccacctggatcgtgggctggagacatctggagacatctcagcaacggccgagttattgattagccagcttgaagtagtctctggaattgtgtcactgagtctccaggcttaggctgtgtgtctgaagattagcccctggaacttctaagaaggcacataattagataccagtacacagttaaataaatgtgaagggagtgtctatgggtgggaaagggagggacgtggagtctattttttttttttttttggtcttgggcttctttttatttttattttattattattatactttaagttttagggtacaggtgcacaatgtgcaggttagttacatatgtatacatgtgccatgctggtgtgctgcacccattaactcgtcatttagcattaggtatatctcctaatgctatccctcccccctccccccaccccacaacagtccccagagtgtgatgttccccttcctgtgtccatgtgttctcattgttcaattcccacctatgagtgagaacatgcagtgtttggttttttgtccttgcgatagtttactgagaatgatgatttccaatttcttccatgtccctacaaaggacatgaactcatcatttttaatggctgcatagtattccatggtgtatatgtgccacattttcttaatccagtctatcattgttggacatttgggttggttccaagtctttgctattgtgaatagtgccgcaataaacatacctgtgcatgtgtctttatagcagcatgatttataatcctttgggtatatacccagtaatgggatggctgggtcaaatggtatttctagttctagatccctgaggaatcgtcacactgacttccacaatggttgaactagtatacagtcccaccaacagtgtaaaagtgttcctatttctccacatcccctccagcacctgttgtttcctgactttttaatgattgccattctaactggtgtgagatggtatcttattgtggttttgatttgcatttctctgatggccagtgatggtgagcattttttcatgtgttttttggctgcataaatgtcttcttttgagaagtgtctgttcatgtcctttgcccactttttgatggggttgtttgtttttttgttgtaaatttgtttgagttcattgtagattctggatattagccctttgtcagatgagcaggttgagaaaattttctcccattttgtaggttgcctgttcactctgatggtagtttcttttgctgtgcagaagctctttagtttaattagatcccatttgtcaattttggcttttgttgccattgcttttggtgttttagacatgaagtccttgcccatgcctatgtcctgaatggtattgcctaggttttcttctagagtttttatggttttaggtctaacgtttaagtctttaatccatcttgaattaatttttgtataaggtgtaaggaagggatccagtttcagctttctacatatggctagccagttttcccatcaccatttattaaatagggaatcctttccccattgcttatttttctcaggtttgtcaaagatcagatagttatagatatgcagcattacttctgagggctctgttctgttccattgatctatatctctgttttggtaccagtaccatgctgttttggttactgtagccttgtagtatagtttgaagtcaggtagcgtgatgcctccagccttgttcttttggcttaggattgacttggcgatgcgggctcttttttggttccatatgaactttaaagtagttttttccaattctgtgaagaaagtcactggtctatttttaggctagggtaaaaggcttctgcagtttgcttcaaggttctatcttgaaacccaagagagaggcaaaaaagatttttaaaaaaggtttgaagctaagctcttgagtttcaattccctgctctcaaattccattccatttctatgaaaagcagctacttcctgctgagaagggtgtagttagggagtattggaatggaatctgttgatcaggagctggaaatattcttgagtccctggattcatagtagggatttgttggagcattatggtgtgaggacctaggatttttggggaaagcgtgtcctgcattcccatataaagtgtacggcagcaataaaatccatagcaaccaaagagagcaatgagcagaaggccaattatactgtgtaggagagtcttcaatgtcttaggaagttgactaaaccatgctgtcacaggctcttgagagagagcatctatagcatatataatatccaatagaaatatgggtatttaaggcctgaatagcttgagttatattgtgagaagaatctggtatctttctatatctatatctatatctatgtctatatctatatctatctatattacacagccttaattaccgcacaagtgttgccctgggccatagttaggatatctaaagccatatgatttaaagacattgtgggattagacatagcactagtttgcctgtatgtcttgtagggctgaggatatgcttttggagttatccaggaaatatgtacagcatttagtcttagttatagttcatggttcccactatcaattgaacccagatttcttgtgtgcatatgacaacaggttggctaaatatacacacttaacaggaggaactatgaatatttacaaagatggtcctgacatatgtgtattgaacaaatatacatgtatgacccatgtttattttgaggtggagaatttacatttaaatatattacttttaggccttatgtatcaaaaggtctttataggacataaagccatgtaagtgtgcactttctgtaaactagcccatggttggtagtctttcattaggggaaagttactgagattagtctcttgtctaattaaagctgtagttatggctggtggcatagaggccaggagtcagtcagttggcttatcttgaagccaggtattgtttggctgctagagaaaaacaaaaatcttgaggcatttgagacatagtttactctttaagtgtaggagtgagtgacttaacccttgcctggcattgccctaggtcctgtttataatttggtattttatctttacaggttctgtttgatcagtcttatgaactgttttaatgttaatgatgatcagttgtgcctaaaatccaaaaagttggggaaggtatagtgaggcgtgtctgactctcccctcttcccatgccctgcttcccatcatgactttaactaattttccagttatttgtggggattgctggctccaagttatttttgtgacaaaattggaatctgttcccatggctaaactttgccctgataggtaatccaaggaaagctgtgaaccaaaatttggggtaaagcagtctctatggcagtttttttccttcagtttctaatgagttttcaatgtttatattctagttacaccataaataacgagttttatctcagcaccagcagcttagtaacagcagatttaaagcaggcagaaaagaagagaagatagagacctttcgaagactctacttaactctgtagtgcaggttaaccatttgagctctacatttttcttgttgtaatttgcccatcagtttaaaatgtgcacataaatgggccataatatgtaaccagctggaatcccaaagaggatgacaaaatcaggggccagaatgttggaaactgcttttccgctgccatgctggatccctggattgagtaggaaaagagaaaaagaaaagacaggaatggagagaagaaaggtcaaattttataggagggaaggggaaagagaaaggaaggaggggaggcttgtgagcctcccaaccaccacacggtacggggtcatggagagactcagcacctcagacctacacggtggtatctatatctatatctatatctatatctatatctatatctatatctatatctatatctacatctatctatattacacagccttaattaatgcacaagtgttgccctgggccacagtgaaccaaacggtggggaacaaatccctcccacctctgcaagtcaccagtcaaggtgaagtgtttccaaccagagggagctaaaggtgcttttggccgagaggaataaggctgtaggtggcttctgagataatcaggaggatgatgtttgaacaaggggaaagagagagagagagagagagaaagggatcattcagggcccacatacaaaggacacacattcatgcaccttcaaacaaatcaccagttaagaggctgagtacagtctcaaatcccttgcctcagtttcaagccggcctcccaggtgaataagtctgaactgagcaaagccctaagggtgccaaaaacacaaataaacataaatgcataaagtgctcaaatggtgtcatcagcggccaagtctaaatagagcagagccacagcgacaccctaaaggaggcagagggtggtcgggtgcactccaacagactcacccagttccaagtttccaaaattccaaaatgtgtcgagttctctaaaggttactctctttgcaccagcaaagcattgaaggcagcaggcaccacagcaggaagagaaagaggatcctcgagacaaaagcgtctcggcagctgcagggcaacttcctaacgttccagccaaggggacacagtagccacagtagcccagtagctgtagctcacaggcggcactgtgccctgccggacagaaactagaccggcaggcccaggctctgggagctcacagtgcttcctgtaagagccaccaaattgtaactgaatgcaggtatggatgctcaccacttgcagagtccaattaacaagagcgaggtctagcagaaagtgactttattaatattaactgaaactagtaaatgggaagtgtccagattcctatccaaagcaaccatttcaattttgtgggggaaggtgggggtttaaaaagggaaaacttgataaggaaggcatacaagaattaggctgagtacaatgtcagagtgtcatgttcaggtgactatcttgggtcctgcccacctggatcgtggaccaccatctcaacaatggccaagttgttaattagccgccttgaagtgatctctggaattttgcaggtgggtctccaggcttggcctgtgtgtctcaagattagcccctggaacttctaagaaggcacataattagatactagtatacagttaggtaaatgtgaagggaatatggtgagaaagggagggatgtgtagtctactttaaggctaagagaaaaggcttctgcagtttgcttcaaggttatgtcttgaaaccccaagagaaaggcaaaaaaagttgtaaaatgcattttgaagctaaattatccggttacaatctaagtctatttactcaggagggccaagagcttcccttcaatattgaaagttcgtattagtagttctaaagactgatgagaaataaatgtttgttagcacttgtgttgggatgtgtgctgtagaaaacagggtttattcactcagtttattcactatgtttgccatattagattgttctcagtcaccaaattattatgactaaccagctgatggacttcactgatctgttaaataaaagtaaaagactgcaatgtacaaagtttcagttaaaacgaactctgctttctgatatatacatcacatatcattatgtgatatataatatatatcacaatatatattaactttcagataacagatgcttctgctgtacattaaattttatgttggatatttaagtttggctataaaaagataagtcaaactattttatttgctagtttgctatacagatctatcttgagttgcctggcttagcttccattttaaatatttttacactattttctttttaaaagtatagaattggtggatcaaagaaattgtcttacagatctattatagtatttactactctcggaaaatatgtgtaactctaataataataaaatacaaagagaacatagtggaaaagcttaaaaaggaaataagttggtgaccaatgaaacaatagactgaacaaaacagataaaatgagaaagtttcaatggcaaaaatgtttaaaccaataagataaaaatgaaagtgaaagctgtcacaggtatgaaattcactatttcagtttacccgtgcacaaagatcgagggctcattatagcattataactggactccatttaggcgttgctaatggtaggaaacttaggcttgctaatttgatacaatgcagtccctttaggtttaaaaatacttttatctaattgctctgttcatttggcaactctcctatttcctcttttcctttccttctccttgggggaggcctgaggttcctgggaagtgttctgacactgggggaggaatgcccgtgcaggggctggcctctgcccctgcacctctctcttgagcttggccatgcactgtgtcgaccctgctcccttgctgacatcttcagctccacatggcttatagtcagctggtccaccgatgttgcttcccctttgtcccagtcatagacccttttcatctgcaggcttccctgtgtcctttgtcagagcaaaggatgattccagaggctgtcctgtgccacctggctggtgtgggcctctgtggggctgctgtccggttcacttgcctggacaacacactcagcagtgctggggtattgctgaatcagactgtacttggagcttctgtggggccttttcttcatttcctcaaggccacagctggcaagggaggcacaaagtttctctgctctgcaggccccccaaactcatcagaaagctccatcaaccccacaactttggggttcaacctgaagaggagagtccgggtgctggactcttctcataaactgtgcctctcagctcacatcctttttgcatccccttttccagccattggttgaattcttatcttttttgtcgggggtggggggggaaacagctttgatattaccatgcatctctcgctggagtgacataaatgacattctctggggcctctgggctctcaaaattaaaacataaacaagagacttgcggttcttgacaagtaggaggctagcaagggccgctggcctcctcctccagacctatccctggggggcccagaaaaaggcagaagtgtatggagctataaataagtaaataaataaagggcactttgggaggctgaggcagatggatcacttgaggtcaggagttcgagaccagcctaactaacaaggtgaaaccctgtctctactaaaaatacaaaaattagccgggtgtggtagtgcatgcctatagtcctagttactcaagaggctgaggcaggagaatcttgaacccaggagacagaggttgcagtgagccaagatctcaccactgcattccatgcactccagcctgggccacagagcgagactccatctcaaaaaaaaaaaaaaaaaaaagaaaaaaaaaaaaagaaaagaaacaatggaaaggggaaatttgagcaagaccctatagctgaaagaggaatgtagagcctgatatgctggggggccaggactgacagcctgataagaaacaggcagatacccatggaatataaaaagctcaatttttgccaaactaataaataacattaataccataaaccttgaattaataaatattgatacaataaaaaacattttctgtggaatttaataatctgactcaaactcacatgacagatcaaagggccaaaaagagccaggagtaatgttaaagttgaaaaagcaaggagacatgccatattagataacagaattgaaaataaagttaagtaattcaacagtgtggtgtaagtgcagggctagacaaatggaataatgggacagagtagagagtccaggaacaggcttatgcacataagaaaacatgctccagaaatggaagaaggccaggtacggtgcctcacggctgtaatctcaacactttgggaggccgaagggagaagattgcttaagcccaggaggttgagaccagcctgggcaacatggaaaaaccctgtctctacaaaaaaataccacaattagccaggcatggcatcatgccatggcatatgtctgtgataccagttactcaagaggctgaggtggaaagatcgcttgagcctggaaggtcaaggctgcagtgaaccatgataatgccactgcactccagcctgggtgatagagtgagaccctgtcttggttaaaaaaaaaaaaaaaaaaaagaaaaaagaaataaatgagatagcaatacagatcagtgaggggagagtggaatattgataaatagaaaaatgatgaaccacaaggagaaaaagtaaaactagagttccacatcttaccatgcacaaaaattgacctacatgaattggaaattgatgcccaaaacaaaatctttttcctttttttttttttttttgagttggagtctccctctaccacctggctagagtacagtggcacggtctccgctcactgcaacctccacctcctgggttcaagcaattcttttgactcagcctcctgagtagctggaactacaagtgcacgccaccacacccggctaatttttgtattttttaatagagatgtggcttcaccatgttgaccaggctggtctggaacccctgacctcaggtgatctgcccgccttggactcccaaagtgctgcgattacaggcatgagccaccgcacctggccttcttctttctttttctttttcttttcttttttttgagagagggtcttaggccgggcacggtggctcatgcctgtaatcccagcactttgggaggccgaggcgggcagatcacctgaggtcaggagttcgtgaccagcctggctaacatggtgaaacctcgtctctgctaaaaatacaaaaattagccaggcgtcgtggtgggtgcctgtaatcctagctacttgggaggctgaggcaggagtcgcttgaacccaggaggtggaggttgcagtgagccgagactgtgccactacactccggcctgggaaacaagagtgaaactcagtctcaaaaaaaaaaaaaaaaaaaaaaaaagaaacggaaaagagagagcatcttgagctattgccctggctgaaatgaagtgatacaatcatagctcactgtagccttgaactcctggctccagggatcctcctgcctctgccttctgccttccaagtagctgggactacaggtaggtaccaccacatctggctagttttttatttttatttttgtagagacaggggtctcactatattggccaggcttggtcttgaacttcccaaagtgcagggattggaggcataagccactgtgccctgcccttcaactgatacaagggacatttaaaagaatttatgttagagcatgaaaatatgttttttaaaaaaacaaaataagcccgaaccataaacaaaatattggtaaatttgactacattaaaaaaagttctgtattataaaagataggatgggggacatgataaaccacagactggaagaaggtgtttacaatgtaggtgatggacaaaggattagtatttaatatgtgcagcattcctaaaaagaaacagaaccaagttgcaaaggatatggataggcaattcatggaggaataagagcttaaactcaagaataattgctatggtttgaatgtgtcccctccaaaattcaggcattgaaacttacaatgtgatggtattaagaagtggggcctttaagaggtgataaggtgattagtgtgcctctccttatgaatggaattagggacccttacacaaggccttgatggacttgcccttctgtcttccaccatgtgaggacacagtgttcctccgctccggaggatgtagcaacaaggtgccacgctgggagcagagaatgttcctcagcaggcagtcacacctgctggcaccttggtcttgcactttccagcctctagaactacaagaaaataaattttggttctttataaatgactcactcttaaatattagcagcacaaacaaaggcagaaataaaaaaatgcaaaaaaaaaaaacccacagtgaggtaaaactatcatattggtaaaagtttaagtctgaaaaccccagtgataggtccttatgaatcaacactgttggggcaggagtgggtgtggggggttgcaaattagaataatcacttagaacaatttggaaaaatttcgtcaagttgagaatgtggatttcctctgatgctgcaatttcacttcaaggtgtacactcccagaaattcttgtacaggtgcacagggagccatatacaggatgctcactgcagcattcaacatttgtaatgctgaatacctggaaatcacattgatgtccataaggacgcataaattaattgtgatgtcttcatactaatttattgatcatgtgatcttgagcttaaaccccaaatttttcttcacttgatgatgaggatcacagtagtacctatctgataaaaagattttttgaggataacatgattaaatactagaacagtgtacaatactttaaaatgcctagaacagtgtcaagcacaaaataaaatccattaacagtggtaacgacagcaacaggagcaatagtagaagtagtatacgacagtacgatgaatatatcaacatggctgaattgtacaaaatgtgaaagagaagaagaaagttgcaggagaatatatacagtataatactatttgtgtgaagtttaaaaccatcaatgcagtaccatataatgtctatggaaacatacgtatattacagaattgtagaaatatgcatgggaatgatgaacaccaatttctggataatataaatccatctaaaatggattttgacgatggagacggggaaataggatctaagagggtaacggaggcttcagtagtatctatcatattttatttttaagcttgattttgtatgatatttgccatctatattattgtatgcctgaaaacaataaattttaaagatattactttggctgggaacatactttgtgtttttcatctaccccttatctatgccctcattacacattggctgctccaaaaatgattaaatctaggaggccttcatttaaaatgtccaaagcaaacaaacaatctcatttcaaaaactcatagaaaaatacttccattttggttttttctggcacagaaataagtttcttgagaaagtggggctgtgctgtgtgttttgtttattgtctagcataggacgggaattaaaaatacattcacaaattagttggtgattcacttctttggaatttaaaaataaatttcccacaaaattataataattactatcttttgagacaggatcttactctgttgcccaggctggagagcagtggcactgacatggctcactgcagcttcaaattcctgggctcaagagattctcccacctcagcctcccaagtaactgtgatcacaggcatatgccaccacacttggctaattttaaatttttttgtagagaaggagtctctctgtgttacccagactggtcttgaactcctgggctcaagtgattctcctaccttgtcctcccaaagtgctaggactatagatgtgagccaccatgtccagtccatgaataatttaaagagagtgactaatttctcaccctaactcataaaatcctatttaatccatgttgttctttaaattgcaggcaattgtaacaaatgcagaaaaactttttttttttttggcttggtactattgtggtaacatcagtctcaacacaggcatactttcattgaaaaaggaaaattctaaattagctggtgttttaaatttccctgtctttcatagtatttaataacctctgtttacaaatacacaattcatcttaattccaaatataccataattacatttttctaaaatggatttttttcagtgttggaaattcttaattgaaagcccgcacccctaactgatttgtgggagctctaaagagaagtatcaggaaagctctaccccagctcagtcctactttcttggttactacctggttcccactcactttcagggccagaagctgtctggtgagagaaaggtggacacccctacctgggtaaataaaagttaggggtggagtggggactgggcagaagtgacagagatggcacaagtaaggagaaaaacaggatttcatcaagaagatccaggtggaagccaggaaatgacaggctctcaggaaaaagtagcatggaacaaagtcaagagtgaacaggaaagaaatgaagatccaaaagcaggaagaatttaagttgttcaaaaccaaggctattgatttgggctggagtttctgcttaggtgggacctgtgtggctgagctgggggcaagagcttaaaggagttacagacaggacacctgggaggaatttcctttgaacaaaccaaatcccttgtctatctgaaaactgaaatccatttcttctccctcttttcttccttttccatattctccctccttctttctttcctccttcttctttcatttggaaaaaaatttatgtatgttccaccatccagaatgaaaaaatgttattccattacatttgcttcaaatacttttaataaaaaataaagtattaaaaacagatttgtaccccttctcagtcccgtacatctccttccctcccaagcacatccactatcatgaatttcgtgtgtgttcttctagttcgtgctttttctttcctttggtaatttgactatacatctatctgcctattgttaaagaaaaaaatattaaatgatacttgttaaagcatggtaaggaagactttattcaggaccatcatgacatgcattgggaccacagcaatgggattttgcagtggggaagagagattgggctcaactttgaattcagcatgggcaagtgggaatttatagccaaggggcagagtggggatcagtggatggaaaactactaagagaaaacgtcaggggtaagggggtttcctgtctaaagtgacctaataggattcttgctgaagatgggccagagtgatcagacgccacctgggagatagtggaggatgaactcggtcagatattgagcatggttagatatcaagggtgggcattcttgctaaactgacttagcaaggttctttgctaaaactgaattttgtaaagaggtgcacagatgggcttatgaaaaggttcaggagactgaataaaggttggccaaagaatcttttttaccataaacactataatatactgttttgtgtgtctcaaagatagatgtaaatatattataccttgcatattgttcaacaatttgcctttgtcatggaacatactttttagctctagccatgttgacttatgctgataaaatttgttcctcataagtagtgtagtattccatcatacaacgtgccacattttttttcttttttttttattatactttaagttctagggcccatgtgcacaacgtgcaggtttgttacatatgtatacgtgtgccatgttggtgtgctgcacccattaactcgtcatgtacattaggtatatctcctaatgctatccctcccccctccccccaccccacaacaggccccggtgtgtgatgttccccttcctgtgtccaagtgttctcattgttcaattcccacctatgagtgagaacatgcagtgtttggttttttgtccttgcgatagtttactgagaatgatggtgtccagcttcatccatgtccctataaaggacatgaactcatcattctttatggctgcatagtattccatggtgtatatgtgccacattttcttaatccagtctatctttgttggacatttgggttggttccaagtctttgctattgtgaatagtgctgcaataaacatacgtgtgcatgtgtctttatagcagcatgatttataatcctttgggtatatacccagtaatgggatggctgggtcaaatggtatttctagttctagatccctgaggaatcgccacaccaacttccacaatggttgaactagtttacaatcccaacagtgtaaaagtgttcctatttctccacatcccctccagcacctgttgtttcctgactttttaatgattgccattctaactggtgtgagatggtgtctcattgtggttttgatttgcatttctctgatggccagtgatgatgaccattttttcatgtgtctattggctgcataaatgtcttcttttgagaagtgtctgttcatgtcctttgcccacttgttgatggggttgtttgtgtttttcttgtaaatttgtttgagttctttgtagattctggatattagccctttgtcagatgagtagattgcaaaaattttctcccattctgtaggttgcccgttcactctgatggtagtttcttttgctgggcagaagctctttagtttaattagatcccatttgtcaattttggctttcgttgccattgcttttggtgttttagacatgaactccttgcccatgcctatgtcctgaaaggtattgcctaggttttcttccagggtttttatggtttcaggtctaaaatttaagtctttaatccatcttgaattaatttttgtataaggtgtaaggaagggatccagtttcagctttctacatgtggctaaccagttttcccagcaccatttgttaaatagggaatcctttccccatttcttgtttttctcagatttgtcaaagatcagatggttgtagatatgtggcattatttctgagggctctgttgtgttctattggtctatatctctgttttggtaccagtaccatgctgttttgggtacagtagccttgtagtatagtttgaagtcaggtagcgtgatgcctccagctttgttcctttggctcaggattgacttggcaatgtgggctcttttttgcttccatatgaactttaaagtagttttttccaactctgtgaagaaagtcattggtagcttgatggggatggcattgaatctataaattaccttgggcagtatggccattttcatgatattgattcttcctacccatgagcatggactgttcttccatttttttgtatcctctttgatttcgttgggcaatggtttgtagttctccttgaagaggtccttcacatcccttgtaagttggattcctaggtattttattctctttgaagcaattgtgaatgggagttcactcatgatttgactctctgtttgtttgttattggtgtatgagaatgcttgtgatttttgcatagtgattttggatctgagactttgctgaagttgcttatcagcttaaggagattttgtgctgagatgatggggttttctagatatacaatcatgtcatctgcaaacaaggacaatttgacttcctcttttcctaatagaataccctttatttctttctcctgcctgattgccctggctagaacttccaacactgcattgaataggagtggtgagagagggcatccctgtcttgtgccagttttcaaagggaatgtttccagtttttgcccattcagtatgacattggctgtgggtttgtcataagtagctcttattattttgagatatatcccatcaatactgaatttattgagagtttttagcatgaaggggtgttgaattttgtcaaaggccttttctgcatctattgagacgatcatgtggtttttgtcgttggttctatttatatgctagattacatttattgatttgcatatgtcgaaccagtcttgcatcccagggatgaagcccacttgatcatggttgataagctttttgatatgctgctggattcggtttgccagtattttattgaggatttttgcatggatgttcatcaaggatattggtctaaaactctctttttttttgttgtgtctctgccaggctttgatatcaggatgatgctggcctcataaaatgagttagggaggagttcctcttttcctattgattggaatagtttcagaaggaatggtaccagctcctccttgtacttctggtagaattgggctgttaatctgtctggtcctggactttttttggttggtaagctattaattattgcctcaatttcacagcctgttattggtctattcagagattcaacttcttcctcgttttgtcttgggagggtgtgtgtgtccaggaatttatccatttcttctagattttccagtttatttgcatagaggtgtttatagtattctctgatggtagtttgtatttctgtgggatcggtggtgatatcccctttatcattttttattgcatctatttgattcctctctcttttattctttattagtcttcttagtggtctatcaattttgttgatcttttcaaaaaaccagctcctggattcattgattttttgaagggtttttttgtgtctctatctccttcagttctgctctgatcttagttatttcttgccttgtgctagcttttgaatgtgtttgctcttgcctctctagttcttttaatcgtgatgttaggctgtcaattttagatctttgctgctttctcctgtgggcatttagtgctataaatttccctctacactgctttgaatgtgtcccagagattctggtatgttgtgtctttgttctcgttggtttcaaagaacatctttatttctgccttcatttcgttatgtacccagtagtcattcaggagcaggttgttcagtttccgtgtagttgagcggttttgaatgagtttctgaatcctgagttctagtttgattgcactgtggtctgagagacagtttgttataatttctgttcttttacatttgctgagaagtgctttattttcaactatgtggtcaattttggaataagtgcaatgtggtgctgagaagaatgtatattctgttgatttggggtggagagttctgtgtatgtctattaggtctgcttggtgcagagctgagttccattccaggatatccttgttaactttctgtcttgttgatctgtctaatgttgacagtggggtgttaaagtctcccattattattgtgtgggagtctaagtctttttgtaggtctctaaggacttgctttatgaatctgggtgctcctgtattgggtgcatatatatttaggatagttagctcttcttgttgaactgatgcctttaccattatataatggccttctttgtctcttttgatctttgttggtttaaagtctgttttatccgagactaggattgcaacccctgcctttttttgttttccatttgcttggtagatcttcctccatccctttattttgagcctatgtttgtctctgcatgtgagatgggtttcctgaatacagcacactgatgggtcttgactctttatccaatttgccagtctgtgtgttttaattggagcatttagcccatttacatttaaggttaatattgttatgtgtgaatttgatcctgtcattatgatgttagctggttattttgctcattagttgatgcagtttcttcctagcattgacggtctttacaatttggcatgattttgcagtggctggtaccggttgttcctttccatgtttattgcttccttcaggagctcttttagggcaggcctggtggtggcaaaatctctcagcatttgcttgtctgtaaagtattttatttctccttcacttatgaagcttagtttgtctggatatgaaattctgggttgaaaattcttttctttaagaatgttggatattggtccccactctcttctggcttgtagagtttctgctgaaagatcaggtgttggtctgatgggcttccctttgtgagtaacctgacctttctctctggctgcccttaacattttttccttcatttcaactttggtgaatctgacaattatgtgtcttggagttgctcttctcgaggagtatctttgtggcgttctctgtatttcctgaatttgaatgttggcctgccttgctaggttgggaaagttctcctggataatatcctgcagagtgttttccaacttggttccattctccccatcactttcaggtacaccaatcagatgtagatttggtcttttcacatagtcccatatttcttggaggctttgttcatttctttttattcttttttctctaaacttctcttctcacttcatttcattcatttgatcttccatcactgaaaccctttcttccatttgatcgaatcagttactgaagcttgtgcattcgtcacgcagttctcgtgccatggttttcagctccatcaggtcatttaaggacttctctacattggttattctagttagccattcatctaatcttttttcaaggtttttaacttctttgccatgggttcaaacttcctcctttagctcagagaagtttgatcatctgaagccttcttctctcaactcgtcagagtcattctccatccagttttgttcctttgctggcgaggagctgcgttcctttggaggaggagaggcactctgatttttagaattttcagtttttctgctctgttatttccccatctttgtggttttatctacctttggtctttgacgatggtgacatacagatggggttttggtgtggatgtcctttctgtttgttagttttccttctaacagtcaggaccctcagctgcaggtctgttggagtttgctggaggtccactccagatgctgtttggctgggtatcagcagcagaggctgcagaatagcgaatattggtgaacagcaaatgttgctgcctgatcgttctctggaagtttcgtctcagaggggtacccggctgtgtgaggtgtcagtctgcccctactgggggtgcctcccagttaggcaactcgggggtcagggacccactcgaggaggcagtctgtccgttctcagatctcaagctgatcctgctgggagaaccgctactgtcttccaagctgtcaga

SEQ ID NO: 10278 - DNA, 6084 bp, Homo sapiens
ttttttttttttttcaattctgctactagtttttttttttttttttttttttattatactctaagttttagggtacatgtgcacattgtgcaggttagttacatatgtatacatgtgccatgctggtgcgctgcacccactaatgtgtcatctagcattaggtatatctcccaatgctatccctcccccctccaccgaccccaccacagtccccagagtgtgatattccccttcctgtgtccatgtgatctcattgttcaattcccacctatgagtgagaatatgcggtgtttggttttttgttcttgcgatagtttactgagaatgatggtttccaatttcatccatgtccctacaaaggatatgaactcatcattttttatggctgcatagtattccatggtgtgtatgtgccacattttcttaatccagtctatcattgttggacatttgggttggttccaagtctttgctattgtgaatagtgccgcaataaacatacgtgtgcatgtgtctttatagcagcatgatttatagtcctttgggtatatacccagtaatgggatggctgggtcaaatggtatttctagttctagatccctgaggaatcgccacactgacttccacaatggttgaactagtttacagtcccaccaacagtgtaaaagtgttcctatttctccacatcctctccagcacctgttgtttcctgactttttaatgattgccattctaactggtgtgagatgatatctcgtagtggttttgatttgcatttctctgatggccagtgatgatgagcatttcttcatgtgttttttggctgcataaatgtcttcttttgagaagtgtctgttcatgtccttcgcccactttttgatggggttgtttgtttttttcttgtaaatttgtttgagttcattgtagattctggatattagccctttgtcagatgagtaggttgcgaaaattttctcccatgttgtaggttgcctgttcactctgatggtagtttcttttgctgtgcagaagctctttagtttaattagatcccatttgtcaattttgtcttttgttgccattgcttttggtgttttggacatgaagtccttgcccacgcctatgtcctgaatggtaatgcctaggttttcttctagggtttttatggttttaggtctaacgtttaaatctttaatccatcttgaattgatttttgtataaggtgtaaggaagggatccagtttcagctttctacatatggctagccagttttcccagcaccatttattaaatagggaatcctttccccattgcttgtttttctcaggtttgtcaaagatcagatagttgtagatatgcggcattatttctgagggctctgttctgttccattgatctatatctctgttttggtaccagtaccatgctgttttggttactgtagccttgtagtatagtttgaagtcaggtagtgtgatgcctccagctttgttcttttggcttaggattgacttggcaatgcgggctcttttttggttccatatgaactttaaagtagttttttccaattctgtgaagaaagtcattggtagcttgatggggatggcattgaatctgtaaattaccttgggcagtatggccattttcacgatattgattcttcctacccatgagcatggaatgttcttccatttgtttgtgtcctcttttatttccttgagcagtggtttgtagttctccttgaagaggtccttcacatcccttgtaagttggattcctaggtattttattctctttgaagcaattgtgaatgggagttcacccatgatttggctctctgtttgtctgttgttggtgtataagaatgcttgtgatttttgtacattgattttgtatcctgagactttgctgaagttgcttatcagcttaaggagattttgggctgagacgatggggttttctagataaacaatcatgtcatctgcaaacagggacaatttgacttcctcttttcctaattgaataccctttatttccttctcctgcctgattgccctggccagaacttccaacactatgttgaataggagcggtgagagagggcatccctgtcttgtgccagttttcaaagggaatgcttccagtttttgcccattcagtatgatattggctgtgggtttgtcatagatagctcttattattttgaaatacgtcccatcaatacctaatttattgagagtttttagcatgaagggttgttgaattttgtcaaaggctttttctgcatctattgagataatcatgtggtttttgtctttggctctgtttatatgctggattacatttattgatttgcgtatattgaaccagccttgcatcccagggatgaagcccacttgatcatggtggataagctttttgatgggctgctggattcggtttgccagtattttattgaggatttttgcatcaatgttcatcaaggatattggtctaaaattctcttttttggttgtgtctctgcccggctttgatatcagaatgatgctggcctcataaaatgagttagggaggattccctctttttctattgattggaatagtttcagaaggaatggtaccagttcctccttgtacctctggtagaattcggctgtgaatccatctggtcctggactctttttggttggtaaactattgattattgccacaatttcagagcctgttattggtctattcagagattcgacttcttcctggtttagtcttgggagagtgtatgtgtcgaggaatgtatccatttcttctagattttctagtttatttgcgtagaggtgtttgtagtattctctgatggtagtttgtatttctgtgggatcggtggtgatatcccctttatcattttttattgtgtctatttgattcttctctctttttttctttattagtcttgctagcggtctatcaattttgttgatcctttcaaaaaaccagctcctggattcattgattttttgaagggttttttgtgtctctatttccttcagttctgctctgattttagttatttcttgccttctgctagcttttgaatgtgtttgctcttgcttttctagttcttttaattgtgatgttagggtgtcaattttggatctttcctgctttctcttgtaggcatttagtgctataaatttccctctacacactgctttgaatgcgtcccagagattctggtatgtggtgtctttgttctcgttggtttcaaagaacatctttatttctgccttcatttcgttatgtacccagtagtcattcaggagcaggttgttcagtttccatgtagttgagtggcttgagtgagattggtaatcctgagttctagtttgattgcactgtggtctgagagatagtttgttataatttctgttcttttacatttgctgaggagagctttacttccaagtatgtggtcaattttggaataggtgtggtgtggtgctgaaaaaaatgtatattctgttgatttggggtggagagttctgtagatgtctattaggtctgcttggtgcagagctgagttcaattcctgggtatccttgttgactttctgtctcgttgatctgtctaatgttgacagtggggtgttaaagtctcccattattaatgtgtgggagtctaagtctctttgtaggtcactgaggacttgctttatgaatctgggtgctcctgtattgggtgcataaatatttgggatagttagctcctcttgttgaattgatccctttaccattatgtaatggccttctttgtctcttttgatctttgttggtttaaagtctgttttatcagagactaggattgcaacccctgcctttttttgttttccattggcttggtagatcttcctccatccttttattttgagcctatgtgtgtctctgcacgtgagatgggtttcctgaatacagcacactgatgggtcttgactctttatccaacttgccagtctgtgtcttttaattgcagaatttagtccatttatatttaaagttaatattgttatgtgtgaatttgatcctgtcatgatgatgttagctggtgattttgctcattagttgatgcagtttcttcctagtctcgatggtctttacattttggcatgattttgcagcggctggtaccggttattcctttccatgtttagcgcttccttcaggagctcttttagggcaggcctggtggtgacaaaatctctcagcatttgcttgtctataaagtattttatttctccttcacttatgaagcttagtttggctggatatgaaattctgggttgaaaattcttttctttaagaatgttgaatattggcccccactctcttctggcttgtagggtttctgccgagagatccgctgttagtctcatgggctttcctttgagggtaacccgacctttctctctggctgcccttaacattttttccttcatttcaactttggtgaatctgacaattatgtgtcttggagttgctcttctcaaggagtatctttgtggcgttctctgtatttcctgaatctgaacgttggcctgccttgctagattggggaagttctcctggataatatcctgcagagtgttttccaacttggttccattctccccatcactttcaggtacaccaatcagacgtggatttggtcttttcacatagtcccatatttcttggaggctttgctcatttctttttattcttttttctctaaacttcccttctcgcttcatttcattcatttcatcttccattgctgataccctttcttccagttgatcgcatcggctcctgaggcttctgcattcttcacgtagttctcgagccttggttttcagctccatcagctcctttaagcacttctctgtattggttattctagttatacattcttctaaatttttttcaaagttttcaacttctttgcctttggtttgaatgtcctcccgtagctcagagtaatttgatcgtctgaagccttcttctctcagctcgtcaaaatcattctccatccagctttgttccattgctggtgaggaactgcgttcctttggaggaggagaggcgctctgcgttttagagtttccagtttttctgttctgttttttccccatctttgtggttttatctacttttggtctttgatgatggtgatgtacagatgggtttttggtgtagatgtcctttctggttgttagttttccttctaacagacaggaccctcagctgcaggtctgttggaataccctgccgtgtgaggtgtcagtgtgcccctgctggggggtgcctcccagttaggctgctcgggggtcaggggtcagggacccacttgaggaggcagtctgcccgttctcagatctccagctgcgtgctgggagaaccactgctctcttcaaagctgtcagacagggacacttaagtctgcagaggttactgctgtctttttgtttgtctgtgccctgcccccagaggtggagcctacagaggcaggcaggcctccttgagctgtggtgggctccacccagttcgagcttcccggctgctttgtttacctaagcaagcctgggcaatggtgggcgcccctcccccagcctcgttgccgccttgcagtttgatctcagactgctgtgctagcaatcagcgagattccgtgggcgtaggaccctctgagccaggtgtgggatatagtctcgtggtgcgccgtttcttaagccggtctgaaaagcgcaatattcgggtgggagtgacccgattttccaggtgcgtccgtcacccctttctttgactcggaaagggaactccctgaccccttgcgcttcccaggtgaggcaatgcctcgccctgcttcggctcgcgcacggtgcgcacacacactggcctgcgcccactgtctggcactccctagtgagatgaacccggtacctcagatggaaatgcagaaatcacccgtcttctgcgtcgctcacgctgggagctgtagaccggagctgttcctattcggccatcttggctccctcctctgctactcggtatt

SEQ ID NO: 10279 - DNA, 6172 bp, Homo sapiens
gcttctctattttattttattttattattattatactctaagttttagggtacatgtgcacaatgtgcaggttagttacatatctatacatgtgacatgctggtgtgctgcacccattaacttgtcatttagcattaggtatatctcctaatgctatccctccccctccccccaccccacaacagtccccagagtgtgatgttccccttcctgtgtccatgtgttctcagtgttcaattcccacctatgagtgagaacatgcggtgtttggttttttgtccttgcgatagtttactgagaatgatgatttccaatttcatccatgtccctacaaaggacatgaactcatcattttttatggctgcatagtattccatggtgtatatgtgccacattttcttaatccagtctatcattgtcggacatttgggttggttccaagtctttgctattgtgaatagtgccccaataaacatacgtgtgcatgtgtctttatagcagcatgatttatactcatttgggtatatacccagtaatgggatggctgggtcaaatggtatttctagttctagatccctgaggaatcgccacactgacttccacaatggttgaactagtttacagtcccaccaacagtgtaaaagtgttcctatttctccacatcctctccagcacctgttgtttcctgacttttgaatgactgccattctaactggtgtgagatggtatctcattatggttttgatttgcatttctctcatggccagtgatggtgagcattttttcatgtgttttttggctgcatacatgtcttcttttgagaagtgtctgttcatgtcctttgcccactttttgatgggattgtttgtttttttcttgtaaatttgtttgagttcattgtagattctggatattagccctttgtcagatgagtaggttgtgaaaattttctcccattttgtaggttgcctcttcactctgatggtagtttcttttgctgtgcagaagctctttagtttaattagatcccatttgtcaattttggcttttgttgccattacttttggtgttttagacatgaagtccttgcccatgcctatgtcctgaatagtaatgcctaggttttcttctagggtttttatggttttaggtctaacgtttaagtctttaatccatcttgaattaatttttgtataaggtgtaaggaagggatccagtttcagctttctacatatggctagccagttttcccagcaccatttattaaatagggaatcctttccccaatgcttgattttctcaggtttgtcaaagatcagatagttgtagatatgtggcgttatttctgagggctctgttctgttccattgatctatatctctgttttagtaccagtaccatgctgttttggttactgtagccttgtagtatagtttgaagtcaggtagcatgatgcctccagctttgttcttttggcttaggattgacttggcgatgtgggctcttttttggttccatatgaactttaaagtagttttttccaattctgtgaagaaagtcattggtagcttgatggggatggcattgaatctataaattacctggggaagtatggccattttcacaatattgattcttcctacccatgagcatggaatgttcttccatttgtttgtatcctcttttatttccttgagcagtggtttgtagttctccttgaaggggtccttcatgtcccttgtaagttggattcctaggtatttcattctctttgaaggaattgtgaatgggagttcactcatgatttggctctctgtttgtctgttattggtgtataagaatgcttgtgatttttgtacattgattttgtatcctgagactttgctgaagttgcttatcagcttaaggagattttgggctgagacaatggggttttctagatatacaatcatgtcatctgcaaacagggacaatttgacttcctcttttcctaattgaataccctttatttccttctcctgcctaattgccctggccagaacttccaacactatgttgaataggagtggtgagagagggcatccctgtcttgtgccagttttcaaagggaatgcttccagtttttgcccattcagcatgatattggctgtgggtctgtcatagatagctcttattattttgagatacgtcccatcaatacctaatttattgagagttttcagcatgaaggttgttgaattttgtcaaaggccttttctgcatctattgagataatcatgtagtttttgtctttggttctgtttatatgctggattacatttattgatttgcatatattgaaccagccttgcatcccagggatgaagcccacttgatcatggtggacaagctttttgatgtgctgctggattcggtttgccagtattttattgaggatttttgcatcaatgttcatcaaggatattggtctaaaattctcttttttggttgtgtctctgcccagctttggtatcaggatgatgctggcctcataaaatgagttagggaggattctctctttttctattgattggaatagtttcagaaggaatggtaccagttcttccttgtacctctggtagaattcggctgtgaatccatctggtcctggactctttttggttggtaagctattgattattgccacaatttcagagcttgttattggtctattcagagattcaacttcttcctggtttagtcttggaagggtgtatgtgtcgaggaatttatccatttcttctagattttctagtttatttgcgtagaggtgtttgtagtattctctgatggtagtttgtatttctgtgggatcagtggtgatatcccctttatcattttttattgcatctatttgattcttctctctttttttctttattagtcttgctagcggtctatcaattttgttgatcctttcaaaaaaccagctcctggattcattaattttttgaagggttttttgtgtctctatttccttcagttctgctctgatcttagttatttcttgccttctgctagcttttgaatgtgtttgctcttgcttttctagttcttttaattgtgatgttagggtgtcaattttggatctttcctgctttctcttgtgggcatttagtgctataaatttccctctacacactgctttgaatgtgtcccagagatcctggtatgtagtgtctttgttctcgttggtttcaaagaacatctttatttctgccttcatttcgttatgtacccagtagtcattcaggagcaggttgttcagtttccatgtagttgagcggttttgagtgagtttcttaatcctgagttctagtttgattgcactgtggtctgagagacagtttgttataatttctgttcttttacatttgctgaggagagctttacttccaactatgtggtcaattttggaataggtgtggtgtggtgctgaaaaaaatgtatattctgttgatttggggtggagagttctgtagatgtctgttaggtccccttggtgcagagctcagttcaattcctgggtatccttgttgactttctgtctcgttgatctgtctaatgttgacagtggggtgttaaagtctcccattattaatgtgtgggagtctaagtctctttgtaggtcactcaggacttgctttatgattctgggtgctcctgtattgggtgcatatatatttaggatagttagctcttcttgttgaattgatccctttaccattatgtaatggccttctttgtctcttttggtctttgttggtttaaagtctgttttatcagagactaggattgcaacccctgcctttttttgttttccatttgcttggtagatcttcctccatccttttattttgagcctatgtgtgtctctgcacgtgagatgggtttcctgaatgcagcacactgatgggtcttgactctttatccaatttgccagtctgtgtcttttaattggagcatttagtccatttacatttaaagttaatattgttatgtgtgaatttgatcctgtcattatgatgttagctggttattttgctcgttagttgatgcagtttcttcctagtctggatggtctttacattttggcatgattttgcagtgactggtaccggttgttcctttccatgtttaatgcttccttcaggagctcttttagggcaggcctggtggtgacaaaatctctcagcatttgcttgtctgtaaagtattttatttctccttcacttacgaagcttagtttggctggatatgaaattctgggttgaaaattcttttctttaagaatgttgaatattggtccccactctcttctggcttgtagagtttctgctgagagatcagctgttagtctgatgggcttccctttgtgggtaacccaacctttctctctggctgcccttaacattttttccttcatttcaactttggtgaatctgacaattatgtgtcttggagttgctcttctcaaggagtatctttgtggtgttctctgtatttcctgaatctgaatgttggcctgccttgctagattggggaagttctcctggataatatcctgcagagtgttttccaacttggttccattctccccgtcactttcaggtgcaccaatcagacgtagatttggtcttttcacatagtcccatatttcttggaggctttgtttgtttctttttattcttttttctctaaacttcccttctcacttcatttcattcatttcatcttccatcgctgataccctttcttccagttgatcgcatcagctcctgaggcttctgcattcttcacatagttctcgagccttggctttcagctccatcagctcctttaagcacttctctgtattggttattctagttatacattcgtctaaatttttttcaaagtttttaacttctttgcctttggtttgaatttcctcctgtagctcagagtagtttgatcgtctgaagccttcttctctcaactcgtcaaagtcattctccatccagctttgttccattgcttgtgaggaactgcgttcctttggaggaggagaggctctctgctttttagagtttccagtttttctgctctgttttttccccatctttgtggttttatctacttttggtctttgatgatggtgatgtacagatgggtttttggtgtgcatgtcctttctgtttgttagttttccttctaacagacaggaccctcagctgcaggtctgttggagtttgctagaggtccactccagaccctatttgcctggctatcagcagcagtggctgcagaacagcggattttcgtgaaccgggaatgctgctgtctgatcgttcctctggaagttttgtctcagaggagtacccagccgtgtgaggtgtcagtctgcccctactggggggtgcctcccagttaggctgctcaggggtcaggggtcagggacccacttgaggaggcagtctgcccgttctcagatctccagctgcgtgctgggagaaccactgctctcttcaaagctgttagacagggacatttaagtctgcagaggttactgctgtctttttgtttgtctgtgccctgcccccagaggtggagcctacagaggcaggcagacctccttgagctgtggtgggctccacccagttcgagcttcccggctgctttgtttacctaagcaagcctgggcaatggcgggcgcccctctcccggcctcgctgccgccttgcagtttgatctcagattgctgtgctagcaatcagcgagactgtgtgggcgtaggaccctccgagccaggtgagggatataatctcctggtgggccgttttttaagcgtgtcggaaaagcgcagtattagggtgggagtgacccaatttttcaggtgccgtctgtcacccctttctttgactaggaaagggaactccctgaccccttgcgcttcccaagtaaggcaatgcctcaccctgcttcagctcgcacatggtgcgctgcacccactgtcctgcgcccactgtctggcactccctagtgagatgaacccagtacctcagatggaaatgcagaaatcacccgtcttctgcgtcgctcacgctgggagctgtagaccggagctgttcctattcggctatcttggctgccc

SEQ ID NO: 10280 - DNA, 6065 bp, Homo sapiens
ttgtatttcttttttttttttttttttaattatactttaagttttagggtacatgtgcacattgtgcaggttagttacataatgtatacatgtgccatgctggtgcgctgcaacccctaacttgtcatctagcattaggtatatctcccaatgctacccctcccccctccccccaccccaccacagtccccagagtgtgatattccccttcctgtgaccatgtgatctcattgttcaattcccacctatgagtgagaatatgcggtgtttggttttttgttcttgcgatagtttactgagaatgatggtttccaatttcatccatgtccctacaaaggacatgaactcatcattttttatggctgcatagtattccatggtgtatatgtgccacattttcttaatccagtctatcattgttggacatttgggttggttccaagtctttgctattgtgaataatgccgcaataaacatacgtgtgcatgtgtctttatagcagcatgatttatagtcctttgggtatatacccagtaatgggatggctgggtcaaatggtatttctagttctagatccctgaggaatcgccacactgacttccacaatggttgaactagtttacagtcccaccaacagtgtaaaagtgttcctatttctccacatcctctccagcacctgttgtttcctgactttttaatgattgccattctaactggtgtgagatggtatctcatagtggttttgatttgcatttctctgatggccagtgatgatgagcattttttcatatattttttggctgcataaatgtcttcttttgagaagtgtctgttcatgtccttcgcccactttttgatgggttttttttttttttttcttgtaaatttgtttgagttcattgtagattctggatattagccctttgtcagatgagtaggttgcgaaaattttctcccatgttgtaggttgcctgttcactctgatggtagtttcttttgctgtgcagaagctctttagtttaattagatcccatttgtcaattttggcttttgttgccattgcttttggtgttttggacatgaagtccttgcccacgcctatgtcctgaatggtaatgcctaggttttcttctagggtttttatggttttaggtctaacatgtaaatctttaatccatcttgaattgatttttgtataaggtgtaaggaagggatccagtttcagctttctccatatggctagccagttttcccagcaccatttattaaatagggaatcctttccccattgcttgtttttctcaggtttgtcaaagatcagatagttgtaggtatgcggcgttatttctgagggctctgttctgttccattgatctatatctctgttttggtaccagtaccatgctgttttggttactgtagccttgtagtatagtttgaagtcaggtagtgtgatgcctccagctttgttcttttggcttaggattgacttggcgacgcgggctcttttttggttccatatgaactttaaagtagttttttccaattctgtgaagaaagtcattggtagcttgatggggatggcattgaatctgtaaattaccttgggcagtatggccattttcacgatattgattcttcctacccatgagcatggaatgttcttccatttgtttgtatcctcttctatttccttgagcagtggtttgtagttctccttgaagaggtccttcacatcccttgtaagttggattcctaggtatcttattctctttgaagcaattgtgaatgggtgataactcatgatttggctctctgtttgtctgttgttggtgtataagaatgcttgtgatttttgtacattgattttgtatcctgagactttgctgaagttgcttatcagcttaaggagattttgggctgagacgatggggttttctagataaacaatcatgtcgtctgcaaacagggacaatttgatttcctcttttcctaattgaataccctttatttccttctcctgcctgattgccctggccagaacttccaacactatgttgaataggagtggtgagagagggcatccctgtgttgtgccagttttcaaagggaatgcttccagtttttgcccattcagtatgatattggctgtgggtttgtcatagatagctcttattattttgaaatacgtcccatcaatacctaatttattgagagtttttagcatgaagggttgttgaattttgtcaaaggctttttctgcatctattgagataatcatgtggtttttgtctttggttctgtttatatgctggattacatttattgatttgcatatattgaaccagccttgcatcccagggatgaagcccacttgatcatggtggataagctttttgacgtgctgctggattcggtttgccagtattttattgaggatttttgcttcaatgttcatcaaggttattggtctaaaattctcttttttggttgtgtctctgcctggctttggtatcagaaggatgctggcctcataaaatgagttagggaggattccctctttttctattgattggaatagtttcagaaggaatggtaccagttcctccttctacctctggtagaattcggctgtgaatccatctggtcctggactctttttggttggtaaactattgattattgccacaatttcagcacctgttattggtctattcagagattcaacttcttcctggtttagtcttgggagagtgtatgtgtcaaggaatgtatccatttcttctagattttctagtttatttgcgtagaggtgtttgtagtattctctgatggtagtttgtatttctgtgggatcggtggtgatatcccctttatcattttttattgtgtctatttgattctcctctctttttttctttattagtcttgctagcggtctatcaattttgttgatcctttcaaaaaaccagctcctggattcattgattttttgaagggttttttgtgtctctatttccttcagttctactctgattttagttatttcttgccttctgctagcttttgaatgtgtttgctcttgcttttctagttcttttaattgtgatattagggtgtcaattttggatctttcctgctttctcttgtgggcatttagtgctataaatttccctctacacactgctttgaatgtgtcccagagattctggtatgttgtgtctttgttctcgttggtttcaaagaacatctttatttctgccttcatttcgttatgtacccagtagtcattcaggagcaggttgttcagtttccatgtagttgagcagctttgagtgagattcttaatcctgagttctagtttgattgcactgtggtctgagagatagtttgttataatttctgttcttttacatttgctgaggagagctttacttccaactatgtggtcaattttggaataggtgtggtgtggtgctgaaaaaaacgtatattctgttgatttggggtggagagttctgtagatgtctattaggtctgcttggtgcagagatgagttcaattcctgggtatccttgttgactttctgtctcgttgatctgtctaatgttgacagtggggtgttacagtctcccattattaatgtgtgggagtctaagtctctttgtaggtcactcaggacttgctttatgaatctggatgctcctgtattgggtgcatatatatttaggatagttagctcctcttgttgaattgatccctttaccattatgtaatggctttctttgtctcttttgatctttgttggtttaaagtctgttttatcagagactaggattgtaacccctgcctttttttgttttccatttgcttggtagatcttcctccatccttttattttgagcctatgtgtgtctctgcacgtgagatgggtttcctgaatacagcacactgatgggtcttgactctttatccaacttgccagtctgtgtcttttaattggagaatttagtccatttacattgaaagttaatattgttatgtgtgaatttgatcctgtcattatgatgttagctggttattttgctcgttagttgatgcagtttcttcctagtctggatggtctttacattttggcatgattttgcagcggctggtaccggttgttcctttccatgtttagcgcttccttcaggagctcttttagggcaggtctggtggtgacaaaatctctcagcatttgcttatctgtaaagtattttatttctccttcacttatgaagcttagtttggctggatatgaaattctgggttgaaaattcttttctttaagaatgttgaatattggcccccactctcttctggcttgtagggtttctgccgagagatccgctgttagtctgatgggcttccctttgagggtaacccgacctttctctctggctgcccttaacattttttccttcatttcaactttggtgaatctgacaattatgtgtcttggagttgctcttcttgaggagtatctttgtggcgttctctgtatttcctgaatctgaacgttggcctgccttgctagattggggaagttctcctggataatatcctgcagagtgttttccaacttggtttcattctccgcatcactttcaggtacaccaatcagacgtagatttggtcttttcacatagtcccatatttcttggaggctttgctcatttctttttattcttttttctctaaacttcccttctcacttcatttcattcatttcatcttccattgctgataccctttcttccagttgatcgcatcggctcctgaggcttctgcattcttcacgtagttctcgagccttggttttcagctccatcagctcctttaagcacttctctgtattggttattctagttatacattcttctaaatttttttcaaagttttcaacttctttgcctttggtttcaatgtcctcccgtagctcagagtaatttgatcgtctgaaaccttcttctctcagctcgtcaaagtcattctccatccagctttgttccgttgctggtgaggaactgcgttcctttggaggaggagaggcgctctgcgttttagagtttccagtttttctgttctgttttttccccatctttgtggttttatctacttttggtctttgatgatggtgatgtacagatgggttttcagtgtggatgtcctttctgtttgttagttttccttctaacagacaggaccctcagctgcaggtctgttggaataccctgccgtgtgaggtgtcagtgtgcccctgctggggggtgcctcccagttaggctgctcgggggtcaggggtcagggacccacttgaggaggtagtctgcccgttctcagatctccagctgcgtgctgggagaaccactgctctcttcaaagctgtcagacagggacatttaagtctgcagaggttactgctgtctttttgtttgtctgtgccctgcccccagaggtggagcctacagaggcaggcaggcctccttgagctgtggtgggctccacccagttcgagcttcccggctgctttgtttacctaagcaagcctgggcaatggcgggctcccctcccccagcctcgctgccgccttgcagtttgatctcagactgctgtgctagcaatcagcgagattccgtgggcgtaggaccctccgagccaggtgtgggatatagtctcgtggtgcgccgttttttaagccggtctgaaaagcgcagtattcgggtgggagtgacccgattttccaggtgcgtccgtcacccctttctttgactcggaaagggaactccctgaccccttgcgcttcccaggtgaggcaatgcctcgccctgcttcggctcacgcacggtgcgcacacccactggcctgcgcccactgtctggcactccctagtgagatgaaccgggtacctcagatggaaatgcagaaatcacccgtcttctgcgtcgctcacgctgggagctgtagaccggagctgttcctattcggccatcttggctcctccccccatctgcttgtatttc

SEQ ID NO: 10281 - DNA, 42299 bp, Homo sapiens
attttttttttttttaagtctttttctttttttttttctttttttttttattatactctaagttttagggtacatgtgcacattgtgcaggttagttacatatgtatacatgtgccatgctggtgcgctgcacccactaacgtgtcatctagcattaggtatatctcccaatgctatccctcccccctcccccgaccccaccacagtccccagagtgtgatattccccttcctgtgtccatgtgatctcattgttcaattcccacctatgagtgagaatatgcggtgtttggttttttgttcttgcgatagtttactgagaatgatggtttccaatttcatccatgtccctacaaaggacatgaactcatcattttttatggctgcatagtattccatggtgtatatgtgccacattttcttaatccagtctatcattgttggacatttgggttggttccaagtctttgctattgtgaatagtgccgcaataaacatacgtgtgcatgtgtctttatagcagcatgatttatagtcctttgggtatatacccagtaatgggatggctgggtcaaatggtatttctagttctagatccctgaggaatcgccacactgacttccacaatggttgaactagtttacagtcccaccaacagtgtaaaagtgttcctatttctccacatcctctccagcacctgttgtttcctgactttttaatgattgccattctaactggtgtgagatgatatctcatagtggttttgatttgcatttctctgatggccagtgatgatgagcatttcttcatgtgttttttggctgcataaatgtcttcttttgagaagtatctgttcatgtccttcgcccactttttgatggggttgtttgtttttttcttgtaaatttgtttgagttcattgtagattctggatattagccctttgtcagatgagtaggttgcaaaaattttctcccattttataggttgcctgttcactctgatggtagtttcttttgctgtgcagaagctctttagtttaattagatcccatttgtcaattttggcttttgttgccattgcttttggtgttttggacatgaagtccttgcccacgcctatgtcctgaatggtaatgcctaggttttcttctagggtttttatggttttaggtctaatgtttaaatctttaatccatcttgaattgatttttgtataaggtgtaaggaagggatccagtttcagctttctacatatggctagccagttttcccagcaccatttattaaatagggaatcctttccccattgcttgtttttctcaggtttgtcaaagatcagatagttgtagatatgcggcattatttctgagggctctgttctgttccattgatctatatctctgttttggtaccagtaccatgctgttttggttactgtagccttgtagtatagtttgaagtcaggtagtgtgatgcctccagctttgttcttttggcttaggattgacttggcaatgcgggctcttttttggttccatatgaactttaaagtagttttttccaattctgtgaagaaagtcattggtagcttgatggggatggcattgaatctgtaaattaccttgggcagtatggccattttcacgatattgattcttcctacccaagagcatggaatgttcttccatttgtttgtgtcctcttttatttccttgagcagtggtttgtagttctccttgaagaggtccttcacatcccttgtaagttggattcctaggtattttattctctttgaagcaattgtgaatgggagttcactcatgatttggctctctgtttgtctgttgttggtgtataagaatgcttgtgatttttgtacattgattttgtatcctgagactttgctgaagttgcttatcagcttaaggaggttttgggctgagacgatggggttttctagataaacaatcatgtcgtctgcaaacagggacaatttgacttcctcttttcctaattgaataccctttatttccttctcctgcctgactgccctggccagaacttccaacactatgttgaataggagcggtgagagagggcatccctgtcttgtgccagttttcaaagggaatgcttccagtttttgcccattcagtatgatattggctgtgggtttgtcatagatagctcttattattctgaaatacgtcccatcaatacctaatttattgagagtttttagcatgaagggttgttgaattttgtcaaaggctttttctgcatctattgagataatcatgtggtttttgtctttggctctgtttatatgctggattacatttatttatttgcgtatattgaaccagccttgcatcccagggatgaagcccacttgatcatggtggataagctttttgatgtgctgctggattcggtttgccagtattttattgaggatttttgcatcaatgttcatcaaggatattggtctaaaattctcttttttggttgtgtctctgcccggctttggtatcagaatgatgctggcctcataaaatgagttagggaggattccctctttttctattgattggaatagtttcagaaggaatggtaccagttcctccttgtacctctggtaggattcagctgtgaatccatctggtcctggactctttttggttggtaaactattgattattgccacaatttcagagcttgttattggtctattcagagattcaacttcttcctggtttagtcttgggagagtgtatgtgtcgaggaatgtatccatttcttctagattttctagtttatttgcgtagaggtgtttgtagtattctctcatggtagtttgtatttctgtgggatcggtggtgatatcccctttatcattttttattgtgtctatttgattcttctctctttttttctttattagtcttgctagcggtctatcaattttgttgatactttcaaaaaaccagctcctggattcattgattttttgaagggttttttgtgtctctatttccttcagttctgctctgattttagttatttcttgccttctgctagcttttgaatgtgtttgctcttgcttttctagttcttttaattgtgatgttagggtgtcaattttggatctttcctgctttctcttgtaggcgtttagtgctataaatttccctctacacactgctttgaatgcgtcccagagattctggtatgtggtgtctttgttctcgttggtttcaaagaacatctttatttctgccttcatttcgttatgtacccagtagtcattcaggagcaggttgttcagtttccatgtagttgagcggctttgagtgagattcttaatcctgagttctagtttgattgcactgtggtctgagagatagtttgttataatttctgttcttttacatttgctgaggagagctttacttccaactatgtggtcaattttggaataggtgtggtgtggtgctgaaaaaaatgtatattctgttgatttggggtggagagttctgtagatgtctattaggtctgcttggtgcagagctgagttcaattcctgggtatccttgttgactttctgtctcgttgatctgtctaatgttgacagtggggtgttaaagtctcccattattaatgtgtgggagtctaagtctctttgtaggtcactcaggacttgctttatgaatctgggtgctcctgtattgggtgcataaatatttaggatagttagctcctcttgttgaattgatccctttaccattatgtaatggccttctttgtctcttttgatctttgttggtttaaagtctgttttatcagagactaggattgcaacccctgcctttttttgttttccattggcttggtagatcttcctccatccttttattttgagcctatgtgtgtctctgcacgtgagatgggtttcctgaatacagcacactgatgggtcttgactctttatccaacttgccagtctgtgtcttttaattgcagaatttagtccatttatatttaaagttaatattgttatgtgtgaatttgatcctgtcattatgatgttagctggtgattttgctcattagttgatgcagtttcttcctagtctcgatggtctttacattttggcatgattttgcagcggctggtaccggttgttcctttccatgtttagcacttccttcaggagctcttttagggcaggcctggtggtgacaaaatctctcagcatttgcttgtctataaagtattttatttctccttcacttatgaagcttagtttggctggatatgaaattctgggttgaaaattcttttctttaagaatgttgaatattggcccccactctcttctggcttgttgggtttctgccgagagatccgctgttagtctgatgggctttcctttgagggtaacccgacctttctctctggctgcccttaacattttttccttcatttcaactttggtgaatctgacaattatgtgtcttggagttgctcttctcgaggagtatctttgtggcgttctctgtatttcctgaatctgaacgttggcctgccttgctagattggggaagttctcctggataatatcctgcagagtgttttccaacttggttccattctccacatcactttcaggtacaccaatcagacgtagatttggtcttttcacatagtcccatatttcttggaggctttgctcatttctttttattcttttttctctaaacttcccttctcgcttcatttcattcatttcatcttccattgctgataccctttcttccagttgatcgcatcagctcctgaggcttctgcattcttcacgtagttctcgagccttggttttcagctccatcagctcctttaagcacttctctgtattggttattctagttatacattcttctaaatttttttcaaagttttcaacttctttgcctttggtttgaatgtcctcccgtagctcagagtaatttgatcgtctgaagccttcttctctcagctcgtcaaaatcattctccatccagctttgttccgttgctggtgaggaactgcgttcctttggaggaggagaggcgctctgcgttttagagtttccagtttttctgttctgttttttccccatctttgtggttttatctacttttggtctttgatgatggtgatgtacagatgggttttcggtgtagatgtcctttctgtttgttagttttccttctaacagacaggaccctcagctgcaggtctgttggaataccctgccgtgtgaggtgtcagtgtgcccctgctggggggtgcctcccagttaggctgctcgggggtcaggggtcagggacccacttgaggaggcagtctgcccgttctcagatctccagctgcgtgctgggagaaccactgctctcttcaaagctgtcagacagggacacttaagtctgcagaggttactgctgtctttttgtttgtctgtgccctgcccccagaggtggagcctacagaggcaggcaggcctccttgagctgtggtgggctccacccagttcgagcttcccggctgctttgtttacctaagcaagcctgggcaatggcgggcgcccctcccccagcctcgttgccgccttgcagtttgatctcagactgctgtgctagcaatcagcgagattccgtgggcgtaggaccctctgagccaggtgtgggatatagtctcgtggtgcgccgtttcttaagccggtctgaaaagcgcaatattcgggtgggagtgacccgattttccaggtgcgtccgtcacccctttctttgactcggaaagggaactccctgaccccttgcgcttcccaggtgaggcaatgcctcgacctgcttcggctcgcgcacggtgcgcgcacacactggcctgcgcccactgtctggcactccctagtgagaagaacccggtacctcagatggaaatgcagaaatcacccgtcttctgcgtcgctcacgctgggagctgtagaccggagctgttcctattcggccatcttggctcctcccccaagtgttgaattttatcagaagccttttctgcacctattgagatgatcatgtggtttttgtctttagttctgtttatgtgatgaatcacatttattgatttgcatatgttgaaccaaccttgcatcccgtataagtgtacttgatcatggtggattaacttttaatgtgttgctggattcagtttgcaagtattttgttgaggatttttgcatcaatgttcatcaaagatattgacctgaagttttctttttttattgtgtctctgtcatgttttagtatcaaggtgatgctggcctcatagaatgagttaagaggagtccctcctcctcaatttttttggagtagtttctgtaggaatagtacctgctcgtctttgtacatttccactgatcattttactgtctccatagttttgtcttttccaaaatgtcatatagttgcaatcctatagtatgtagccttttcagactgccttatttcgtttagaaatatgcaattaagtttcttctatgtctttttgtggcttaatagctcctttctttgtagcactgaatagtattccattgtatggatgtaccacagtttgtttatccattcacctgttgaaagatctcttggttgcttccaagtctttgcaattacaaataaagctgctctaagcattcgtgtgcaggtttttttgttttgttttgttttgttttgttttgagacagagtcttactctgtcacctaggctggagtgcaatggtgtgatctcggctcactgtagcctccatctcccaggttctagcaattctcatgcctcagcctccccagtagctgggattacaggcacccaccactacgcctggctaattttttctatttttagtagagatggggttttaccatgttggccaggctggtcttgtactcctgacctcaggtgatccatccgcctcgacctcccaaagtgctgggcatgagccacgatgcccagcccctgtgtaggtttttatgtagacataatttgcagcttatttgagtaaataccatggagcacagttcctacactgtatggtaagaatgtatttagttttatgagaaattgccaaactaccttccaaaatggctgtaacattttatattccagagagcagtaaattagagtttctgttgtcttacatcctcaccagcatttggtggtgtcagtgttttagattttcaccattctaattggcatgtagtggtatctcgttgttttagtttgcagttccctaatatgatattgagcatcttttcatatgcatatttgccatctgtttattttctttggtaaagtatctgtttagctcaactctcttttgccttttttttttttaaatactgggtcttgctatgttgccccgactggatttaaattcctgggctcaagtgatcccagtgcctcagcatactgagtagctgggactgcaggcacataccaccatttgttaattgttttctcattgttgacttttaagcattctttttagattttatatttctggggttttgttttgtttttttgagacagagtctcacttccgtcacccaggctggagtgcagtggtataatctcggctcactgcaacctctacctcctgggttcaagcaattctagtgcctcagcctcctgcatagctggaattacaggcgcacgccaccacacccagctaatttttgtatttttagtagatagggtttcgccatgttggccaggctggtcgcaaactcctgacctcaagtgatctgcccgcctcagcctcccaaagtgctgagattacaggcatgagctaccatgcccagccaatttctgttctttatatgtgttttgcaaagatttttttttccccattttgtggcttgctgttttattctcttaacagtgtctttcaaagagcagaagtgtttaaatgttcttaaatatattgggtcaatcttttgtttgtttgttttaagaaatcagtgtattaaatttatatacaaaattgattcttagctatgttttaattttgttagcatcagtcactaataacaaaactgagattgttctacttggtagaatttagagggattttgccctccctctaaatcctatctaaaaacttttataactttcctcttctgttcattatgagatagacctgtgatgactgcctgtgtacttcaaagtcctttctctgagttttcttagttggtcactaaaacaggcaacattctacttggcagagacaaaatgttgatcatttctataatattttgtttggaggttataaatcattgcagcttctcattgacatggcttatttcaggttaggaaccagaacctagggctctcctcccatgaaattctactaaagccagggtgtatcagtaaaaatgtaatcctaccccagtacacatgtaaagtagagaattgcatgcaaagtgccggttttcatatatggaaatacactcttttgcaggtgcacctttgcttctcacttaggaaataagccgaaaaattgacaactgagcttctcttttgagaagatcaagatatttagcaactggagaacagtgtagtgtaatggtaaaagaccaagctcttgggttagaaagacttggattcaagtctcagtgtaaggcacactacgtaacctctataagcctccatgttcacatctgtaaaatggagttaatgcctattatacagggtcatattgatagaattaaatgctctgtataaattaggtgcagaccaaaacagactcttttgatagattaaatgtttatcccctttgtccattcccttatctggaccaatgaaatgagtttgctttccactaaggacatggaaacataccttgaatttcttcatcttgcatgagaattattttcagaatctttctctagccttcactcacaggggaactggccccaggtgcacgttttgagtgctttcccacagtttacctcagctgtactctcctactaataatgccttcctgaaactaggcacttagaatggtcccaggccacagccagacatggcctcccatgtggcttcaggtcagccagagccagtcaatccgatatcctactactcgtaccctcttcttctgtttatgacattatggatccaaatacagataggtgtgcagctacttaaataagtctaactccagtaataccaaaataaccctaaatctgcaacagatgcaaggatgccccctgggggcaattgttaagtgtgatgacagctgggcatcaattaatacatttgtcacctgctcatgagataggatcatgggaggtttggcaaagggacagtctgttgaacactgcacaaaacttagtagcaagaaaaattatttgtgcaggtattcatttttattttactttaatgttctgccttatctagttgcctgttttgagtcacaactttctctgtgcatttagatgaggttaataagatggctggtgagagcagtgcccccttcagccaagattaccaaaaaaaaccttgttcaaatgcccctcagaatttttcctgggaaatatgggccttctcattatgggcttaatgttcataatttattaggtaataactatttaaaataaaactaagtaaagcagaaaatatatacttttctaacatttggagacttgtttgctaaattaaaagacgaagtgccaagactataaattactttcgtatgttgagggtgaatgtttaaattgtacttttttatttttaacagaatgtttactcatgagcttagcatttaaatggttaaaacaaggctttgaagttaacactccattaagatgaatgggggtaattcacacctctgcttgtgctatattatttcagtctggttgcagagaaaacaagacagcagtaggttgatttactgtgtgaaggccctttaaacacccaaggtctggaaatctttggggtgtgtgtgtgtgtgtgtatgcttttccatctagaagcaggatctgaaattcaatacaatctaggtatagaatcgaggtcttgaaaatactaaagattctctgctatccagcaattccatatctggcatttgacgggtagcacgttactggatcaacccaacctctctggctttgtttgctactgtactgtagtgtttcttcctaccacagcattttttaaacttcagcttagtatactggtaaatccatcagtggaaaagcagaaacgaattatccattttccggtgaactttgtatgtgccttcagatgggttatgagctaagcattggtcttcatgtgctcctttttaaaacattttcatctttgcaaaatctcctgttctatatttacctacatataaagcatctacctttaagaactttacaattttttctcatatccctggggtagtgaagtaagcagagatcagttgaaaaagagacatttctttctcaatgtgtcctttaaaccagttctatattgtatttgaaatgtgtattccacccattggtggaagtgctacagccatttgaccctgaaatgattcattttagggcctgggaataaggttatcttaacacaaatgaaatggcaaacactgtataagatgttaatgagtttggaagatctatctttaaggtaaacagatttttctcttctctcttctctgtcctgcatgtttgcaggctcaggttactgggtaatctgtgggtagctaggtgtggagagtacttccactctggctggctgtagtgctgacactgccaatacagtatatacagagagaaaatagatgctagaaacagagggactcaaactgaattaattttaacctgtttttctttttggcatgttaacagctctctgtggctgtgttagaattagccctatgttaaacatactttacttcctgcaaatttttctgcctagattttaggtgtcataatttttgaccttagaacatttcagaatctttttattgtactgagaaatttgttttttaaaaaactcaaatacacaatttattcttctgataatcttcctgtattttttccataaggaggtaggaaaagtaggaaacaaaattttgatggaggatgaataaagatattgtggacatggtttctttattgcaatcagaatcctttctgtttgtcacccttcctaaacaatctgataaatgtgtttattatcacagtaatctgttgtcctgctttgccaagctgtcagtcaggacaagcaattataaggaacaggaagactcatcttggctgatggccaggtgggcaggtgggaataagaggtttattcacctgtggtacaaagtaaatgggtagaaaggaaaattgagttgccagggagaaaaaaaaaacacaaaaacagatggatgaaaagacattgtaatatgggatgctataaagaaaaagacttgcagagaaatgtttctcacttgtttgagtgtacagtcatcccttgggggattggttccaggatctccctcatatatcaaaatccatgcacattcaagtcctgctgcagaaccacatatacaaaatatcaaccctgtgtaaacatgcgcagattttgcatcctgaaaatactatattttttatccgtatttgattgaaaaaagtcaactgttagtgaacccgtgcagttgaaacccatgttgttcaagagtcaactgtgtatatattttatctagtgttcatcagtggacagatacacaacacaagcaaaagggctggctaattcattcagcaaattcttagcacatattatgtcctagaagttgagctagtcccaaggtcatgaaactatgtaagacatacatacatcttgcttgaaaaaagttcagatacaacttttatttttctgactgaacattttcagaccaacttgataagtgaaattgcttaaatgaaaaattatacatgtatttttaatatatacatatgtttttaaaaaaagattttggagtcaaaattacctgtgttcgaatcccagcttctgtctctttctatatctttctaattttggacaagttactattctctgaacttgctgaagactcaatatttgactgggttttctctcaaccagaggaaactctccttcaagtgagattacatatttgggaaaaactcgagtaagccgttaagcattgaatatacgtacacttttattactttactgtccctcaaatcacataacttccaaccatgttgtctcttctgccgtctctgcttcagacatttagtcagcagcctgactagaaaacggtattctagaaatatcctgaccaatgcatttattttcactactgatgtatttttccccggaaaaagtaattcttgtagtttcatagtaaatattatccacatattttgactttacatcagcatttttagcaatgacattacacttttggcttataaagtatgtggtcagaaaagctgcaggccttttttaggtaaattaccctggtttctagaaccctgtacttgtgctgttgatttacattttttaaatatgagggaatatacatgcacacacacacacatatatatatatacacatatgtataggtacacatatacatacatacatatgtatctgttatctatgtgttaaatttcatcctgttagcttcagtgcaccacttaagcagttgagatcttttttttgaatcttgattctagtgcatcagtcaccattcccgcttttgtgacattcttcatcatacttacattttttcatcccattcacagataaaaatgttaaatgagacaagactaaccagagggccctgcagcccaccgctatcagtatttctcttgagttgttattaatctatactttggatgaagttgttaatattcctgtagtgtcatctaacctgcatttcctcacttcccttggaagtgacccccaaatcagtgggtacagcctaaactcctatctgttttctgtatttctagttgcttcagaacatttctgcttgggggctccacaatcacttcaaacttaacatgtccaaatccattcctcactacagttttctcatatctgtcagcagcccctgttttcatccaacatcccaactggctttcttgcttccattcctgctacctacagtccactttcatactgcaaagtagttgtttaaaaattcaaatcagattatattgctaccctgattaatttcctccaagggctttccatctcacttagaatgaaatccatgccatggcctacaaggctcaattttgtctgtacctacttatttctctgatgtcaatgtatctttcattctccagccacactggcctttctgcccctggaacacaccaagcttgttccctcacacttactgttttccctacttagagcataattttcaaagacctttgcaagccgggcttcttatttaagcctcgggtcaactgtcaccccctcagagaggtctgccctgcctgtcttatggtcatgaccgtcttatggcccccaacacatggtagtgcttttaactttaccctgttatacaggtcactgctggaaatcttgtttatgtgttgtctgtgtccactagactgaaagtttcataagaactgggacataactgtcttatttataaccaaatcctcagagcttaggacagtgcctggtactttggagtggcttaatatttgttgaatgaatgcataaaggaatctaacagactgtgtccttctactctttacctctaatctgtcacaatgtcagttcttctttgaaatgcctcctagatttgcttttatgctgacccagcctcctgccagactcctatctaaatctcagccttcatctctttgtgcctgaagtattgcagtgattatcacttcaggctgttctttggcatcacttgggcaactttgcaaaaattaccacatgcaggttccaccccaaccagttaaatccaaatctctgagggttacgacccaggcatcgataaacttcttagagcttcccagatgactccaatgcacaactactggattgccatatctacctgctagcagatgtatgtcttccagcccattttgcctgttactgttctctggtctccttggaatcctgctttcatagtattactctcttgctcaagaacctataatggctcactactacccccattaatcccagataatggctcactgctacccccattaatcccagataatggctcgctactacccccattaatcccagattcccttgcctcatccactaagctatatttgagccctttcttacgtatgttctacaatacccttaaactgttttttctgtctagcacttgatttgccttttattaccctcttctatattgttactcctctccctactcccacttccaggtacatacccagaatgtgacttattttccacctatccaaatgcttctcattcttcaacacccagctcaaatcccacttctgtaaacactttattctccactctagtctaccccttattatctgtatgattattttggtataccattagtaccttgtaagatttttcgtatttttttcataaactacttttgtaattttgtattcagtttttgagtgggtaatgtgcacatggtacagattttaaatttacaaaaataccctcccatccaattctatccccagcatccagttttcctccttggaagcaaccacttttacaactttctgtgttcttcccagtatattctatgcctctcttagagagagagagagagaatacacaaacacaaggagaatacacggatatacacccgcaaatgttggcatacaacatgaaatcctttgcccctttgacttctctttacttaacattatgactttttttagttgtgctaaaacaaaaaataaacaacacctaacatgaaatctgccctcttaacaaacttgtaagtgtacgatatagtgttgttaattatatgcacattgtatagtagatacctaaaactttttcatccggcatgactaaaactctgtgcctaattgaacagcaactccctatttccctgttcctgcagtccctggcaactgccattttactttttgcttctatgagtttgactgctctcgccatcttgtaccaaggaatcatgtagtattttgtccttttgtgactggcttgtttcacttagcatattgtcctcaagtattatgcatattgcagcacatggaagaattttcttcattctttaaggctgaataatattccattgtatgtgtataccacaatttctttatccatgaatctgccaatagacatttaggttgttttcacctcttggctattgtggataatgcagcaacaaacatgggagtgcaaatatctcttccaagattctgttttcaatcattttgtttaaatatccagaagtgagattgctgtatcatatggtagttctattttaaattttttgaagaatctctatactggtttccttaatggttgcactattttatgtttctatcagcagtgcacgagggttccaatttctccatatccttgccagcatttgttttttgttattttgataatgatcatcctaacaggtgtgaggcaatatctcattgtggttttgttttgcatttccctgataagtagtgatgttgagcatcttcatataatgtctggtcgtttgtatgtctttggggaaatttctttcatgtcctttgcccattttaaaatttaatttttttgttactgagttgttgtagttccttctatattttgtatattaaccccttatcagatatgcggtttgcaaatattttctctctccttaagatttttattctgttgattatttcttttgctgtgcagaatctcttctgttggatgttgtcccacttgtctatttttgatttagcattatgttttggagattattttgtatcagtatacacaaaactccctaaatattttaacagctgcatagtattctgttaatgcatagaccataatttaattagctagtttcctatcaatgcatattgagggattttttattttcaaatgttgcaattttatataatgcttcaaatgttatctttgtatacatatgtcatttagcacatatattaatatatctgtagtatatatttctatccatttaactggaattctgggtcaaagggcatgtgcatttttaattttggtaggtattactacattgaccttcattaaagattttattggctgggcacagtggctcatgcctgtaatcacagtactttgggaggctgaggtgagtggatcactcgagcccagaaattcaagaccagcctgggcaacatggcaaatccctctctctacaaaaaatacaaaaattagccaggtgtggtggcgtgtggccatagtccgagctacttgcgaggctgaggtgggaggattacatgatcccagggaggttgaggctgcagtgagttgtgattgctctactgcactgtagcctgggtgacagagtaaaatcctgtctcaaaaaaaaaaaaaggaaaaaagaagatatactgatttatattcacaacaactatgtaggaattaccctttcaattttgtgttgttatttagcttttcacatttaaatactttacctctctgactccgttgtaattaacccaaagacaggaactatgacattacatattagcatctctcacagtagttggtgctcagtaaatatttgttaaatcttgtgtatttagggagttttcccatgagtggcgtttctgatgagtcccatgtgagaattgtcccctttgcatgtttgctgtttccaggaaagggtgtgattgtgtgtgatattcttaggcgagatgcttagtctattttgtgttgctggagcctgggaaatccaatatcaaggtaccaacacgtttggtgtctggtgagggccttgtctccactcccaagatggcctttgaatgttccaccctctggaggggaggaatactgttcctcaaatgacacataagtgaaaagagaaagcccgcttccaaaggcacttttattttattttatttttattatttttatttttaatctttgtgagtacatagtaggtgtatatatttatggagtacatgacatgtttcgatacagacatgcaatgtgaaacagtcacaccatggagaatggggtatccatcccctcaagcatttatcctttgtgttacaaacaatccaattatacttagttatttttaaatgtgcgattaagtaattattgactatagtcatcctgttatgctatcaaatagtaggtcttactcatattttctatttttttgtgctcatttaccattttcaccctgcccctactaccccacaacccttgtcagcctctggtaaccatccttctgctctgtatgtccatgaattcaactgttttgatttttagatcccacagataagtgagaacatttgatgtttgtctttctgtgtctggtttatttcacttaacataatggtctccagttccatccatgttgttgcaaatgaaaagatctcattgtttttatggctgaatagcactccattgtgtatatgttccacattttctttattcattcatctgttgatggacacttaggttacttccaaatcttggctattatgaacagtactgcaacaaacatgggagtgcagatagctcttcagtatacctattttctttcttttgggtatacactcagcagtgggattgctggaccatatggtagctctatttttagttttttgaggaacctccaaactgttctctacagtggttgtactaatttacatcccccccaacagtgcataaaggtcccctttccccttttctccacatcctctccggcatttattattatctgtattttttataaaagccatttttattggggtgagatgatatggcaattttgatttgcatttctctgatgatcagtgatgttgagcaccttttcatatgtctgttagccatttgtttgtcctcttttgagaaatgtctattcaaatattttgcccattttttgattggattattatattttttccaatggagttgtttgagttcctcatatattctgattcttaatcccacttcagatgggtagtttgcagatattttcttctgaaagcacttttattatgatattaaacctactgaggaaggtggagccctcatggcctaatcacctcttaaaggctccatctcccaataccattacattggcaattaaatttcaacgtgagttttggggggaacaaacatttaacccatagcagacaccattcatttatatttttcttccaggatcctgtattatcattaactcagaaaggccaactaatccttggatctattatcaaatttggtttgtttgaataattaagtataaattagctaaatggaaaggctctcctctgtaagttctttaccatctttttatgatgaaaaattttaaacatgaatgcaagttgaaataatatgcccatatacctaccactgaaacttagcatttggtcgtatttattttgtgactcacatataaattatatttatatgtaaatatacagttaactttagaacaacatgggttttctaactgtgtgggtccacttatatggggatttttttctgcctctgccaccccgagaaggcaagaccaacccctcccctgccttcttctcagcctcctcaacatgaagacaatgagaatgaagacctttatgatgatccagtttcacttaatagtaaatatgttttctctttcttatgattttcttaatgacatttttgtttctctagcttactttattgtaagaaaatagtatataatacaaataacatacaaaatgtgtgttaatcaactgttattggtagggcttacagtcaacagtaggctattagcagttaagttttggtgggagagtcaaaaattgtacacagattttcaactgtgtggtgggtgggcacctctgacccccacattgttcaaaggtcaactgtaaatacatttatatttgctgaataatttgcaaagtaagttactgacattccatgaagcagtaagtaaagttgaaaattattttttgtaaaagtcaccatctaccttagctcaggctactataacaaaataccatagattggatggcttaacagaaatttatttctcatagctctggaagctgggaagtccaagaacatggtgctggctagaattattttggtcctggtgagggcctcttcctggcttgcaaatggctgccttcttgtgtcctcacatggtggagaaagagtgatctctgttcctcttcctataaagccactaatcccattatgagggtctcaccctcatcacttaatctaaccctgattatctcccaaagaccccatcttgaaatacttgtgggttagggcctcaatatgaattgaggggttggaggagacacaattctgtccacagaactttctgtgaacaagcctattattccctccctccctacctacctccctccctcccttccttccttccttctctttcttttctttctttcttctttcacaaatgttgtccctttctccaaaaggataagaagctgcttgatgcagctgtcaccagaacttctcttagtaagggaaatatccttaatgtctttttttttttggtggtggtggggaatatcttgataagtcatttaggtatgaacggtgaattcttatacagtggcacagcaatgtgagtttactaaatgcctgtgaattgtatactttaaagagggtcattttatgttatgtgaatttcacctcaatcaaaaaaaatgtgaccctatgaaaatggttggcaagaggagaggaagtgagagagatagctaaaccactctgcataaaagagaaaatgtgaatttgggaactggagaaaagcaaagggaaagaggcagagagtgctaacccagtggtgggagtctagaggaaaagtggctgacgggcattttaagaacagaagcgtttaatattcagttttaatttgcctgtctctgtctcctgaaactaataaagtcagtagacacaaaaataccttgtgtgaacagaattgtgcatgtaaacccttctttagactcacatgggacagaacacatacagccttatgctatccaggtgatccagaaacctcaaaaagtgaaattcaaaggcagagatggccaagaaaaaatgtaagccacttgcttcctcccagagtccgtgggcacatcaggagggttgtgggacgatcctcatatgagggatgtgattgaaccaacttttcctaattctcaaagtgtattgaactttccttgacatctcattggcaatatattgtcatttcattgctttaagggctcattatttactagtcatcaattgtacctgtaggggaatgcctctttttagagacaagagaccagacctccacagaggtagatcttggagattggagcagttctagaatttctaacatttccccttacggtcatcttgctaggttctctgtaacaaagcctggtagttcagaaatcaggctccaagaacgtgccatagatcaacctgtttgtgtgtgtgtgtgtgtgtgtgtgtgtgtgtgtgtgtgtgtgtgtgtgtgtgtgtatgtatttgggatcagagccactcaacttcctttttttttgaaacggagtttcactttttttgcccagactggagtgcaatgctgtgatctcggctcactgtaacctccacctcccaggttcaagcaattctcctgcctcagcctcccaagtagctgggattacaggcatgagccaccacacccagctaattttgtatttttagtagagacgaggtttctccatgttcatcaggctggtcttgaactcccgacctcaggtgatctgcccgtcttggcctcccaaagtgctgggattgcaggcatgagccaccacacccggccttcaactcaacttctacttagatggtggcagtaggaatcagagggagtggggcccctagggaagagcactcccatggaaaaagagtagaaacaaattttataattccctggttttcttacccagttctccaacctgctaaaatctgaaaaagtttcatactttaaatgaatggaagatcattagtctcataaaataatatgacactactgagctggcacttcggtgtatagaccaggttctatgccaagcacattctcatgtaatctgaggtaagcacagttatattccccatttaatagattagaaattaaagtttagagagactgtaaggttaaatgacttgttcaaggttatacatccttaagatgccatcctaagaatagaaactgaagtttgactataaaggctgtgtgcttaattaccatgtaaataaagtgtatccaactgttggagtttttttctacaaaaaggttctgctcatagcagatacatagtcaatattgactgtgttgaaggctgctttattcatttaaaatgtggcacctaaatctgttctgttacatcagccagacagtattttggccggccttgtgtcctcttgagtcatggttcattgccacagcactgttgtttctcctttgttaagtatttcagaggaaattctggacaaaggaaaggtatatgggtcttcaagtagagcagggatgtgttccagtagttgtcaactagactgagaaaacttggatgtcttacgaaacaatgtcagaaatccatttctgtgttctgtgactttctacaaacacaatttttaaaaatccaaatatagcttagaccatcagtagtctaattcagtgtttcccagatttgagatttcttttggaactttagaacgtcaaaatgaatcttgggacattgataagattgcagactttttattttataaattgattaaggatattaaacttgccactttcaatataaaaaattaaggaaggttataacctttgtgaaaaacttgctacatagttatttatctcatcaaagaccagtgaaaactttctcatagaccaacacttggaaactatcagtctaaataaccagtctatattcaaaaattcagtaaagatttcttcacttctaatgctcattgacttcagttatcttataggtggaaagaagtagatacaaaaacagatcttgattacaaaattcgttgatgacctagttgactctttccccagtcattactaatcctaacctttgggagcgaaaaatatctaaataagttctggtttacaaatttgcaaaatttttgtcaacacttcagaattcagaaaaaaacacaggacatttttactatataacttcctaagtttatatgatatatcaaaagtcagtaaggattataccataataatatttacatttcacagggaagcaaaatacttggagcctctccttgtctttgtctaaagatttgtcattcatttgcattcaaataaattctttgctttcattcatccagaatggttctcaatttattagctcatgagactacataaatagacttgtattcatacattttaatttcagtgtaaaatggctttcctcaatttttttttctactcaactctcccaaaagatgtctaatcactcccacactcagttacttaaacatttcataatgttgttacttctatagtaaaacaaaaagtaatttgcttttaataaatcagagagccctactgtagcaatctagaactttattctggcgagagcaaattctcaaattatatttccagcctcatttgtgaatagctgattttccctgtcacaaagcattgttaggtaggtacagtatttttctttagttggtaaactactggaacttacaatccaatggaggtgacctctatacaatacctgggacggtaataccctgaagcgcagggtgtggctattgcatgtgccacatgcacatgaggccatctgtgcgtgcttgttgaaagaatgacatatcttggtgagtaatatgaacattaaaagctctgctggataagctcatagaggtggggttcactgccttctgggtgagtggggaagactttgtgaagaaagcaacaactgaagtaaaattgaaggataaccaaagtagaaatgagaatgaaaggaagatactcctgtttggaaagaaaatactaacaatatgtacaggaaaatacaaggtatactttggagatgacaagtaaaaattttgccaggagcacagatgtaatagcaatttgagaagtaaagctgaagggtaggatcctgatgtagagaatgctggacccaggctgagcttggactttacatcaagtagaagtggtagagaaagattaattgcctctctgcattggactagtgccatcgtcttccaaaagctaaaaagaagcactttaggccttcaagggctagttatctaaaaaccacacttgatttgttcttaagtctcagctcctgggcatatgaggaactttttctggagttttggaaaattcctcatgccctcagatcctattaagacctctggcatctttttttttttaattatttaatttatttatttttattttttattttatttatttatttatttatttattttgagacagggtctcattctgtcgcacaggttggcgtgcagtggtgtgatctcagctcattgcaacctctgcctcccggactcaagcaatcctcccacctcagcctccagagtagctgagactacaggtatgcgccaccatgcccagctaatttttgtactttttgtagagacagggtttcaccatgttgcccaggctagtctcgaactcctgagctcaagcaatccgcccactttggcctcccaaaattctgggattacaggcgtgagccaccgagccaggtcaagacctctggcatcttaagagacttcctatgagttcctgcctccaaacttttttttttttttttttttttgagacagagtctcgctctgtcgcccaggctggagtgcagtggcgggtattggcttactgcaacctctgcctcccgggttcaagcgattctcctgcctccacctcctgagtagctgggattacaggcacacactactacacctagctaatttttctatttttattagaggcggggtttcaccatgttggtcaggctggtctcgaacttctgacctctggtgatctacccacctcagcctcccagagtgctgggattacaggtgtgagccactgtgcccggcctcctgcctccaaacttttgcacaaaccattcatgttgtttttctctttcccctccaaagcgtttcttctccctcaaaacctgtttccacactcaacctcctctagaaggacttacctgactatgacttaatgtaactgctccattactcaggaaacctatgctcaacatcttgatgctacatttaatttctctaaatgataaaatatacaaattcttgtatatttgtatgtctaaccaccctgcgacagcctttaggaaaggttccacatctgccaactcctttgtatcctccatccagaacctgcctcccatccctactttacccatccacctcagagacttcatggtacagtgcagtatacttggtgagtgttgatggtttaagagtgtgccctgaacaacgaaggatttctttgaggctgaaatcctgtgggatccatggaatgggagtttcacctgtctttggcttctgctcctttccccagcatgtgtagagcttctagaacagtccccagcaagagaggatcacttggtacacctctttcttatcctcactgtctccagtctctgctgtaggcctgctagtgatgatcaggatacaggttttaacatggccaagctgttaataacctgagattgggcaccatgaacaataagcattaaaaggcaataacaacaacaacaacataacctgttaattttatgcaggcttaattttttaaagaactatttcttcctaacttgcttttactcttcttcatctactttctcatacctatgactgacaatgataaggacacccacccactatacacacctaattccatccctccaaatttgatttcgtgttctctagagctggcgtgttatgtgacctattgtggggagaggctcagctgagggactctgtgatgccaaatggacaaaggcacacttttttctccaggtcccagcctggtgaaagtcatagcacctgagaatttggagctgactctctcctttggaaattgtgccttccaaaaatatatcttacactgcctgtacctgcatgcaataggttttggttcttaccaactgcagcttcagtctgaacttgagttctaccctcatggatgcaaatcaaaacagctcagaatcaagtctgggaagcaagtcgaagtggtttgatttgcatggggagcttttgtctctgcatgaaggcagccaaattccctaggctccccagccctccggaaatatgctttacaggacccgggggcccaggcccagtcgggtgggtgtgatttgaatgttctctgctacagctgctgcaccgggccctggtcactgctgttggtttcgctccattttactgcctcagaatccccctgtgcatgttagtggttaatacagcagccaggagacgccagacagctctcggcacctggttcaaatttaaggctcatttacacatgatgtcacacacgcattgtcagcgcgagggaggtcaggatggttcattttgggaaggttcacattgttgagtctttacaacactcactgctattaatgctttaaccatctgacttggatttcggttttctggcatgaggtaatcccaggcactagatttatatgctgaatgggaagccagcaatggtggctaatcatgctggtttgcagatctgcacctctggagccttgggatggaattagagggccacatggcaagtagcaaatcataggcgttttgagcaggagaggaattagccagacctggaagcaggggccatagatggggtgttgtctgagccaggaagtttgattgaagaatggaaaccaaggtaaattggacaaggatctgggcccagagaccacaggaattattctactttgaccagtgctttgggtcattgcttgaactgtccttttgctcatcactcatagaaatcccagacccatcttcccaggtccagcgtaagtctttcatgttccatgaagcctttcctgaccacccatcccacagcaggggctgaggtggttagatcaccagaggtcagaagttcgagaccagcctgaccaacatggtgaaaccccatctctaataaaaatacaaaaattagctaggcgtagtagtgtgtgcctgtaatcccagctactcaggaggtggaggcaggagaatcgcttgaacccgggaggcagaggttgcagtaagccaatacccgccactgcactccagcctgggcgacagagcgagactctgtctcaaaaaaaaatttctctcctgaatccctaagtacttttgttactgagtacttaatttgtgcgactagctcattttaccctcacaattccaaagggaaggctttattatttctcttttacagatgacaagacaggttcagagaggttaaataatgtatccagtgtcaaacttttaaaagtcaggatggaatcctgattccaagcttaggttctgaaccactggggtaggctgtgtagtactacattttctgtggaacgtggtatcggtaacatgggagagacaggctgtgcctcaggaagatgccacatgggagtgcacagcagtgctgtagtgcctcgtgtttatgtgtagtcccaggtgcctggctgtaaacaactgcagggcagtgaccatcacctctgcttttctgcatccccacacttcctaacacagtgtcccccaaagtgtgcatcaatggatggatgaatattagcacccccgcaccaccctcacctaaaacatactgaaaagtttgagatctttggataaccaccccatcccctgctgttgtcttctgtcatacggctgaaatcgtaaaactggtctgcctgtcacagctccagtgagcctacttactcactggaaattcagagaatgtctttagtcctgttgactgctttgattttgttttttaacttgtaccaagacctgttgccatgatgggtctctgcaaatgggctttcttgttccatgagtctctgttttagtcaagtgaagggcacactccttttcattggccacctcttacttttcctccaagaggagtactcactcccagaaccctttgctgggctctcatgccgagcttaggtgccccttcagtgtgcttctgcagcactcattaccccgtagtagcattgtagtttaattcctgtttgcttgactgaagcagagactcacctgcagacgcctgtaggtgccttccacgttgctcagatgaacagtagagaagggtcaggcctgccctaggtttctacccctctcctcaaggccctttctagtcaccacgccacatcctgctcatgactgcagggatcatgcctctgggcctctgtccatgcagctgcctctgcctgcactccaggacaggggccttctctgctgtccactggagccctgtggaagggactcctgaccctagccttagggaagtcatctctaaaggctgttttattacagtgtttcctcagaatgaccctatagacacagtgttttctcagtgtcctctcacctttgaacatatccgggaataattgaaaaaaccaggcaatcaaatgtgcctctcataaatcaccatcacttcagagcagaacttaagagtttggtttgcaagccacaccaaatagtttgagcttggccctctaccatttcctcctgctctgagcccagaggttcacctagtggactgtagcaatggattcccttgcccctggcttcctgttgggttcagccagagagcagcaccagtgggagcctacagagggaggaaagtgaggtcaaggtgtctgctgcctcctccctgcctgccaggccactgtgggtagactacacctcaggtggccctccccatgtgtagccatgcttgccaggttctgggttctggaaacctccacctcctcttgccccttcagtcatagggtggtagcccccttcattgctattagctgttatgcactcaattgtgttccaaccccaaattcgtaggttgaggccccaatccccaggacctcagaatgcaactgtatttggagatagggtctttaaagaagtaattaaattaaaatgaggccattaagccctaattcaatgtgactggtgttcttgtaagaaaaggaagagataccatggagatgtgcacccagaggaaaggccacgcaaggacacagcaagaaggcaactgtttacaagccaagggaagaggcctcaggagaaccaaacgtgtccacaccttgatcttgcacttcccaacctccagaactgtgagcaaataaatgatgttgtttaatcacccagtttgtggtattttgttgtggcagttctagcaaactaatacagtggtacttactattccatggggatttccctaaatgttgcttattacagtgtgtaagtccttctggtaagctttccttttgggaagtcatctgtttcttgttgggaccctgatggatatccaggcttagatgccaacaggaggttttagtgacaaaggcaagaaaatctgtcactggaagtgtctccctgctaccggtgtccctccctatcatgtgaacccacctgggtaccctagtgctactccagggtatttccttttcttagaaggtgagtgactttggactgatcattccctgtgagcttcagttttcctcttcgtaaagcataggtaacaaaagctgcctttttggggtattttgaggcaacatgttggatgcagatatgaatggactgcgataacccagtaaggaaacaaggttgctcttctatagcagtatttgtaaacaatttcattgatacatacgcacaaagcattgaaatctttgaaggcaagaaaatggtgatgtttactagggaaggcagctctgagtctagcataggggagactgtgcgatttgcccagcaactttctatgccctcctcccaagtccaggaaaccttgaaaaccacagtgcagcagagacagagacccgtgtaccaacctattctcagtcaggttttcattagctcttcataaacaaccagtcaatcaatttcaacttttacttcacagtctcctgctgtagaggccccatacatacaaccggtgaatggagcatctctttcccttcttccttttcgtttgggaatgaagtcaaatctggaggccagagcagctcagacacctaaataggtacacagtatgcagtaagatgagattctgtttctggctcctcattcctatttccaataaatgaagcttctcaaccatgttattttcacctgcccaagctaaaacacaatcttcactgtccccatagctccaaagagggaaatcctgacataacatggggatgctgctagagtctttgccctctctgcaagctagactcgctactggcccttcccagagtgggccaagagaccaggcttattcctcagttggacatctgacctttcacaaaatagagttctcccctgggaggatgatgcctccagggcaataggaacacttttttgttagcttattactatctctatccaattctacaccacaaggcattcttgtgggtgtgaaaagctattgaggaatgaaatggccctgtgggctagacaggtgaaaagagaataaaatctcagcatgtgaaggtctaggaagagtgtcacttaaacttttaaaaaaaagccagacaaactgcaagtttactactttttttggagagctgaggtcacagggcagccaattagcctaaaaatctaaggactggaggaggcctatgaagaagcatgggacacaagcccttgcttacctggagcagatgtagccaacagaagaactcagcaggagtaggtaaagaattggtggcgaatgagtgaggactggtgagagtatggagaccctggggaatgcatatgtagagggagtttgcaccttcttggagacttttctccatggactccaccaggcactgtatcccaccagaaaagactggccaaagtcctgagaaagaatccctcacagtgcaggtatgggggaaagggaaaatagccactgcaaaggggcatgaaccccaccctttctcctttctagaaaaaaagccttaatctacaggagaaagggaaaaatactgtttcctttagtctactggcaaaacttagggaagaacagaacaaaatacctctctgtcccaaggaaggggcaggaatacagaaacaagaactaagaatgtattgccaataaatgtacttgagaagaaatgttaaagaagttcttcaggtaggagaaatgtgaaacaagatagaaatgcgtaactaaagacacaaaaatatgaagagcgctggaaattgattaaatgaaggtaaactaagatacatgtaaaatgtttaaatgatcctaaaagataaatgactgtcaagagtaaacatagtagcaatgtattatgtgtgtataggataggtaaaagtaaaatgtatcgtaacaatgatacaaaggttgggagggaggaattgaggagaaattattttaagatccttacattatgaatgaagcagtatattatttgaaggtaaactctgatcaattaaagatgtattgtgtaaatgctaggacaacaactaaaaaatttctcaactataaatcaaataatggagataaaatgcaatcataaaaaagtgttcataagagtagaagtcaatgaaattgaaaaacagaaaaacaataaagtcaataaaaccaaaacctatttcttataaaatatcaataaaattgataagcctttagccagactgacaaaaaatagaggagatacaaattaccaatatcaggaatgaaagagggaaactactacagatcccatagacaataacaagataataagggaatgctataaacaactctatgaccatacattggacaacacagatgaatgaattaatttcttaaaagatacaaatgatcaaaactcaccccagaagaaatatacaattttaatagtgatatatattaaagaaattgaattgtacttataagcctctgaaatattcaacagttaacaaacaagaataggtctagatatttcaatggaaaattctaccagacatttaaagaggaactatcactaattatatacgatatattctagaaaataaaagagggggtaacatctcaattcattttatgaagccagcattaccctgatatcaaggcagataaagacagtttcgaaacctatagaccagtatctctcatgagcattgatgcagaaatactcaacaaaatattagaaattatgaaaagaagaatacaacatgaacaaatgggttatgctgggaaagcaagtttgattttttaaattaatttttaaataataaaataattattccattatattaacagcgtaaagaagaaaagctgcatgattatattaatttatgcagaaaaggcatttgacaaaagtcagcattcattcatgatagttattctcagcaaaataggaattggaaatttcctcaagctgataaagggcatctaaaaaaatgaaaacaaaaaacaaccctacagctaatattatacctaatgctgaaagactgaatgttttctcctaatattaggagataagaatatcctctcataccactcctgttcaacattttactgaaaggcctagccagtgcaataaggcaataaaaagaaatatagaacatacagattggaaatgaaaaaaatgaaatagtccctactcactgacaataggattgtttatgtaaaaaaaaaaaaaaatcccaaaccatcaccaaaaaacccgacctaattaatatgtgaattcttaatcatgacatgttatgaatgtccagttttccatgtgtgtgtgtttgtgtgtgtgtttgtgtttgtgtgtgtatttatggagttatcattcttgctttctgactatccagcattcaaacattatcagtattggaggagaatctcaaaatatatgtctttaccagcaagctaaagggaccagatagatatttcttctctctatttcatgggaggtataactatatgactgagtcttgaccgatcaggtgctcccatgctgggctcaaatttcaaggaagtaatgaaattatacaggtggctgttggagatttctcatgaggacagctgaatcaggagtccctcaatgcagaggtttgtgtccggggatggtgggattttgtttataacactaccaggctggaccatgatatgagctggctgtgttcttggttgcctcaccaccctttgttcctgccctgttgccgaccctagttcaccagccttattgttgagtctataagctaccttctaataaggctattttctacctgatatccagagtttattccttctgttgttatcaacaatgtgtgtgtgtgtgtgcatgcgcgcatgtgtgtgtgtgtgtatgtattaaaaaatgggaatggcattatactgcttatattgtcctgttactttattacttaaacatatatactgtcaacatttttccatgtccatgatgttgctctatttaatcattttaattattgcctggcattaacttatagggatttattgtaatctgtttaaccaatctcccatgactggacatttaggttgcttctaacatttatttataataaacaacactgctatgcatatctatacatataaatcttttggattttaactaattatttccttaaagttctagatgtagaattgctatatcaaagggtaggtacgtttttcaggtttttgattcatactgccaaatttcttaacctctccctcaaaaaacttgtgacaatttatactaccatcagtcatatgcctttatgacaatgttgatttccaggcatactaccaacttagattattatctttgtgaaatttttgagttattacttatgttcagtgactttgtaaatatttgttagctgtttgtgattattgctttgtgagtgactgctattgtcttttgttcataattcttttgagggaaaggaacatactttttatttaatttataagagctcataattttatttatatttatatatataagtatatatatatatatgtgtgtatatatatatatgtgtgtgtgtatgtatatatatatatatatatatatatatatatatgtgtgtgtgtgtgtgtatatatatataattttttttttgagatggagtctctgtctgtcacccaggctggagtgcagtggcatgatctcagctcattgcaacctccacctcccaggttcaaatgattctccttttatattaaggcatctatctgtctaacatctgtggatctatacatcatatatattaaggtataatggccatgtatattgctattttcccccaatttttatttgtgtttttgctttgtttattctattctgaattttttccccatttgtatatagtctattaaacaatgctttatagtttctgtctttggttgatacttcaaaataactttcccgtcccaaaatggtaacagtatttacattttttactggtactcttatgtgtttttttttaataaaataatcatatagaactaattttgttttaaggtacgaggtactagctaacattttcttcagagttactaaattcttaagtatgtttgaatttgtgaactctgtatttctgaacttttcttaatgtctccttaatctatgctagggctaaattactcaattaattaaacaatttcaagatttcagaagttttaatatttaatgagaagtcttcagccttggggtagaatgttgttgcttgttacttagtgctggggagtcaggggtgcgcttgatcctagtacactctcaggctttggcaggccctgtatgcctggatcttaggagtaaggctttctcagaaatcctgcccctcctcctcctcctcctgtggcagctgaaccctgccttgtgtcatgtgcaggagagaatgtctggatctggggctcaggactgtttcttgcccgttccccagggatcaagggtgttttggctttccccttccccaagctgcagtaggtcttcacctgtgccctgactgcaacaggctgtactgtccctccccagtggcttaggtgggaggagggtgtggctgtagccttatgcctttccttcagcaatgttgcccctctttcctgggcctgcactgtgcagggaggcttctttgctctcccaccctgccttcagtcctttctcaatcagtaggtggaagggagtggagaagagcctgcaagtgggcaccaattcctcttgtgtctgcagcccccaggggtgctacactcatgctagtctgcttctggcctttagtaatttgttaaaagctttagatgaattctttttatgtttttgtatggcacccagtgtttcttcccatactcagccacatctcttcttggggacgcagcctttccttagatttcaggcttttgggttccgtgtgatctcagctttctggtggactcaagaaaaggtatgggtttttggtcatctgactttattgttgttgttagggtgggagagacactattttaagctttctttatagtaagcaggaggggaactcctgtgttttcatagctaatcaagcatggaccctgcccttattctctttttaaaaattttcttggctattctcacatatctgttctcttaaatatactttagaatcatttgctcaagtacctcaaacccaaacacctccaaaagaattccttttggattgacatggtatcaaaatatgtaaactgacttcagtcccagatgttgtcgaaacttcattcccaagatctgaatagagcagtcagagcggattgtgattgaaagaccacctccaaggccagcctgcctctaaatcccacctgttttgttttggtgtcttgaaattccagcattagagtgcagaaaaatagttctaggaccttagaggatgaaaatgtatgcagtttgtgttggaaggaccagcataataactaatgtgcaaccatcactgcacttacaaattaaggtcacagatctagacaaagtattgtgtgaattaagtgagtcagtgagtgagtgagtatggagagggactctgttaagaacaggggagctagaggggaaatgactggatctggaactgagagcacccgagtagctgagaatgcggactctaaatcttctggggacaagaggagaggagcaaaagccccacagccacctctgtggttgtcacacttcaatctggcagctagagaaaagcccgaaccaggccaggtaaggctcccctcaaggactatgtagattgtgtgctacaggcaaaaaaggggaaaaccctccaagaggatccagcagtgatcacagctattgatttgtactcccacggcccttgcggccatgcatctcttaaaatcaaatgaaacaaccatcaacaattgtggtaagaattttccagtaggagaaatagagaaaggaaaaaaaattctgagaaaacaaaacaaaacccttcttgatgttttccacagactgctttagaaagagaaagactgatgcaatccaatcaaggacagtgatcctcggttgacccaggatatttcacagacccagaatgcagaaggcacagacgcccacaagcaggcctcagttttgacttcttaaatgcaaccattttttgtaaattaatattgaattttcaaccaactccagcacctcattaaggaggggcctgttctttgccaaactcttccaagggaacctgctgggtttgagtgtaggtgtcagcaaacatttcccagtatgttctaatggggaaatatttattttgtaacactccttcctaaccgaaaatacaattatgtgacatgttttatatgaccaaggggatttgggctaagattttgtatccataatgtgccctaatattgagaaatatcatttttaaagtattctctttggcattgacagggggctacattctggaaaaatagcacttcatgggaatttccctttagccctgagaaaaaatagtttgggaacacataacagtatatttggtttgggatgttaaatcctgcagggtctctgaaagaggcaaatgggtgtgagaaagaattagttactgcaagtttatttcataatggcctataaaaaatatacgtgttccatttctaaagctgctatgcccttactatagctatagctattttttaaaacaagaaagactttccacaagtcattttctactttgggtgggataacatttagagcaaggtataaaggacctttgccagagtaattaccatttaaggcaaaggtctccaagattttacttggagctgaagatcttggcgcagccctggctctgtggaacaccacacacatccagtgaccatgggaaagctggctccctgctgggtagtgctgcagcattagtacaagtctcatgctctgaagggtgaaatgtgatgatctgctaagtgaaggctctgtcaggagaagccagaggagtggtaacagctcaccaaaccaaaatccatgaagtcccagccctttttcatcgtcaccatttttgcatatagaacatgtccctatggggacatccagggagtgggtgccaggactcagtgtgcccagcccaaggccaaagagagtttattagcagaaggatcacttacatgatttggaaccacaggagagagagatgtgtggtggctgaaagcagaacttgggctaatgtttataagagagaccagccaagaagcctatgcattaattagtgttctgctggttgttctgttaggaggcatcattcatcacttaaaataagaccttttatttatttatttattatactttaagttctagagtacatgtgcacaatgtgcaggtttgttacatatgtatacatgtgccatgttggtgtgctgcacccattaactcatcatttacattaggtatatctcctaatgctatccctccccccaccggccacccaaagacaggccccagtgtgtgctgttccccatcctgtgtccaagtgttgtcattgttcacctctcacgtatgagtgagaacatgcggtgtttggttttctgtccttgcaatagtttgctcagaatgatggtttccagcttcatccatgtccctacaaaggacatgaactcatccttttttatggctgcatagtattccatggtgtatatgtgccacattttcttaatccagtatatcactgatggacatttgggttggttccaagtctttgctattgtgaatagtgcctcaataaacatatgtgtgcatgtgtctttatatcagcatgatttatattcctttgggtatatacccagtaatgggatggctgggtcaaatggtatttctagttctagatccttgaggaatcgccacactgccttccacaatggttgaactagtttacagtcccaccaacagtgtaaaagtgttcctatttctccacatcctctccagcacctgttgtttcctgactttttaatgatcgccattctaactggtgtgagatggtatctcatggtggttttgatttgcatttctctgatggccagtgatgatgagcattttttcatgtctgttggctgcataaatgtcttcttttgagaagtgtctgttcatatcctttgcccactttttgatggggttgtttgattttttcttgtaaatttgtttaagttctttgtagattctggatattagccctttgtcagatgggtagattgtaaaaattttctcccattctgtaggttgcctgttcactctgatggtagtttcttttgctgtgcagaagctctttagtttcattagatcccatttgtcaattttggctttggttgccattgcttttggtgttttagtcatgaagtccttgcccatgcctatgtcctgaatggtattgcctaggttttcttctatggtttttatggttttaggtctaacattcaagtctttaatccatcttgaattaattttagtataaggtgtaaggaatggatccagtttcagctttctacatgtggctagccagttttcctagcaccatttattaaatagggtatcctttccccatttcttgtttttctcaggtttgtcaaagatcagatggttgtagatgtgtggtattatttctgagggctctgttctgttccattcatctatatctgttttggtaccagtaacgtgctgttttggttactgtagcctcgtagtatagtttgaagtcaggtagtgtgatgcctccagctttgttcttttggcttaggattgtcttggcaatgtgggctcttttttggttccatatgaaccttaaagtagttttttccaattctgtgaagaaagtcacagatggcattgatggggatggcattgaatctatacattaccttgggcagtatggccattttcacaatattgattcttcctacccatgagcatggaatgttcttccatttgtttgtgtcctcttttatttcgttgagcagtggtttgtagttctccttgaagaggtccttcacatcccttgtaagttggattcctaagtattttattctctttgaagcaattgtgaatgggagttcactcatgatttggctctctgtctgtttttggtgtataagaatgcttgtgatttttgcacattgattttgtatcctgagactttgctgaagtcgcttatcagtttaaggaggttttgggctgagatgatgaggttttctaaatatacaatcatgtcatgtgcaaacagagactatttgacttcctcttttcctaattgaataccctttatttcttctcttgcctgattgccctggccagaacttccaacactatgttgaataagagtggtgagagagggcatccctgtcttttgccagttttcaaagggaatgcttccagtttttgcccattcagtatgatattgactgtgggtttgtcataaatagctcttattattttgagatacatcccatcaatacctagtttattgagagtttttagcatgaaggggtgttgaattttgtcggaagccttttctgcatctattgagataatcatgtggtttttgtctttggttctgtttatttgatggattatgattattgatttgtatatgttgaaccagccttgcatcccagggatgaagcccacttgatcatggtggataagctttttgatgtgctgctggattcagtttgccagtattttattgaggatgtttacattgatgttcatcagggatattggtctaaaattctcttttgttgttgtgtctctgccaggctttgttatcaggatgatgctagcctcataaaatgagttagggaggattccctctttttctattgattggaatagtttcagaaggaatggtaccagctcctccttgtacctctggtagaatttggctgtgaatgcatctggtcctggactttttttggttggtaggctcttaattattacctcaatttcagagcctgttattgatctattcagggatccaacttcttcctggtttagtgttgggagggtgtatgtgtcaaggaatttatccatttcttctagattttctagtttatttttgtagaggtgtttatagtattctctgatggtagtttgtatttctgtgggatcggtggtgatatcccctttatcattttttattgcatctatttgattcttctctcttctttattagtcttgctagtggtctatcaattttgttgatcttttcaaaaaaccagctcctggattcattgatttgttgaagggttttttgtgtctctatctccttcagttctgctctgatcttagttatttcttgccttcggctagcttttgaatgtgtttactcttgcttttctagctcttttaattgtgatgttagggtgtcaattttagatctttcctgctttctcttgtgggcatttagtgctataaatttccctctacacactgctttgaatgtgtcccagagattctgttatgttgtgtctttgttctcattggtttcaaagaacatctctatttctgcctccatttcattatgtacccagtagtcattcaggagcaggttgttcagtttccatgtatttgaggggttttgagtgagtttcttaatcctgagttctagtttgattgcactgtggtctgagagacagtttgttataatttctgttcttctacatttgctgaagaatacgttacttccaactatgtggtcaatcctggaataagtgcactgtggtgctgagaagaatgtatattctgttgatttggggtggagagttctgtagatgtctattaggtccacttggtgcagagctgagttcaattcctggatatccttgttaactttctgtctcatggatctgtctaatgttgacagtgggatgttaaagtctcccattattattgtgtgggagtctaagtctctttgtaggtctctaaggacttgctttatgcatctgggtgctcctgtatggtgcatatatatttaggatagttagctcttcttgttgaattgatccctttaccattatgtaatggccttctttgtctcttttggtctttgttggtttaaagtctgttttatcagagactaggattccaaccccagcttttttttggttttccatttgcttggtagatcttcctccatccctttattttgagcctatgtgtgtctctgcacatgagatgggtctcctgaatatagcacactgatgagtcttaactctttatccgatttgccagtctgtgtattttaatcggagcatttagcccacttacatttaaggttaatattgttatgtgtgaatttgatcctgtcgttatgatgttagctggttattttgctcgttagttgatgcagtttcttcctagcatcgatggtctttgcaatttggcatgtttttgcaatggctggtaccggttgttcctttccatgtttagtgcttacttcaggagctcttataaggcaggcctggtggtgacaaaatctctcagcatttgcttgtctgtaaagtattttatttctccttcacttatgaagcttagtttggctggatactaaattctgggttgaaaattcttttctttaagaatgttgaatattggcccccactctcttctggcttgtagagtttctgctgagagatcagctgttagtctgatgggcttccctttgtgggtaacccgacctttctctctggctgcccttaacattttttccttcatttcaactttggtgaatctgacaattatgtgtcttggagttgctattctcaaggagtatctttgtggtattctctgtgtttcctgaatttgaatgttggccttccttgctaggttgggggagttctcctgaataatatcctgcagagtgatttccaacttggttccattctccctgtcactttcaagtacaccaatcagatgtagatttggtcttttcgcatactcccatatttcttggaggctttgttcatttctttttactcttttttctctaaacttctcttctcacttcatttcattcatttgatcttccgtcactgataccctttcttccccttgatcgaatcagctactgaagcttgtgcatgcatcacgtagttctcgtgccatggttttcagcaccatcaggtcatttaaggtcttcctatgctgtttattctagttagcctttcatctaatcttttttcaagtttttagcttctttgcgatgggttcgaacatcctcctttagctcggagtagtttgttattaccgatcatctgaagccttcttctctcaactcatcaaagcctttctccatccagctttgttctgttgctggcaaggagctgcgttcttttggaggagaagaggcactctgatttttagaattttcagcttttctgctctggttt

SEQ ID NO: 10282 - DNA, 10907 bp, Homo sapiens
attttctttttttttaattttttatttatttatttttttttattacactttaagttttagggtacatgtgcacattgtgcaggttagttacatatgtatacatgtgccatgctggtgtgctgcacccactaacgtgtcatctgtcattaggtatatctcccaatgctatccctcccccctcccccgaccccaccacagtctccagagtgtgatattccccttcctgtgtccatgtgatctcattgttcaattcccacctatgagtgagaatatgcggcgtttggttttttgttcttgcgatagtttactgagaatgatggtttccaatttcatccatgtccctacaaaggacatgaactcatcattttttatggctgcatagtattccatggtgtatatgtgccacattttcttaatccagtctatcattgttggacatttgggttggttccaagtctttgctattgtgaataatgccacaataaacatacgtgtgcatgtgtctttatagcagcatgatttatagtcatttgggtatatacccagtaatgggatggctgggtcaaatggtatttctagttctagatccctgaggaatagccacactgacttccacaatggttgaactagtttacagtcccaccaacagtgtaaaagtgttcctatttctccacatcctctccagcacctgttgtttcctgacattttaatgattgccattctaactggtgtgagatgatatctcatagtggttttgatttgcatttctctgatggccagtgatgatgagcattttttcatgtgttttttggctgcataaatgtcttcttttgagaagtgtctgttcatgtcctttgcccactttttgatggggttgtttgtttttttcttgtaaatttgtttgagttcactgtagattctggatattagccctttgtgagatgagtaggttgcgaaaattttctcccatgttgtaggttgcctgttcactctgatggtagtttcttttgctgtgcagaagctctttagtttaattagatcccatttgtcaattttgtcttttgttgccattgcttttggtgtattggacatgaagtccttgcccatgcctatgtcctgaatggtaatgcctaggttttcttctagggtttttatggttttaggtctaacgtttaaatctttaatccatcttgaattgatttttgtataaggtgtaaggaagggatccagtttcagctttctacatatggctagccagttttcccagcaccatttattaaatagggaatcctttccccattgcttgtttttctcaggtttgtcaaagatcagatagttgtagatatgtggcattatttctgagggctctgttctgttccattgatctatatctctgttttggtaccagtaccatgctgttttggtgactgtagccttgtagtatagtttgaagtcaggtagtgtgatgcctccagctttgttcttttggcttaggattgacttggagatgcgggctcttttttggttccatatgaactttaaagtagttttttccaattctgtgaagaaagtcattggtagcttgatggggatggcattgaatctgtaaattaccttgggcagtatggccattttcacaatattgattcttcctacccatgagcatggaatgttcttccatttgtttgtgtcctcttttatttccttgagcagtggtttgtagttctccttgaagaggtccttcacatcccttgtaagttggattcctaggtattttattctttttgaagcaattgtgaatgggagttcactcatgatttggctctctgtttgtctgttgttggtgtataagaatgcttgtgatttttgtacattgattttgtatcctgagactttgctgaagttgcttatcagcttaaggagattttgggctgagacgatggggttttctagataaacaatcatgtcgtctgcaaacagggacaatttgacttcctcttttcctaattgaataccctttatttccttctcctgcctgattgccctggccagaacttccaacactatgttgaataggagtggtgagagagggcatccctgtcttgtgccagttttcaaagggaatgcttccagtttttgcccattcggtatgatactggctgtgggtttgtcatagatagctcttattattttgaaatacgtcccatcaatacctaatttattgagagtttttagcatgaagggttgttgaattttgtcaaaggctttttctgcatctattgagataatcatgtggtttttgtctttggctctgtttatatgctggattacatttattgatttgcgtatattgaaccagccttgcatcccagggatgaagcccacttgatcatggtggataagctttttgatgtgctgctggatttggtttgccagtattttattgaggatttttgcatcaatgttcatcaaggatattggtgtaaaattctcttttttggttgtgtctctgcccagctttggtatcagaatgatgctggcctcataaaatgagttagggaggattccctctttttctattgattggaatagtttcagaaggaatggtaccagctcctccttgtacctctggtagaattcggctgtgaatccatctggtcctggactctttttggttggtaaactattgattattgccacaatttcagagcctgttattggtctattcagagattcaacttcttcctggtttagtcttgggagagtgtatgtgtcgaggaatttatccatttcttctagattttctagtttatttgtgtagaggtgtttgtagtattctctgatggtagtttgtatttctgtgggatcggtggtgatatcccctttatcattttttattgtgtctatttgattcttctctctttttttctttattagtcttgctagtggtctatcaattttgttgatcctttcaaaaaaccagctcctggattcattgattttttgaagggttttttgtgtctctatttccttcagttctgctctgattttagttatttcttgccttctgctagcttttgaatgtgtttgctcttgcttttctagttcttttaattgtgatgttagggtgtcaattttggatctttcctgctttctcttgtaggcatttagtgctataaatttccctctacacactgctttgaatgtgtcccagagattctggtatgtggtgtctttgttctcgctggtttcgaagaacatctttatttctgccttcatttcattatgtacccagtagtcattcaggagcaggttgttcagtttccatgtagttgagcggctttgagtgagattcttaatcctgagttctagtttgattgcactgtggtctgggagatagtttgttataatttctgttcttttacatttgctgaggagagctttacttccaactatgtggtcaattttggaataggtgtggtgtggtgctgaaaaaaatgtatattctgttgatttggggtggagagttctgtagatgtctattaggtccgcttggtgcagagctgagttcaattcctgggtatccttgttgactttctgtctcgttgatctgtctaatgttgacagtggggtgttaaagtctcccattattaatgtgtgggagtctaagtctctttgtaggtcactcaggacttgctttatgaatctgggtgctcctgtattgggtgcataaatatttaggatagttagctcctcttgttgaattgatccctttaccattatgtaatggccttctttgtctcttttgatctttgttggtttaaagtctgttttatcagagactaggattgcaacccctgcctttttttgttttccattggcttggtagatctttctccatccttttattttgagcctatgtgtgtctctgcacgtgagatgggtttcctgaatacagcacactgatgggtcttgactctttatccaacttgccagtctgtgtcttttaattgcagaatttagtccatttatatttaaagttaatattgttatgtgtgaatttgatcctgtcattatgatgttagctggtgattttgctcgttagttgatgcagtttcttcctagtcttgatggtctttacattttggcatgattttgcagcggctggtaccggttgttcctttccatgtttagtgcttccttcaggagctcttttagggcaggcctggtggtgacaaaatctctcagcatttgcttgtctataaagtattttatttctccttcacttatgaagcttagtttgcctggatatgaaattctgggttgaaaattcttgtctttaagaatgttgaatattggcccccactctcttctggcttgtagggtttctgccgagagatccgctgttagtctgatgggctttcctttgagggtaacctgacctttctctctggctgcccttaacattttttccttcatttcaactttggtgaatctgacaattatgtgtcttggagttgctcttcttgaggagtatctttgtggcattctctgtatttcctgaatctgaacgttggcctgccttgctagattggggaagttctcctggataatatcctgcagagtgttttccaacttggttccattctccccatcactttcaggtacaccaatcagacgtagatttggtcttttcacatagtcccatatttcttggaggctttgctcatttcttttgattcttttttctctaaacttcccttctcgcttcatttcattcatttcatcttccattgctgataccctttcttccagttgatggcatcggctcctgaggcttctgcattcttcacgtagttctcgagccttggttttcagctccatcagctcctttaagcacttctctgtattggttattctagttatacattcttctaaatttttttcaaagttttcaacttctttgcctttggtttgaatgtcctcccgtagctcagagtaatttgatcgtctgaagccttcttctctcagctcgtcaaaatcattctccatccagctttgttccgttgctggtgaggaactgcgttcctttggaggaggagaggcactctgctttttagagtttccagtttttctgttctgttttttccccatctttgtggttttatctacttttggtctttgatgatggtgatgtacagatgggttttcggtgtagatgtcctttctggtcgttagttttccttctaacagacaggaccgtcagctgcaggtctgttggaataccctgcagtgtgaggtgtcagtgtgcccctgctggggggtgcctcccagttaggctgctcgggggtcaggggtcagggacccaattgaggaggcagtctgcccgttctcagatctccagctgcgtgctgggagaaccactgctctcttcaaagctgtcagacagggacacttaagtctgcagaggttactgctgtctttttgtttgtctgtgccctgcccccagaggtggagcctacagaggcaggcaggcctccttgagctgtggtgggctccacccagttcgagcttcccggctgctttgtttacctaagcaagcctgggcaatggcgggcgcccctcccccagcctcgttgccgccttgcagtttgatctcagactgctgtgctagcaatcagcgagattccgtgggcgtaggaccctctgagccaggtgtgggatatagtctcctggtgcgccgtttttcaagccggtctgaaaagcgcaatattcgggtgggagtgacccgattttccaggtgccgtctgtcacccctttctttgactcggaaagggaactccctgacccttgcgcttcccaggtgaggcaatgcctcgccctgcttcggctcgcgcacggtgcacgcacacactggcctgcgcccactgtctggcactccctagtgagatgaacccggtacctcagatggaaatgcagaaatcacccgtcttctgcgtcgctcacgctgggagctgtagaccggagctgttcctattcggccatcttggctcctcccttctctctgtttgtcttttattggtgtatatgaatgcttgtgattttttgcacattgatattgtatcctgaggtgctgaagttgcttatcagcttaaggagattttgggctgggacaatagagttttctaaatatacaatcatgtcatctgcaaacagagacaatttgacttcctcttttcctaattgaacaccctttgtttctttctcttgcctgattgccctggccagaacttccaatactatattgaataggagtgatgagagagggcatccttgtcttgtgccagttttcaaagggaatgcttccagtttttgcccattcagtacgatattggctatgggtttgccataaacagctcttattgagatacgttcaatcagtgcctactttattgagaattttttaggatgaagggtgttgaatttttgttgaaggacttttctgcatctgttgaaataatcacgtgctttttgtcattggttctgtgtatgtgatggattacatttattgatttgcatatgttgaaccagccttgcatcccagggatgaagccaccttgatggtggtgcataagctttttgatgtgctgctggatttggtttgccagtattttattggggattttcgcatcgatgttcatcagggatactggcctgaaattttctttttttgttgtgtctctggcaggttttggtatcaggatgatgctggccttgtaaaatgagttagggaggatcccctctttttctattgtttgaaatggtttcagaaggaatggtaccagctcctctttgtacctctggtagaatttggcagtgaattcatctggttctggactttggtaggctattaattactgcctcaatttcagaagttgttattggtctattcagggattcgacttcttcctggtttagtcttgggagggtgtatgtgtccaggaatttatccatttcttctagattttctggtttatttgcatagaggtgtttatagtattctctgatggtagtttgtatttctgtgggatcagtggtgatatcccctttatcattttttattgcatccatttgattcttctctcttttctttattagtctggctagcagtctatccattttttgatcttttcaagaaaccagctcctggattcattgatttttttttttttgaagggtttttcatgtctctatctccttcagttctgctctgatcttagttatttcttgtcttctgctatcttttgaatttgtttgctcttgcttctctagttcttttaattttgatgttagggtgtcgattttagatcttttctgctttctcttgtgggcatttagtgctataaatttccctctacacagtgctttaaatgtgtcccagagattgtacgttgtgttgttagttctcattggtttcaaagaacatctttgtttctgccttcatttcgttttttacccagtagtcattcaggagcatgttgttcaatttccatgtagttgtgcagttttgagtgagtttcttaatcctgagttctaatttgattgcactatggtctgagagactgtttgttatgatttccattcttttgcatttgctgaggagtgttttacttccaattatgtggtccattttagaataagtgcgatgaggtgctgagaagaatgtatattcttctgatttggggtagagagttctgtagatgtttattaggtctgcttgttccagcgctgagttcaagtcctggatatccttgctaattttctgtctcattgatgtgtctaatattgacagtggggtattaaatctcccactattattgtgtgggagtgtaagtctctttgtggatctctaagaacttgccttatgaacttggatgctcctgaatggtgtgcatatatatttaggatagttggctcttcttgttgcattgatccctttaccattaggtaatggccttctttctcttttgatctttgttggtttaaagtctgttttgtcggagactaggattgcaacccctgctttttttttttttctttctatttgcttggtaaatcttcctccatccctttattttaagcctatgtttgtctttgcatgtgaggtgggtctcctgaatacagccactgatgggtcttgacgcttatccaatttgccagtctgtgtcttttaattagggaatttatcacatttacatttaaggttaatattgttatgtgtgaatttgattctgtcattatgatgctaactggttattttgcctgttagttgatgttgtttctttatagtgttgatggtctttacaatttggtatgtttttgcagtggctggttccagttgttcctctccatgtttagtgtttccttcaggagctcttgtaaggcaggcctggtggtgacaaaatctctcggcatttgcttgtctgtaaaggagtttatttctccttcacttacgaaactgagtttgcctggatatgaaattctgggttgaaaattcttttaagaatgttgaatattggcccccactctcttctagcttgtaaggttcctgcagagagatctgctgttggtctgatgggcttccctttgtgggtaacctgacctttctctctggctgcccttaacaatttttccttcatttcaactttggtgaatctgatgattatgtgtcttggggttgctcttctcaaggagtatctttgtggtgttctctgtatttcctgaatttgaacgttggcctgtcttgctaggttggggaacttctcctggatgatatcccgaaaagtgttttccaacttggttccattctctccatcactttcaggtacaccaatcagaggtggatttgatcttttcacatagtcccatatttcttggaggctttgtttgatccctttcatccttttttctctaatcttgtcttctcacttcatttcattaagttgatcttcactttctgatatcctttcttctgcttgattgattcagctatttatagttgtgtatgcttcacagaattctcatgctgtgtttttcagctccatcaggtcatttatgttcttctcgaaactggttattccagttagcaattcgcgtaaccttttttcaaggttcttagcttccttgcattgggttagaacatgctgctttagctcagaggagtttgttattacccactttctgaagcttacttctgtcgagtcatgaaactcattctccatccatttttgttccattgctggtgaggagttgtcatccttgagaagaggtgttcaggtttttggaattttcagcctttttgcgcgggtttctccccatcttagtgaatttatctaccgtcggtctttgtagtcagtgaccttcggatggggtctctgagtagatgtgctattcctattttttagtttttttttcttttttttttgtgacagagtctcattctgttgcttacgctggagtgcagtggtgcaatcatggctcactgcaagctccacctcctgggttcatgccattctcctgcctcagcctcctgagtagctgggactacaggcacccaccaccacgcctgcctaattttttgtgtttttactagagacgggtttcactgtgttagccaggatggtctcaatctcctgaccttgtgatctgccctcctcggcctcccagagtgctgggattacagccgtgagccactgcacctggcctagttttccttctaacaggaccctgtgctgcaggtctgttggagtttgctggaggtccactccagaccctgtttgcctggatatcaccagaggaggctgcagaacagcaaagactgctgcgtgttgtttcctctggaacctttgtctcatacgggcacctgccagatgccagccagagctctcctgtatgaggtaggtctgttggcccctactgggagctgtctcccagtcagtacacatgggtgtcagggacccacttgaggaggcagtctgatccttagcagagcttgaacgttgtgctctcttcagagccagtaggcagggacgtttaagtctgctgaagctgcacctacaaccgccccttccgccagatgctctgtcccagggagatgggggttttatctatatgtttgggggtactgcctttttttttcagtgatgcccttgccagagaggaggaatctatagaagcagtctggccacagaggccttgctgagctgcagtgggctccacccagtttgaacttcccggtggctttgtttacactgtcagggtaaaactgcctacttaagcctcagcactggttgacaccccttcccccaccaagcttgagcatcccaggttgacctcagactgttgtgctggcagcaagaacttcaagttgtggatcttagcttgctggactccgtgggggttggacccaccaagccagaccacttggctccctgccttcggccccttttccagggaagtgaatggttctgtctcactggtgttctggcaccactgaggtatgggaaaaaaaaaaacaacacaaaactcctgcagctagctcagggtctgcccaaatggctactcagttttgtgcttgaaacccaggacactggagggtatcttctggtctgtgggttgcaaagactgtgggaaaagcacagtgtctgggccagagtgcactgttcctcatggcacagtccctcacagcttcccttgggtaggggagagaatttcctgaccccttgcacttcctgggtgaggcgacaccccacaccccaccttagctggaaatgtggaaaaatcacctgccttctgtggcgatctcgctgggagctgcatactggagctgttcctatttggccatcttg

SEQ ID NO: 10283 - DNA, 6943 bp, Homo sapiens; identical to SEQ ID NO: 9388

SEQ ID NO: 10284 - DNA, 5251 bp, Homo sapiens
atttatttatttattttttaatttattattattatactttaagttttagggtacatgtgcaaaatgtgcaggttagttacatatgtatacatgtgccatgctggtgcgctgcacccactaactcatcatctagcattaggtatatctcccaatgctatccctccccccttcccccaccccacaacagtccccagagtgtgatgttccccttcctgtgtccatgtgttctcattgttcaattcccacctatgagtgagaatatgcggtgtttagttttttgttcttgcgaaagtttactgagaatgatgatttccaatttcatccatgtccctacaaaggacatgaactcatcattttttatggctgcatagtattccatggtgtatatgtgccacattttcttaatccagtctatctttgttggacatttgggttggttccaagtctttgctattgtgaataatgccgcagtaaacatacgtgtgcatgtgtctttatagcagcatgatttatagtcctttgggtatacacccagtaatgggatggctgggtcaaatggtatttctagttctagatccctgaggaatcgccacactgacttccacaatggttgaactagtttacagtcccaccaacagtgtaaaagtgttcctgtttctccacatcttctccagcacctgttgtttcctgactttttaatgattgccattctaactggtgtgagatgttatctcactgtggttttgatttgcatttctctgatggccagtgatggtgagcattgtttcatgtgttttttggctgcataaatgtcttcttttgagaagtgtctgttcatgtccttcgcccactttttgatggggttgtttgtttttttcttgtaaatttgtttgagttcattgtagattctggatattagccctttgtcagatgagtaggttgcgaaaattttctcccattttgtaggctgcctgttcactctgatggtagtttcttttgctgtgcagaagctctttagtttaattagatcccatttgtcaattttggcttttgttgccattgcttttggtgttttagacatgaagtccttgcccatgcctatgtcctgaatggtaatgcctaggttttctcctagggtttttatggttttaggtctaacgtttaagtctttaatccatcttgaattgatttttgtataagatgtaaggaagggatccagttttagctttctacatatggctagccagttttcccagcaccatttattaaatagggaatgctttccccattgcttgtttttctcaggtttgtcaaagattagatagttgtagatatgcggcgttatttctgagggctctgttctgttccattgatctatatctctgttttggtaacagtaccatgctgttttggttactgtagccttgtagtatggtttgaagtcaggtagtgtgatgcctccagctttgttcttttggcttaggattgacttggcgatgcgtgctcttttttggttccatatgaactttaaagtagttttttccaattctgtgaagaaagtcattggtagcttgatggggatggcattgaatctgtaaattaccttgggcagtatggccattttcacgatattgattcttcctacccatgagcatggaatgttcttccatttgtttgtatcctcttttatttccttgagcagtggtttgtagttctccttgaagaggtccttcacatcccttgtaagttggattcctaggtattttattctctttgaagcaattgtgaatgggagttcactcgtgatttggctgtttgttgttggtgtataagaatgcttgtgatttttgtacattgatttttgtatcctgagactttgctgaagttgcttatcagcttaaggaaattttgggctgagacaatggggttttctagatatacaatcatgtcatctgcaaacagggacaatttgacttcctcttttcctaattgaataccctttatttccttgtcctgcctaattgtcctggccagaacttccaacactatgttgaataggagtggtgagagagggcatccctgtcttgtgccagttttcaaagggaatgcttccagtttttgcccattcagtatgatattggctgtgggtttgtcatagatagctcttattattttgagataggtcccatcaatacctaatttattgagagtttttaccatgaatggttgttgaattttgtcaaaggccttttctgcatctattgagataatcatgtggtttttgtctttggttctgtttatatgctggattacatttattgatttgcgtatattgaaccagcctttgcatcccagggatgaagcccagttgatcatggtggataagctttttgatgtggtgctggattcggtttgcgagtattttattgaggatttttgcatcaatgttcatcaaggatattggtctaaaattctctttttttggttgtgtctctgcctggctttggtatcaggatgatgctggcctcatgaaatgagttagggaggatcccctctttttctattgactggaatagtttccgaaggaatggtaccagttcctccttgtacctctggtagaattcggctgtgactccatctggtcctggactctttttggttggtaagctattgattattgccacaatttcagctcctgttattggtctattcagagattcaacttcttcctggtttagtcttgggagtgtgtatgtgtcgaggaatttatccatttcttctagattttctagtttatttgcgtagaggtgtttgtagtattctccgatggtagtttgtatttttgtgggatcggtggtgataatcccctttatcattttttattgtgtctatttgattcatctctctttttttctttattagtcttgctagcagtctatcaattttgttgatcctttcaaaaaaccagctcctggattcattaattttttgaagggctttttatgtctctatttccttcagttctgctctgattttagttatttcttgccttctgctagcttttgaatgtgttttctcttgcttttctagttcttttaattgtgatgttagggtgtcaattttggatctttcctgctttctcctgtgggcatttagtgctataaatttccctctacacactgctttgaatgcgtcccagagattctggtatgttgtgtctttgttctccttggtttcaaagaacatctttatttctgccttcatttcgttatgtacccattagtcattcaggagcaggttgttcagtttccatgtagttgagtggttttgagtgagtttcttaatcctgagttctagtttgattgcactgtggtctgagagatagtttgttataatttctgttcttttacatttgctgaggagagttttacttccaagtatgtggtcaattttggaataggtgtggtgtggtgctgaaaaaaatgtgtattctgttgatttggggtggagagttctgtagatgtctattaggtctgcttggtgcagagctgagttcaattcctgggtatctttgttgactttctgtcttgttgatctgactaatgttgacagtggggtgttaaagtctcccattattaatgtgtgggagtctaagtctctttgtaggtcgctcaggacttgctttatgaatctgggtgctcctgtattgggtgcatatatatttaggatagttagctcttcttgttgaattgatccctttaccattatgtaatggccttctttgtctcttttgatctttgttggtttaaagtctgttttatcagaggctaggatcacaacccctgccttttttttgttttccatttgcttggtagatcttcctccatccttttattttgagcctatgtgtgtctctgcacgtgagatgggtttcctgaatacagcacactgatgggtcttgactccttatccaatttgccagtctgtgtcttttaattggagcatttagtccatttacatttaaagttaataatgttatgtgtgaatttgatcctgtcattatgatgttagctggttattttgctcgttagttcatgcagtttcttcctagtctcgatggtctttacattttggcatgattttgcagcggctggtaccagttgttcctttccatgtttagtgcttccttcaggagctcttttagggcaggcccggtggtgacaaaatctctcagcatttgcttgtctgtaaagtattttatttctcctttacttatgaagcttagtttggctggatatgaaattctgggttgaaaattcttttctttaagaatgttgaatattgtcccccactctcttctggcttgtagggtttctgccgagagatccgctgttagtctaatcggcttccctttgtgggtaacccgacctttctctctggctgcccttaatattttttccttcatttcaactttggtgaatctgacaattatgtgtcttggagttgctcttctcgaggagtatctttgtggtgttctctgtatttcctgaatctgaacgttggcctgccttgctagactggggaagttctcctggataatatcctgcagagtgttttccaacttggttccattctccccgtcactttcaggtacaccaatcagatgtagatttggtcttttcacatagtcccatatttcttggaggctttgctcgtttctgtttgttcttttttctctaaacttcccttctcgcttcatttcattcacttcatcttccatcactgataccctttcttccagttgatcacatcggctcctgaggcttctgcattcttcacatagttcttgagccttggttttcagctccatcagctcctttaagcacttccctgtattggttattctagttatacattcttctaaacttttttcaaagttttcagcttctttgcctttggtttgaatttcctcccgtagctcggagtaatttgatcgtctgaagccttcttctctcagctcgtcaaagtcattctccgtccagctttgttccgttgctggtgaggaactgcgttcctttggaggaggagaggcgctctgctttttagagtttccagtttttctgctctgttttttccccatctttgtggttttatctacttttggtctttggtgaccgtgatgtacagatgggtttttggtgtggatgtcctttctgtttgttagttttccttctgacagacaggaccctca

SEQ ID NO: 10285 - DNA, 6169 bp, Homo sapiens
ttcttctttttattttattttattattattatactttaagttttagggtacaagtgcacaacgtgcaggttagttacatatgtatacatgtgccatgctggtgtgctgcacccattaactcatcatttagcattaggtatatctcctaatgctatccctccccctaccccccaccctacaaccatccctggtgtgtgatgttccccttcctgtgtccatgtgttctcattgttcaactctcacctatgagtgagaacatgcggagtttggtttttggtccttgcaatagtttgctgagaatgatggtttccagcttcatccatgtccctaaaaaggacatgaacttatcgttttttatggcgcatagtattccatggtgtatatgtgccatattttcttaatccagtctatcgttgatggacatttgggttggttccaagtctttgctattgtgaatagtgctgcaataaacatacgtgtgcatatgtctttatagcagcatgatttatagtcctttgggtatatacccagtaatgggatggctgggtcaaatggtatttctagttctagatccctgaggaatcgctacaccgacttccacaatagttgaactagtttacagtcccaccaacggtgtaaaagtgttcctatttctccatatcctctccagcacctgtcgtttcctgactttttaatgatcgccattctaactggtgtcagatgatatctcattgtggttttgattttaatttctctgatggccagtgatgatgagcattttttcatgtgtctgctggctgaataaatgtcttcttttgagaagtgtctgttaatacccttcacccactttttgatggggttgtttgtttgtttcttgtaaaattttttgagttcattgtagattctggatattagccctttgtcagatgagtaggttgcaaaaattttctcccattttgtaggttgcctgttcatgctgatggtaatttcttttgctgtgcagaagctctttagtttaattggatcccatttgtcaattttggcttttgttgccattgctttcggtgttttagacatgaagtccttgcccatgcctatgtcctgaatggtattgcctaggttttcttcttgggtttttatggttttaggtctaacatgtaagtctttaatccatcttgaattaatttttgtataaggtgtaaggaagggtccagtttcagccttctacatatggtcagccagttttcccagtaccatttatcaaatagggaatcctttccccattgcttgtttttgtcaggtttgtcaaagatcagatagttgtagatatacggcattatttctgagggctcttttctgttccattggtctatatctctgttttggtaccagtactatgctgttttggttactgtagccttgtagtatagtttgaagtcaggtagcgtgatgcctctggctttgttcttttggctcaggattgacttggcgatgtgggctcttttttggttccatatgaactttaaagtagttttttccaattctgtgaagaaaggcattggtagcttgatggggatggcattgaatctataaattaccttgggcagtatggccattttcacgatactgattcttcctacctatgagcatggaatgttcttccatttgtttgtatcctcttttatttcattgagcagtggtttgtagttctccttgaagaggtccttcacatcccttgtaagttggattcctaggtattttattctctttgaagcaattgtgaatgggagttcactcatgatttggctctctgtttgtctgttattggtgtataagaatgcttgtgatttttgcacattgattttgtatcctgagactttgctgaagttgcttatcagcttaaggagattttgggctgagaccgatggggttttctagatatacaatcatgtcatctgcaaacagggacaatttgactttctcttttcctaattgaatgccctttatttccttctccggcctgattgccctgcccagaacttctaacactatgttgaataggagtggtgagagagggcatccctgtcttgtgccagttttcaaagggaatgcttccagtttttgtccattcagtatgatattggctgtgggtttgtcatagatagctcttgttattttgagatatgtcccatcagtacctaatttactgagagtttttagcatggagggttgttgaattttgtcaaaggccttttctgcatctattgagataatcatgtggttttggtctttggttctgtttatatgctggattacatttattgatttgcatatgttgaaccagcctttcatcccagggatgaagcccacttgatcatggtggatacgctttttgatgtgctgctggattcgatttgccagtattttattgaggatttttgcatcaatgttcatcaaggatattggtctaaaattctcttttttggttgtgtctctgcgaggctttggtatcaggatgatgctggcctcataacatgagttagggaggattccctctttttctattgattggaatagtttcagaaggaatggtaccagttcctccttgtacctctggtagaattctgctgtgaatccatctggtcctggactccttttggttggtaagctctggattattgccacaatttcagagcctgttattggtctattcagagattcaacttcttcctggtttagtcttgggagggtgtatgtgtcgaggaatttatccatttcttcaagattttctagtttatttgcgtagaggtgtttatagtattctctgatggtagtttgtatttctgtgggatcgatggtgatatcccctttgtcatttttgattgcgtctatttgattcttctctcctttcttctttattagtcttgctagcggtctatcaattttgttgatcttttcaacacaccagctcctggattcattgattttttaaagggttttttgtgtctctatttccttcagttctgctctgatcttagttatttcttgccttctgctggcttttgaatgtgtttgctcttgcttctctagttcttttaattgtgatgttagggtgtccattttagatctttcctgctttctcttgtgggcatttagtgctataaatttccctctacacattgctttgcatgtgtcccagagattctggtatgttgtgtctttgttctcattggtttcaaagaacatctttatttctgccttcatttcattatgtacccagtagtcattcaggagcaggttgttcagtttccatgtagttgagtggttttgagtgagtttcttaatcctgagttctagtttgattgcactgtggtctgagagacagtttgttataatttctgttcttttacatttgctgaggagtgctttacttccaactatatggtcaattttggaataggtgtggtgtggtgctgaaaagactgtatattctgttgatttggggtggagagttctgtagatgtctattaggtctgcttggtgcagagctgagttcaattcctggatatccttgttaactttctgtctcatttctctgtctaatgttgacagtggggtgttaaagtctcccattattattgtgtgggagtctaagtctctctgtagatcactaaggacttgctttatgcatctgggtgctcccgtattgggtgcatatatatttagaatagttagttcttcttgttgaattgatcccgttaccattatgtaatggccttctttgtctcttttgatctctgttggtttaaagtctgttttatccgagactaggattgcaacccctgcctttttttgttttccatttgcttggtagatcttcctccatccctttattttgagcctatgtgtgtctctgcacgtgagatgggtttcctgaatacagcacactgatgggtcgtgactctttatacagtttgccggtctgtgtctttttaattggagcatttagcccatttacatttaaggttaatattgttatgtgtgaatctgatcctgtcattatgatgttaactggttattttgcttgttagttgatgcagtttcttcctagccttgacagtctttacagtttggcctgattttgcactggctggtaccggttgttcctttttatgtttagtgcttccttcaggagctcttttaggggaggcctggtggtgacaaaatctctcagcatttgcttgtctgtaaagtattttatttctccttcacttatgaagcttagtttggctggataggaaattctgggttgaaaattcttttctttaagaatattgaatattggcccccactctcttctggcttgtagagtttctgctgagagatcagctgtcagtctgatgggctgcccttggtgggtaacctgatctttctctctggctgcccttagcattttttccttcatttcaactttggtgaatctgacaattatgtgtcttggagttgctcttctcgaggagtatctttgtggcgttctctgtatttcctgaatctgaatgttggcctgccttgctagattggggaagttctcctggataatatcctgcagagtgtgttccaacttgattccattctccccgtcccttccaggtacaccaatcagacgtagatttggtcttttcacatagtcccatatttcttggaggctttgttcgtttctttttattcttttttctctaaacttcccttctccgctgatttcattcatttgatcttccatcactgataccctttcttccagttgatcgcatcggctcctgaggcttctgcattcttcacgtagttctcgagccttggctctcaggtccgtcagctcctttaagcacttctctgtattggttattctagttgtacattcgtctaaatttttttcaaagttttcaacttctttgccttggtttgaatttcctcctgtagctcggagtagtttgatcatccgaagccttcttctctcaactcgtcaaagtcatcctccgtccagctttgttccattgctggtgagctgtgttcctttggaggaggagaggcgctctgctttttagagtttccaatttttctgctctgttttttcccccgtctttgtagttttacctacttttggtctttgatgatggtgatgtacagatgggtttttggtgtggatgtcctttctgtttgttggttttacttctaacagacaggaccctcagctgcaggtctgttggagtttgctagaggtccactcccgaccctgtttgcctgggtaccagcagcggtggctgcagaacagtggattttcatgaatcgcgaatgctgctgtctgatcgttcctctggaagttttgtctcagaggagtacccggccgtgtgaggtgtcagtctgcccctaatggggggtgcctcccagttaggctgctcgggggtcaggggtcagggacccacttaaggaggcagtctgcccgttctcagatctccatctgcatgctgggagaaccactgctctcttcaaagctgtcagacagggacatttaagtctgcagaggttactgctgtctttttgtttgtctgtgcgctgcccccagaggtggagcctacagaggcaggcaggcctccttgagctgtggtgggctccacccagttcgagcttctgggctgctttgttttcctaagcaagcctggcaatggtgggcacccctcccccagcctcgctgccaccttgcagtttgatctcaggctgctgtgctagcaatcagcaagactctgtgggcgtaggaccctcggagccaggtgtgggatataatctcctggtgcgcttttttttaagcccgtcagaaatgcacagtattggggtgggagtaacccgattttccaggtgccatctgtcacccctttctttgactagggaagggaactccctgaccccttgcgcttcccaagtgaggcaatgcgtcgccctgcttcagctcacgcacgatgcgctacacccactgtcctgtgcccactgtctggcactccctagtgagatgaacccagtacctcagatggaaatgcagaaatcacccgtcttctgcgtcgctcacgctgggagctatagaccggagctgttcctatcctgccatcttggctccacc

SEQ ID NO: 10286 - DNA, 6060 bp, Homo sapiens
tcattttcctttttttttttttttttttttttttttttttattatactctaagttttagggtacatgtgcacattgtgcaggttagttacatatgtatacatgtgccatgctggtgcgctgcacccactaatgtgtcatctagcattaggtatatctcccagtgctatccctcccccctcccccgaccccaccacagtccccagagtgtgatattccccttcctgtgtccatgtgatctcattgttcaattcccacctatgagtgagaatatgcggtgtttggttttttgttcttgcgatagtttactgagaatgatggtttccaatttcatccatgtccctacaaaggatatgaactcatcattttttatggctgcatagtattccatggtgtatatgtgccacattttcttaatccagtctatcattgttggacatttgggttggttccaagtctctgctattgtgaatagtgccgcaataaacatacgtgtgcatgtgtctttatagcagcatgatttatactcatttgggtatatacccagtaatgggatggctgggtcaaatggtatttctagttctagatccctgaggaatcgccacactgacttccacaatggttgaactagtttacagtcccaccaacagtgtaaaagtgttcctatttctccgcatcctctccagcacctgttgtttcctgactttttaatgattgccattctaactggtgtgagatgatatctcatagtggttttgatttgcatttctctgatggccagtgatgatgagcatttcttcatgtgttttttggctgcataaatgtcttcttttgagaagtgtctgttcatgtccttcgcccactttttgatggggttgtttgtttttttcttgtaaatttgtttgagttcattgtagattctggatattagccctttgtcagatgagtaggttgcgaaaattttctcccatgttgtaggttgcctgttcactctgatggtagtttcttttgctgtgcagaagctctttagtttaattagatcccatttgtcaattttgtcttttgttgccattgcttttggtgttttggacatgaagtccttgcccacgcctatgtcctgaatggtaatgcctaggttttcttctagggtttttatggttttaggtttaacgtttaaatctttaatccatcttgaattgatttttgtataaggtgtaaggaagggatccagtttcagctttctacatatggctagccagttttcccagcaccatttattaaatagggaatcctttccccattgcttgtttttctcaggtttgtcaaagatcagatagttgtagatatgtggcattatttctgagggctctgttctgttccattgatctatatctctgttttggtaccagtaccatgctgttttggttactgtagccttgtagtatagtttgaagtcaggtagtgtgatgcctccagctttgttcttttggcttaggattgacttggcaatgcgggctcttttttggttccatatgaactttaaagtagttttttccaattctgtgaagaaagtcattggtagcttgatggggatggcattgaatctgtaaattaccttgggcagtatggccattttcatgatattgattcttcctacccatgagcatggaatgttcttccatttgtttgtgtcctcttttatttccttgagcagtggtttgtagttctccttgaagaggtccttcacatcccttgtaagttggattcctaggtattttattctctttgaagcaattgtgaatgggagttcacccatgatttggctctctgtttgtctgttgttggtgtataagaatgcttgtgatttttgtacattgattttgtatcctgagactttgctgaagttgcttatcagcttaaggagattttgggctgagacgatggggttttctagataaacaatcatgtcatctgcaaacagggacaatttgacttcctcttttcctaattgaataccctttatttccttctcctgcctgattgccctggccagaacttccaacactatgttgaataggagcggtgagagagggcatccctgtcttgtgccagttttcaaagggaatgcttccagtttttgcccattcagtatgatattggctgtgggtttgtcatagatagctcttattattttgaaatacgtcccatcaatacctaatttattgagagtttttagcatgaagggttgttgaattttgtcaaaggctttttctgcatctattgagataatcatgtggtttttgtctttggctctgtttatatgctggattacatttattgatttgcgtatattgaaccagccttgcatcccagggatgaagcccacttgatcatggtggataagctttttgatgtgctgctggattcggtttgccagtattttattgaggatttttgcatcaatgttcatcaaggatattggtctaaaattctcttttttggttgtgtctctgcccggctttggtatcagaatgatgctggcctcataaaatgagttagggagtattccctctttttctattgattggaatagtttcagaaggaatggtaccagttcctccttgtacctctggtagaattcggctgtgaatccatctggtcctggactctttttggttggtaaactattgattattgccacaatttcagagcctgttattggtctattcagagattcaacttcttcctggtttagtcttgggagagtgtatgtgtcgaggaatgtatccatttcttctagattttctagtttatttgcgtagaggtgtttgtagtattctctgatggtagtttgtatttctgtgggatcggtggtgatatcccctttatcattttttattgtgtctatttgattcttctctctttttttctttattagtcttgctagcagtctatcaattttgttgatcctttcaaaaaaccagctcctggattcattgattttttgaagggttttttgtgtctctatttccttcagttctgctctgattttagttatttcttgccttctgctagcttttgaatgtgtttgctcttgcttttctagttcttttaattgtgatgttagggtgtcaattttggatctttcctgctttctcttgtaggcatttagtgctataaatttccctctacacactgctttgaatgcgtcccagagattctggtatgtggtgtctttgttctccttggtttcaaagaacatctttatttctgccttcatttcgttatgtacccagtagtcattcaggagcaggttgttcagtttccatgtagttgagcggctttgagtgagattcttaatcctgagttctagtttgattgcactgtggtctgagagatagtttgttataatttctgttcttttacatttgctgaggagagctttacttccaactatgtggtcaattttggaataggtgtggtgtggtgctgaaaaaaatgtatattctgttgatttggggtggagagttctgtagatgtctattaggtctgcttggtgcagagctgagttcaattcctgggtatccttgttgactttctgtctcgttgatctgtctaatgttgacagtggggtgttaaagtctcccattattaatgtgtgggagtctaagtctctttgtaggtcactcaggacttgctttatgaatctgggtgctcctgtattgggtgcataaatatttaggatagttagctcctcttgttgaattgatccctttaccattatgtaatggccctctttgtctcttttgatctttgttggtttaaagtctgttttatcagagactaggattgcaacccctgcctttttttgttttccatttgcttggtagatcttcctccatccttttattttgagcctatgtgtgtctctgcacgtgagatgggtttcctgaatacagcacactgatgggtcttgactctttatccaacttgccagtctgtgtcttttaattgcagaatttagtccatttatatttaaagttaatattgttatgtgtgaatttgatcctgtcattatgatgttagctggtgattttgctcgttagttgatgcagtttcttcctagtctcgatggtctttacattttggcatgattttgcagcagctggtaccggttgttcctttccatgtttagcgcttccttcaggagctcttttagggcaggcctggtggtgacaaaatctctcagcatttgcttgtctataaagtattttatttctccttcacttatgaagcttagtttggctggatatgaaattctgggttgaaaattcttttctttaagaatgttgaatattggcccccactctcttcttgcttgtagggtttctgccgagagatccgctgttagtctgatgggctttcctttgagggtaacccgacctttctctctggctgcccttaacattttttccttcatttcaactttggtgaatctgacaattatgtgtcttggagttgctcttcttgaggagtatctttgtggcgttctctgtatttcctgaatctgaacgttggcctgccttgctagattggggaagttctcctggataatatcctgcagagtgttttccaacttggttccattctccacatcactttcaggtacaccaatcagacgtagatttggtcttttcacatagtcccatatttcttggaggctttgctcatttctttttattcttttttctctaaacttcccttctcacttcatttcattcatttcatcttccattgctgataccctttcttccagttgatcgcatcggctcctgaggcttctggattcttcacgtagttctcgagccttggttttcagctccatcagctcctttaagcacttctctgtattggttattctagttatacattcttctaaatttttttcaaagttttcaacttctttgcctttggtttgaatgtcctcccgtagctcagagtaatttgatcgtctgaagccttcttctctcagctggtcaaaatcattctccatccagctttgttctgttgctggtgaggaactgcgttcctttggaggaggagaggcgctctgcgttttagagtttccagtttttctgttctgttttttccccatctttgtggttttatctacttttggtctttgatgatggtgatgtacagatgggttttcggtgtagatgtcctttctggttgttagttttccttctaacagacaggaccctcagctgcaggtctgttggaataccctgccgtgtgaggtgtcagtgtgcccctgctggggggtgcctcccagttaggctgctcgggggtcaggggtcagggacccacttgaggatgcagtctgcccgttctcagatctccagctgagtgctgggagaaccactgctctcttcaaagctgtcagacagggacacttaagtctgcagaggttactgctgcctttttgtttgtctgtgccctgcccccagaggtggaacctacagaggcaggcaggcctccttgagctgtggtgggctccacccagttcgagcttcccggctgctttgtttacctaagcaagcctgggcaatggcgggcgcccctcccccagcctcgttgccgccttgcagtttgatctcagactgctgtgctagcaatcagcgagattccgtgggcataggaccctctgagccaggtgtgggatatagtctcgtggtgcgccgtttcttaagccggtctgaaaagcgcaatattcgggtgggagtgacccgattttccaggtgcgtccgtcacccctttctttgactcggaaagggaactccctgaccccttgcgcttcccaggtgaggcaatgcctcgccctgcttcggctcgcgcacggtgcgcacacacactggcctgcgcccactgtctggcactccctagtgagatgaacccggtacctcagatggaaatgcagaaatcacccgtcttctgcgtcgctcacgctgggagctgtagaccggagctgttcctattcggccatcttggctcctcccccc

SEQ ID NO: 10287 - DNA, 6032 bp, Homo sapiens
ccaaatttttttttttttattatactttaagttttagggtacatgtgcacattgtgcaggttagttacatatgtatacatgtgccatgctggtgcgctgcacccactaactcgtcatctagccttaggtgtatctcccaatgctatccctcccccctccccccaccccaccacagtccccagagtgtgatattccccttcatgtgtccatgtgatctcattgttcaattcccacctatgagtgagaatatgcggtgtttggttttttgttcttgcgatagtttactgagaatgatgatttccaatttcatccatgtccctacaaaggacatgaactcatcattttttatggctgcatagtattccatggtgtatatgtgccacattttcttaatccagtctatcattgttggacatttgggttggttccaagtctttgctattgtgaataatgccgcaataaacatacgtgtgcgtgtgtctttatagcagcatgatttatagtcctttgggtatatacccagtaacgggatggctgggtcaaatggtatttctagttctagatccctgaggaatcgccacactgacttccacaatggttgaactagtttacagtcccaccaacagtgtaaaagtgttcctatttctccacatcctctccagcaactgttgtttcctgactttttaatgattgccattctaactggtgtgagatgatatctcatagtggttttgatttgcatttctctgatggccagtgatgatgagcattttttcatgtgtcttttggctgcataaatgtcttcttttgagaagtgtctgttcatgtccttcgcccactttttgatggggttgtttgtttttttcttgtaaatttgtttgagttcattgtagattctggatattagccctttgtcagatgagtaggttgcgaaaattttctcccatgttgtaggttacctgttcactctgatggtagtttcttttgctgtgcagaagctctttagtttaattagatcccatttgtcaattttagcttttgttgccattgcttttggtgttttggacatgaagtccttgcccatgcctatgtcctgaatggtaatgcctaggttttcttctagggtttttatggttttaggtctaacgtttaaatctttaatccatcttgaattgatttttgtataaggtgtaaggaagggatccagtttcagctttctacatatggctagccagttttcccagcaccatttattaaatagggaatcctttccccattgcttgtttttctcaggtttgtcaaagatcagatagttgtaggtatgcggcgttatttctgagggctctgttctgttccattgatctatatctctgttttggtaccagtaccatgctgttttggttactgtagccttgtagtatagtttgaagtcaggtagtgtgatgcctccagctttgttcttttggcttaggattgacttggcaatgcgggctcttttttggttccatatgaactttaaagtagttttttccaattctgtgaagacagtcattggtagcttgatggggatggcattgactctataaattaccttgggcagtatggccgttttcacgatattgattcttcctacccatgagcatggaatgttcttccatttgtttgtatcctcttttatttccgtgagcagtggtttgtagttctccttgaagaggtccttcacatcccttgtaagttggattcctaggtattttattctctttgaagcaattgtgaatgggagttcactcatgatttggctctctgtttgtctgttgttggtgtataagaatgcttgtgatttttgtacattgattttgtatcctgagactttgctgaagttgcttatcagcttaaggagattttgggctgagacaatggggttttctagataaacaatcatgtcgtctgcaaacagggacaatttgacttcctcttttcctaattgaataccctttatttccttctcctgcctgattgccctggccagaacttccaacactatgttgaataggagcggtgagagagggcatccctgtcttgtgccagttttcaaagggaatgcttccagtttttgcccattcagtatgatattggctgtgggtttgtcatagatagctcttattattttgagatatgtcccatcagtacctaatttattgagagtttttagcatgaagggttgttgaattttgtcaaaggctttttctgcatctattgagataatcatgtggtttttgtctttggctctgtttatatgctggattacatttattgatttgcgtatattgaaccagccttgcatcccagggatgaagcccacttgatcatggtggataagctttttgatgtgctgctggattcggtttgccagtattttattgaggatttttgcatcaatgttcatcaaggatattggtctaaaattctcttttttggttgtgtctctgcccggctttggtatcagaatgatgctggcctcataaaatgagttagggaggattccctctttttctattgattggaatagtttcagaaggaatggtaccagttcctccttgtacctctggtagaattcggctgtgaatccatctggtcctggactctttttggttggtaaactattgattattgccacaatttcagatcctgttattggtctattcagagattcaacttcttcctggtttagtcttgggagagtgtatgtgtcgaggaatttattcatttcttctagattttctagtttatttgcatagagttgtttgtagtattctctgatggtagtttgtatttctgtgggatcagtggtgatatcccctttatcattttttattgtgtctatttgattcttctctctttttttctttattagtcttgctagcggcctatcacttttggtgatcctttcaaaaaaccagctcctggattcattaattttttgaagggttttttgtgtctctatttccttcagttctgctctgattttagttatttcttgccttctgctagcttttgaatgtgtttgctcttgcttttctagttcttttaattgtgatgttagggtgtcaattttggatctttcctgctttctcttgtgggcatttagtgctataaatttccctctacacactgctttgaatgcgtcccagagattctggtatgttgtgtctttgttctcgttggtttcaaagaacatctttatttctgccttcatttcgttatgtacccagtagtcattcaggagcaggttgttcagtttccatgtagttgagcggctttgagtgaaattcttaatcctgagttctagtttgattgcactgtggtctgagagatagtttgttataatttctgttcttttacatttgctgaggagagctttacttccaactatgtggtcaattttggaataggtgtggtgtggtgctgaaaaaatgtatattctgttgatttggggtggagagttctgtagatgtctattaggtccgcttggtgcagagctgaattcaattcctgggtatccttgttgactttctgtctcgttgatctgtctaatgttgacagtggggtgttaaagtctcccattattaatgtgtgggagtctaagtctctttgtaggtcactcaggacttgctttatgaatctgggtgctcctgtattgggtgcatatatatttaggatagttagctcctcttgttgaattgatccctttaccattatgtaatggccttctttgtctcttttgatctttgttggtttaaagtctgttttatcagagactaggattgcaaaccctgccttttttgttttccatttgcttggtagatcttcctccatccttttattttgagcctatgtgtgtctctgcacgtgagatgggattcctgaatacagcacactgatgggtcttgactctttatccaacttgccagtctgtgtcttttaattggagaatttagtccatttacatttaaagttaatattgttatgtgtgaatttgatcctgtcattatgatgttagctggtgattttgctcgttagttgatgcagtttcttcctagtctctatggtctttatattttggcatgattttgcagcggctggtaccggttgttcctttccatgcttagcgcttccttcaggagctcttttagggcaggcctggtggtgacaaaatctctcagcatttgcttgtctgtaaagtattttatttctccttcacttatgaagcttagtttggctggatatgaaattctgggttgaaaattcttttctttaagaatgttgaatattggcccccactctcttctagcttgtagggtttctgccgagagatccgctgttagtctgatgggcttccctttgagggtaacccgacctttctctctggctgcccttaacattttttccttcatttcaactttggtgaatctgacaattatgtgtcttggagttgctcttctcgaggagtatctttgtggcgttctctgtatttcctgaatctgaacgttggcctgccttgctagattggggaagttctcctggataatatcctgtagagtgttttccaacttggttccattctccgcatcactttcaggtacaccaatcagacgtagatttggtcttttcacatagtcccatatttcttggaggctttgctcatttctttttattttttttctctgaacttcccttctcgcttcatttcattcatttcgtcttccattgctgataccctgtcttccagttgatctcatcggctcctgaggcttctgcattcttcacgtagttctcgagccttggttttcagctccatcagctcctttaagcacttctctgtattggttcttctagttatacattcttctaaatttttttcaaagttttcaacttctttgcctttcgtttgaatgtcctcccgtagctcagagtaatttgatcgtctgaagccttcttctctcagctcgtcaaagtcattctccatccagctttgttccgttgctggtgaggaactgcgttcctttggaggaggagaggcgctctgcgttttacagtttccagtttttctgtcctgttttttccccatctttgtggttttatctacttttggtctttgatgatggtgatgtacagatgggttttcggtgtggatgtcctttctgtttgttagttttccttctaacagacagcaccctcagctgcaggtctgttggaataccctgccgtgtgaggtgtcagtgtgcccctgctggggggtgcctcccagttaggctgctcgggggtcaggggtcagggacccacttgaggaggccgtctgcccgttctcagatctccagctgcgtgctgggagaaccactgctctcttcaaagctgtcagggacatttaagtctgcagaggttactgctgtctttttgtttgtctgtgccctgcccccagaggtggaggctacagaggcaggcaggcctccttgagctgtggtgggctccacccagttcgagcttcctggctgctttgtttacctaagcaagcctgggcaatggcgggcgcccctcccccagcctcgctgccgccttgcagtttgatctcagactgctgtgctagcaatcaacgagattccatgggcgtaggaccctccgagccaggtgtgggatatagtctcgtggtgcgccattttctaagccggtctgaaaagcgcaatattcgggtgggagtggcccgattttccaggtgcgtccgtcacccctttctttgactcggaaagggaactccctgaccccttgtgcttcccaggtgaggcaatgccttgcccggcttcggctcgtgcacggtgcgcgcacccactggcctgcgcccactgtctggcactccctagtgagatgaacccggtacctcagatggaaatgcagaaatcacccgtcttctgcgtcgctcacgctgggagctgtagaccggagctgttcctattcggccatcttggctcctcccccct

SEQ ID NO: 10288 - DNA, 4947 bp, Homo sapiens
tttttgtcttttctttttattattatactttaagttctagggtacatgtgcacaatgtgcagatttgttacatatgtataaatgtgccatgttggtgtgctgtaccccttaactcgtcatttacattaggtgtatcacctaatgctatccttcccccctcaccccaccccacaacaggccccagatgtgatgttccccaccctgtgtccaagtgttctcattgttcagttcccatccatgagagagaatatgcagtgtttggttttctgcccttgcgatagtttgctcagaatgatggtttccagcttcatccatgtccctacaaaggacatgaactcaccccttttttatggctgcatatattccatagtgtatatgtgccacattttcttaatccagtctatcattgatggacatttgggttggttccaagtctctgctattgtgaatactgccacaataaacatacgtgtgcatgtgtctttatggcagcatgattcataatcctttgggtatatacccagtaatgggatgcccgggtcaagtggtatttctagttctagatccttgaggaattgccacactgtcttccacaatggctgaactagtttacagtcccaccaacagtgtaaaagtgttcctatttctccacatcctctccagcatctgttgtttcctgactttttaatgatcaccattctaactggtgtgagatggtatctcactgtggttttgatttgcatttctctgatggccagtgaggatgagcattttttcacgtgtctgttggctgcataaatgtcttctttcgagaagtgtctgttcataccctttggccactttttgattgggttgtttggtttttttcttgtaaatttgtttaagttctttgtagattctggatattagccctttgtcagatgggtagattgcaaaaattttctcccattctgtaggttgcatgttcactctgatggtagtttcttttgctgtgcagaagctctttagtttaattagatcccatttgtcaattttggcttttgttgccattgcttttggtgttttagacatgaagtccttgcccatgcctatgtcctgaatggtaatgcctaggttttcttctagggtttttatggttttaggtctaacatttaaatctttaatccatcttgaattaatttttgtataaggtgtaaggaagggatccagtttcagctttctacatatggctagccagttttcccagcaccatttattaaatagggaatcctttccccatttcttgtttttgtcaggtttgtcaaagatcagatggttgtagatgtatgatattatttctgagggctctattctgttcccttggtctatatctctgttttggtaccagtaccatgctgttttgcttacggtagctttgtagtatagtttcaagtcaggtaacatgatgcctccagctttgttctttttgcttaggattgtcttggcaatgcaggctcttttttggttccatatgaactttaaagtagttttttccaattctgtgaagaaggttattggtagcttggtggagatggcattgaatctacaaattaccttgggcagtatggccattttcacaatattgattcttcctatccatgagcatggaatattcttccatttgtttgtgtcctcttttattttgttgagcagtggtttgtagttctctttgaagaggtccttcacatcccttgtaagttggatttgtaggtattttattatctttgaagcaattgtgaatgggggttcactcatgatttggctctctgtttgtctgttattggtatataggaatgcttgtgatttttgcacattgattttgtatcctgagactttgctgaagttgcttatcagcttaaggagattttgggctgagacaatggggttttctaaatatacaatcatgtcatctgcaaacagggtcaaaacagaagtcaaaaaaaatttgacttcctcttttcctaattgaataccgcttatttctttctcttcactgattgccctggccagaacttccaacactatgttgaataggagtggtgagagagggcatccctgtcttgtgacagttttcaaaggaatgcttccagtttttgcccattcagtatgatattggctgtgggtttgtcataaatagctcttattattttgagatatgtcccatcaatacctagtttattgagggtttatagcatgaagggctgttgaattttgttgaaggccttttctgcatcaattgagataattatttggtttttgtctttggttttgtttatatgatggattacatttattgatttgcatatgttgaaccagccttgcatccccaggatgagacccacttgatcatgttggataagcctcttgatgtgctactggattcagcttgccagtattttattgaggatttttgcatcgatgttcaccatggatattggtctaaaattttctttttttgttgtgtctctgccggtctttggtatcaggatgatgttggcctcataaaatgaattagggaggattccctctttttctgttgattggaatagtttcagagggaatgttaccagctcctctttgtacctctggtagaatttggctgtgaatccttctggtcctggactttttttggttggtaggctattaattattgcctcaatttcagagcctgttttggtctattcagagattcaacttcttcctggtttagtcttgggagagtgtatgtgtccaggaatttatccatttcttctagattttctagtttatttgcgtagagttgtttataatattctctgatggtggtttgtatttctgtgggatcagtggtgatagcccctttatcactttttattgcatctatttgattcttctctcttttcttctttattagtcttgctggcagtctatcaattttgttgatcttttcaaaaaaccagctcctagattcattgattttttgaagggttttttgtgtctctatttccttcagttctactctgatcttacttatttcttgttttctgctagcttttgaatgtgtttgctcttgcttctctagttcttttaattgtgatgttagggtgtcaattttagatatttcttgctttctcttgtgggcacttagtgctataaatttccctctacacactgctttaaatgtgtcccagagattttggtacgttgtgtctttgttctcattggtttcaaagaacatttttatttctgccttcatttcattatttacccagtagtcattcaggagcaggttgttcagtttccatgtagttgagcagttttgagtgagtttcttaatcctgagttctagtttgattgcactgtggtctgagagatagtttgttataatttctgttattttacatttgctgaggagtgctttacttccaactatgtggtcagttttgtaataagtacagcgttgtgctgagaagaatgtatattcttttgatttggagtggagagttctgtagatgtctattagatccacttggtgcagagctgagttcaattcctggatatccttttaactttctgtcttatgaatctgtctaatgttgacagtggggtgttaaagtgtcccattattattgtgtgggagtctaagtctctttgtaagtctctaaggacttactttatgaatctgggtgctcctgtattgggtgcatatatatttaggatagttagctcttcttgttgaattgatccctttacgattatgtaatggccttctttgtctcttttgatcgttgttggtttaaagtctgttttatcggagactaggattgtaacccctccttttattttgttttccatttgcttggtaagtcttcctccatccctttattttgagcttatttgtgtctctgcacgtgagatgggtctcctgaatacagcacactgatgggccttgcctctttatccaatttgccagtctgtgtctttttattggagcatttagcccatttacatttaaggttaatattgttatgtgtgaatttgatcctgtcgttaagatgttagctggttattttgctcattagctgatgcagtttcttcctagcattgatggtctttacaatttggcatgtttttgcagtggctggtactggtggttcctttccatgtttagtgcttccttcaggagctgttgtaaggcaggcctggtggcgacaaaatctctcagcatttgcttgtctgtaaaggattttatttctccttcacttatgaagcttagtttggctgcatatgaaattctgggttgaaaattcttttctttaagaatgttgaatattggcccctactctcttctggcttgtagggtttctgccgagagatccgctgttagtctgatgggcttccctttgagggtaacccgacctttctctctggctgcccttaacattttttccttcatttcaactttggtgaatctgacaattatgtgtcttggagttactcttctcgaggagtatctttgtggtgttctctgtatttcttgaatttgaatgttggcctgccttgctgggttggggaagttctcctggataatatcctgcagagtgttttccaacttggttccattctccccatcactttcaggtacaccagtcagacgtagatttggtcttttcacatagtcacatatttcttagaggctttgttcatttctttttactcttttttctctaaaattctcttctgcttcatttcattcattttaccttcaatcactaatactctttcttccacttgatcaaatcagctactgaagcttgtgcatgcatcacgtagttcttgtgttatggttttcagctccatcaggtcatttaaggacttctctgcactgcttattctagttagccattcgtctaatcttttttcaaggtt

SEQ ID NO: 10289 - DNA, 5310 bp, Homo sapiens
tttatttatttattttattattatactttaagttatggggtacatgcgcacaacgtgcaggtttgttgcatatgtatacatgtgccatgttggtgtgctgtacccattaatttgtcattcaattaggtatatctcctagtggtatccctccccacaccccccaccctatgacaggccccagtatgtgatgttccccaccctgtgtccaagtgttctcattgttcaattcccacctatgagtgagaatatgcagtgtttggttttctgtccttgcgatagtttgctcagaatgatggtttccagcttcatccatgtccctacaaaggacatgagctcatcattttttatggctgcatagtattccatggtgtatatgtgccacattttcttaatccagtctatcattgttggacatttgggttggttccaagtctttgctattgtgaatagtgccgcaataaacatatgtgtgcatgtgactttatagcagcatgatttataatcctttgggtatatgcccagtaatgggatggctgggtcatatggtatttcttgttctggatccttgaggaatcaccacactgtcttccacaatggttgaattagtttacattcccaccaacagtgtaaaagcattcctatttctccacatcctctccagcacctgttgtttcctgactttttaatgatctccatgctaactggcatgagatgtgtggttttgatttgcatttctctgatggccagtgatgatgagcattttttcacgtatctgttggctgcataaatgtcttcttttgagaagtgtctgttcatatccttcgcccactttttgatggggttgttttattttttcttgtaaatttgtttaagttctttgtagattctggatattagccctttgtcagatgggtagattgtaaaaattttctcccattctgtaggttgcctgttcactcagatggtagtttattttgctgtgcagaagctctttagtttaattacatcccattggtcaattttggcttttgttgccattgcttttggtgttttagtcatgaagtccttgcccatgcctatgtcctgaatggtattacctaggttttcttctagggtgtttatggttttaggtctaacatttaagtctttaatccatcttgaattaatttttgtataaggtgtaaggaagggatccagtttcagctttctacatatggctagccagttttcccagcaccatttattaaatagggaatcctttccccattgcttgtttttctcaggtttgtcaaagatcagatggttgtagatgtgtggtattatttccgagggctctgttctgttccattggtctatatctctgttttggtaccagtaccatgttgttttggttactgtagccttgtactatagtttgaagtcaggtagcgtgatgcctccagctttgttcttttggcttaggattgtcttggcaatgcagactcttttttggttccatatgaactttaaagtaattttttccaattctgtgaagaaagtcattggtagcttgatggggatggcattgagtctataaattaccttgtgcagtatggccattttcacaatattgattcttcctacccatgagtatggaatgttcttccatttgtttgtgtcctcttttatttcattgagcagtggtttgtagttctccttgaagaggtccttcatgtcccttgtaagttggattcctaggcattttattctctttgaagcaattgtgaatgggagttcactcatgatttggctctctgtttgtctgttattggtgtataagaatgcttgtgattttcgcacattgattttgtatcctgagactttgctgaagttgcttatcagcttaaggagattttgggctgagaggatagggttttctaaatatacaatcatgtcatctgcaaacaggaacaatttgacttcctcttttcctaattgaataccctttatttctttctcttgcctgattgccctggccagaacttccaacactctgttgaataggagtggtgagagagggcatccctgtcttgtgccagttttcaaagggaatgcttccagtttttgcccattcagtatgatattggctgtgggtttgtcataaatagctcttattattttgagatatgtcccatcaatacctagtttattgagaggttttagcatgaaggactgttgaattttgtcaaaggccttttctgcatctattgagataatcacgtggtttttgtctttggttccgtttatatgatggattccatttattgattcgtgtatgttgaaccagccttgcatccaagggaggaagccaacttgatcgtggtggataggctttttgatgtgctgctggattcggtttgccagtattttatggaggatttttgcatcgatgtttatcagggatattggtctaaaattctctttttttgttgtgtctctgccaggttttggtatcaggatgatgttggcctcataaaatgaattagggaggattccctctttttctattgattggaatagtttcagaaagaatggtactagctcctctttgtacctctggtagaattcgggtgtgaatctgtctggtcctggactgtttttggttggtaggctattaattattgcctcaatttcagaacctgttattggtctattcagggattcaacttcttcccagtttagtgttgggagggtgtgtgtgtccaggaatttatccatttcctctagattttccagttttttttttttttggtgtagaggtgtttatagtattttctgatggtaggttgtatttctgtgggatcgatggtgatatcccctttatcattttttattgcatctatttgattcttctctcttttcttctttattagtcttgctagcggtctatcagttttgttgatcttttcaaaaaaccagctcctggattcattgatttttttttttggttttttaattaattaatttatttatttttttattattatactttaagttttagggtacatgtgcacattgtgcaggttagttacatacgtatacatgtgccatgctagtgtgctgcacccactaacttgtcgtctagcattaggtatatctcccaatgctgtccctcccccctccccctaccccgcagcagtccccagagtgtgatgttccccttcctgtgtccatgtgatctcattgggattcattgattttttgaagggttttttgtgtctctatctccttcagttctgctctgttcttagttatttcttgccttctgctagcttttgaatgtgtttgctcttgcttctctggttcttttaattgtgatgttagggtgtcaattttagatcttacctgctttctcttgtgggcatttagtgctataaatttccttctacacactgctttaaatgtgtcccagagattctggtatgttgtgtctttgttctcattggtttcaaagaacatctttatttctgccttcattttgtcatgtacccagtagtcattcaggagcaggttgttcaatttccatgtagttgagtggttttgagtgagtttcttaatcctgagttctagtttgattgcactgtggtctgagagacagttttatataatttctgttcttttacatttgctgaggagtgctttacttccaactatgtggtcaattttggaataagtgcgatgtggtgctgagaagaatgtatattctgttgatttggggtggagagttctgtagatgtctattaggtctgcttggggcagagctgagttaaattcctggttatccttattaactttctgtcttgttgatctgtctaatgttgacagtggggtgttaaagtctcccattattattgtatgggagtctaagtctctttgtatgtcactaaggacttgctttatgaatctgggtgctcctgtattgggtgcatatatatttaggatagttagttcttcttgttgaattgatccctttaccattatgtaacgacattctttgtctcttttgatctttcttggtttaaagtctgttttatcagagactaggattgcaacccctgcttttttttgttttccatttgcttggtagatcttctgccatccctttattttgagcctgtgtgtgtctctgcacgtcagatgggtctcctgaatacagcacactgatgggtcttgagtctttatccaatttgccagtctgtgtcttttaattggagcatttagttcatttacatttaaggttaatattgttaagtgtgaatttgatcctgtcattatgatgttagatggttattttgctcattagttgatgcagtttcttcctagcattgatggtttttacaatttggcatgtttttgcagtggctggtaccggttgttcctttccatgtttagtgcttccttcaggagttcttttagggcaggcctggtggtgacaaaatctgtcagcatttgtttgtctataaaggattttatttctccttcacttatgaagcttagtttggctggatatgaaattctggattgaaaattcttttctttaagaatgttgattattggcccccactctcttctggcttgtagagtttctgccgagagatccgctgttggtctgaatggcttcactttgtgggtaacccgaactttctctctggctgcccttaacatttttttccttcatttcaactttggtgaatctgacaattatgtgccttggagttgctcttctcaaggagtatctttgtggcattctctgtatttcctgaatttgaatgttagcctgcctcactagtttggggaagttctcttggataatatcctgcagaatgttttccaacttggttacattctccccatcactttcaggtacaccagtcagacgtagatttggtcttttcacatagttccatatttcttggaggctttgttcatttctttttactcttttttctctaaacttctcttctcacttcatttcattcatttgatcttcaatcactgataccctttcttccacttgatctaatcggctactgaagcttatgcatgcatcacatagttctcatgccatggttttcagctccatcaggtcatgtaaggacttttctacactgtttattctagttagccattcgtctaatctttttttcaaggtttttagcttctttgcgatgggttcgaacatcctcctttagctcggagaagtttgttattactgattgtctgaagcctttttctctcaattcatcaaagtcattctgcatccagctttgt

SEQ ID NO: 10290 - DNA, 4835 bp, Homo sapiens
tttatttattattatactttaagctctatggtatgtgtgcacaacgtgcaggtttgttacatatgtatacatgtggcatgttggtgtgctgcacccattaactcgtcatttacattaggtatttctcctaatgcaatccctccccactcccccaaccccacgacaggccctggtgtgtgatgattcccaccctgtgtccaagggttcccattgttcaattcccacctatgagtgagaacatgtggtgtttcgttttctgtccttgcgatagtttgctcagaatgatggtttccagctttatccatctccctacaaaggacatgaactcatcattttttatggctgcatagtattccatgatgtatatctgccacatgttcttaatccagtctatcactgatggacatttgggttggttccaagtctttgcaattgtgaatagtcccacaataagcatatgtgtgcatgagtctttataatagcatgatttataatcctttgggtatacccagtaatgggatcactgggtcaaatggtatttctagttctagatccctgaggaatcaccacactgtcttccacaatggttgaactagtttacagtcccaccaagagtgtaaaagtgttcctatttctccacatcctctccagcacctgttccctgactttttattgatccccattctaactggtgtgagatggtatctcattgtggttttgatttgcatttctctgatggccagtgatgctgagcattttttcacgtgtctgttggctgcataaatgtctttttttaagaagtgtgtgtttatattcttcgccccctttttgatggggttgtttgattttttcttgtaaatttgtttaagttctttgtagattgtggatattagccatttgtgagatgggtagattgcaaaattgttctcccattctgtaggttgcctgttcactctgatggtagtttcttttgctgtgcagaagctctttagtttaattagatcccatttgtctattttggctttagttgctattgcttttggtgttttagtcatgaagtccttgtccatgcctatgtcctgaatggcattgccttggttttcttctagggtttttatggttttaggtctaacatgtaagtctttaatccatcttgaattaatttttgtataaggtgtaaggaagggatccagtttcagctttctacatatggctagccagttttcccagcaccatttattaaatagggaatcctttccccatttcttgtttttgtcaggtttgtcaaagatcagatagttgtagatatgtggtattatttctgagggctctgttctgttccattgttctgtatctctgttcggtaccagtcccatgctgttttggttactatagccttgtagtatagtttgaagtcaggtagaatgatgcctccagctttgttctttttgcttaggattgtcttggcaatgcgggctcttttttggttccacatgaactttaaagtagttttttccaattctctgaagaaagtcattggaagcttgatggggatggcattgaatctataaattcccttggccagtatggccgttttcacgatattgattcttcctttccacgagcatggagtattcttccatttgcttgtgttctcttttattttattgaacagtggtttgtagttctccttgaagaggtccttcacttcccttgtaagttggattcctaggtattttataccgtttgaagcaattgtgaatgggagttcactcatgatttgcctctatgtttgtctgttattggtgtataggaatgcttgtgatttttgcatattgattttgtatcctgagacttagctgaagttgcttatcagcttaaggagattttgggctgagaggatggagttttctaaatatacaatcatgtcatctgcaaacagggacaatttgacttcctcttttcctaattcaataccctttatttctttcgcttgcctgattgccctggccagaacatcgaaaacactatgttgaataggagtggtgagagagggcatctctgtcttgtgccagttttcaaagggaatgcttccagtttttgcccattcagtataatattggctgtgggtttgtcataaatagctcttattattttgagatagatcccatcaatacctagtttattgagagtttttaacatgaagggatgttgaattttatcaaaggccttttctgaatctattgagataatcatgtggtttttgtctttggttctgtttatatgctggattacatttattgatctgtgtatgttgaaccagccttgcatcccaggaatgaagccaacttgatcgtggtggataagctttttgatgtgctgctggatttggtttgccagtattttattgaggatttttgcatcgatattcatcaaggatattggtctaaaattctcttttttttgttgtgtctctgccaggctttggtatcaggatgatgctggcctcataaaatgagttagggaggattccctctttttctattgattggaatagtttcagaaggaatggtaccagctcctctttgtacctctggtagaatttggctgtgaatccgtctggtcctggagtttttttggttggtaggctattaattattgcctcaatttcagagcctgttattggtctattcagggattcaacttcttcctggtttagtcttgggagggtatgtgtccaggaatttatccatttcttctagattttctagtttatttgcatagaggtgtttatagtattctctgatagtagtttgttttttttgggatcggtggtgatatcccctttatcattttttattgcatctatttgattcttctctcttttcttccattagtcttgctagcaatctatctattttgttgatcttttcaaaaaccagctcctggattcattgattttttcaagggtttttttttttttttttttttgtctctatctccttcagttctgctctgatcttagttatttcttgccttctgctagcttttgaatgtgtttgctcttgcttctctagttcttttaattgtgatgttagggtgtcaattttagatcttgcctgctttctcttgtgggcatttagtgctaaaaatttccctctacacactgctttaaatgtgtcccagagattctggtatgttgtgtctttgttctcattggtttcaaagaatatctttatttctgccttcctttcgttatttgcccagtagtcattcaggagcaggttgttcagtttccatgtagttgtgcagttttgagtgagtttcttaatcttgagttctaatttaattggactgtcttctgagagacagtttgttatgatttctcttcttttacatttgctgaggagtgctttacttccaactatgtggtcacttttggaataagtgcaatgtggtgctgagaagaatgtatattctgctgatttggggtggagagttctgtagatgtctattaggtccgcttggtgcagagctgagttcaagtcctggatatccttgttaactctctgtctcgttgatctgtctaatgttgacagtgggatgttaaactctcccattattattgtgtgggagtctaagtctttttgtaggtctctaaggacttgctttatgaatctgggcactcctgtattgggtggatatatatttaggatagtgtgctcttcttgttgaattgatccctttaccattatgtaatggccttctttgtctcttttgacctttgttggtttaaagtctgttttattagtaaccaggatcacaacccctgcttttttttgtcttccatttgcttagtagatcttcctccatccctttattttgagcctatgtgtgtctctgcacgtgagatgggtctcctgaatacagcacactgatgcatcttgactctttatccaatttgccagtctgtgtcttttaattggggcatttagcccatttacatttaaggttaatattgttatgtgtgaatttgatcctgtcattatgatgttagctggatatgttgctcattagttgatgcagtttcttcctagcatcaatggtctttacaatttggcatgtttttgcagtggctggtaccagttgttccttttcatgtttagtgcttccttcaggaactcttgtaaggcaggcctggtggtgacaaaatctctcagcatttgcttgtctgtaaaggtatttatttctccttcacttatgaagcttagtttggctggatatgaaattctgggttgaaaattcttttctttaagaatgttgaatattggcccccactttcttctggcttgtagattttctgcggagagatctgctgttagtctgatgggcttccctttgtgggtaagccaacctttctctctggctgcccttaatattttttccttcatttcaaacttggtgaatctgacaattatgtgtcttggggttgctcttctcaaggagtatctctgtggcattctctgtatttcctgaatttgaatgttggcctgccttgctagattggggaagttctcctggataatatcctgaagagtgtttttccaacttagttccattctccccatcactttcaggtacaccaaacaaacatagatttggtcatttcacttagtcccatatttcttggaggctttgttcatttctttttactcttttttctcaaaacttctcttctctcttcatttcactcatttgatcttcaatcactgataacccttcttccagttgatcgaattggctactgaagcttgtgcatgtgtcacatagttctc

SEQ ID NO: 10291 - DNA, 5909 bp, Homo sapiens
ttttttttatttttttattttattttattattattatactttaagttttagggtacaagtgcacaatgtgcaggttagttacatatgtatacatgtgccatgctggtgtgctgcacccattaactcgtcatttagcattaggtatatctcctaaagctatccctcccccctccccccaccccacaacagtccccagagtgtgatgttccccttcctgtgtccatgtgttctcattgttcaattcccacctatcagtaagaatatgcggtgtttggttttatgttcttgcgatagtttactgagaataacaatttccaatttcatccatgtccctacaaaggacatgaactcatcattttttatggctgcatagtattccatgatgtatatgtgccacattttcttaatccagtctatcattgttggacatttgggttggttccaagtctttgctattgtgaatagtgccgcaataaacatacgtttgcatgtgtctttatagcagcatgatttatagtcctttgggtatatacccagtaatgggatggctgggtcaaatggtatttctagttctagatccctgaggaatcaccacactgacttccacaatggttgaactagtttacagtcccaccaacaatgtaaaactgttcgtatttctccacatcctctccagcacctgttgtttcctgactttttaatgattgccattctaactggtgtgagatggtatctcattgtggttttgatttgcatttctctgatggccagtgatgaagagcactttttcatgtgttttttggctgcataaatgtcttcttttgagaagtgtctgttcatgtccttcgcccactttttgatggggttgtttgtttttttcttgtaaatttgtttgagttcattgtagattctggatattagccctttgtcagatgagtaggttgcaaaaattttctcccattttgtaggttgcctgtgcactctgatggtattttcttttgctgtgcagaagctctttagtttaattagatcccatttgtcaattttggcttttgttgtcattgcttttggtgttttagacatgaagtctttgcccatgcgtatgtcctgaatggtaatgcctaggttttcttctagggtttttatggttttaggtctaacgtttcagtctttaatccatctcgaattaatttttgtataaggtgtaaggaagggatccagtttcagctttctacatatggctagccagttttcccagtaccatttattaaatagggaatcctttccccattgcttctttttctcaggtttgttaaagatcagatagttgtagacatgcggcgttatttctgagggctctgttgtgttccattgatctatatctctgttttggtaccagtgccatgctgttttggttactgtagccttgtagtatagtttgaagtcaggtagcgtgatgcctccagctttgttcttttggcctaggattgacttggcgatgtgggctcttttttggttccatatgaactttaaagtagttttttccaattctgtgaagaaagtcgttggtagcttgatggggatggcattgaatctataaattgccttgggcagtatggccattttcacgatgttgattcttcctacccatgagcatggaatgttcttccatttgtttgtgtcctcttttatttccttgagcagtggtttgtagttctccttgaagaggtccttcacatcccttgtaagttggattcctaggtattttattctctttgaagcaattgtgaatgggagttcactcatgatttggctctctgtttgtctgttattggtgtataagaatgcttgtgatttttgtacattgattttgtatcctgagactttgctgaagttgcttatcagcttaaggagattttgggctgagacaatggggttttctagatatacaatcatgtcgtctgcaaacagggacaatttgacttcctcttttcctaactgaataccctttatttccttctcctgcctaattgccctggccagaacttccaacactatgttgaataggagtggtgagagagggcatccctgtcttgtgccagttttcaaagggaatgcttccagtttttgcccattcagtatgatattggctgtgggtttgtcatagatagctcttattattttgagatacgtccaatcaacacctaatttattgagagtttttagcctgaagggttgttgaattttgtcaaaggccttttctgcatctgttgaggtaatcatgtggtttttgtctttggttctgtttatatgctggattacatttattgatttgtgtatgttgaaccagccttgcatcccagggatgaagcccacttgatcatggtggataagcttttcgatgtgctgctggattcggtttgccagtattttattgaggatttttgcatcaatgttcatcaaggatattggtctaaaattctcttttttggttgtgtctctgcccggctttggtatcaggatgatgctagcctcataaaatgagttagggaggattccgtctttttctattgactggaatagtttcagaaggaatggtaccagttcctccttgtacctctggtagaattcggctgtgaatctatctggtcctggactctttttggtcagtaagctattgattattgccacaatttcagagcctgttattggtctattcagagattcaacttcttcctggtttagtcttgggagggtgtatgtgtcgaggactttattcatttcttctagattttctagtttatttgcgtagaggtgtttgtagtattctctgatggtagtttgtatttctgtgggatcggtggtgatatcccctttatcattttttattgcgtctatttgattcttctctcttttcttctttattagtcttgctagcggtctatcaattttgttgatcctttcaaaaaaccagctcttggattcgttaattttttgaagggttttttgtgtctctatttccttcatttctgctctgattttagttatttcttgccttctgctagcttttgaatgtgtttgctcttgcttttctagttcttttaattgtgatctcagggtgtcaattttggatctttcctgctttctcctgtgggcatttagtgctataaatttccctctacacagtgctttgaatgtgtcccagagattctggtatgttgtgtctttgttctcattggtttcaaagaacatctttaattctgccttcatttcgttgtgtacccagaagtcattcaggagcaggttgttcagtttccatgtagttgtgcggttttgattgagtttcttaatcctgagttctagtttgattgcactgtggtctgagagatagtttgttataatttctgatcttttacatttgctgaggagtgctttacttccaactatgtggtcaattttggaataggtgtggtgtggtgctgaaaaaaatgtattttctgttgatttggggtggagaattctgtagatgtctatcaggtccacttggtgcagagctgagttcaattcctgggtatccttattaactctctgtctcgttgatctgtctaatgttgacagtgggatgttaaagtctcccattatttttgtgtgggaatctaagtctctttgtaggtcactcaggacttgccttatgaatctgggtgctcctgtattgggtgcatatatatttaggatagttagctcttcttgttgaattgatccctttaccaatatgtaatggccttctttgtctcttttgatctttgttggtttaaagtgtgttttatcagagactaggattgcaacccctgcctttttttgttttccattggcttggtagatcttcctccatccttttattttgagcctatgtgtgtctctgcacgtgagatgggtttcctgaatacagcacactgatgggtcttggctctttatccaacttgccagtctgtgtcttttaattggagcatttagttcatttacatttaaggttaatattgttatgtgtgaatttgatcctgtcatgatgatgttagctggttattttgctagttagttgatgcagtttcttcctagcctcgatggtctttacaatttggcatgtttttgcagtggctggtaccggttgttcctttccgtgtttagtgcttccttcaggatctcttgtagggcaggcctggtggtgacaaaatctctcagcatttgcttgtctgtaaaggattttatttctccttcacttatgaagcttagtttggctggatatgaaattctggattgaaaattcttttctttaagaatgttgaatattggcccccactctcttctggcttgtagagtttctgccgagagatccgctgttagtctgatgggcttccctttgtgggtaacccgacctttctctctggctgcccttaacattttttccttcatttcaactttggtgaatctgacaattatgtgtcttggagttgctcttctcgaggagtatctttgtggcattctctgtatttcctgaatctgaatgttggcctgccttgctagattggggtagttctcctggataatatcctgcagagtgttttccaacgtggttgcattctccccgtcactttcaggtacaccaatcagacatagatttggtcttttcacatagtcccatatttcttggaggctttgtttgtttctttttattcttttttctctaaacttcccttcttgcttcatttcattcatttcatcttccatcactgataccctttcttccagttgattgcatcggctcctgaggcttctgcactcttcatgtagttcttgagccttggctttcatctccatcagctcctttaagcacttctctgtattgattattctagttatactttcgtctaaatttttttcaaagttttcaacttctttgcctttggtttgaatttcctcctgtagctcggagtagtttgatcgtctgaagccttcttctctcaactcgtcaaaggcattctccgtccagctttgttctgttgctggtgaggagctgcgttcctttggaggaggagaggcgctctgctttttagagtttccagtttttctgctctgttttttccccatctttgtggttttatctatttttggtctttgatgatggtgatgtacagatgggattttggtgtggatgtcctttctgtttgttagttttccttctaacagacaggaccctcagctgcaggtctgctggagtttgctagaggtctactccagacactgcttgcctgggtaccagcagcggtggctgcagaacagcggattttcgtgaaccgcgaatgctgctgtctgatcgttcctctggaagttttgtctcagaggagtacccggccatgtgaggtgtcagtctgcccctgctggggggtgccttccagttaggctgctcgggggtcaggggtcagggacccacttgaggaggcagtctgcccgttctcagatctccagctgcgtgctgggagaaccactgctctcttcaaagctgtcagacagggacgtttaagtctgcagaggttactgctgtctttttgtttgtttgtgccctgcccccagaggtggagcctacagaggcaggcaggcctccttgagctgtggtgggctccacccagttcgagcttcagggctgctttgtttacctaagcaagcctgggcaatggtgggcacccatcccccagcctcgctgccaccttgcggtttgatcacagactgctctgctagcaatcagcgagactccatgggcgtaggaccctctgagccatgtgcgggatataatctcctggtgcgccgttttttaagcccaccggaaaagcgcagtattggggtgggagtgaccc

SEQ ID NO: 10292 - DNA, 5605 bp, Homo sapiens
tttttattttatttttaatttatttatatatatatacatatattttttattatagtttaagttttagggtacatgtgcacaacgtgcaggttagttacatacgtatacatgtgccatgttcgtgtgctgcacccattaactcgtcatttaacattaggtatatctcctaatgctatccctcccccctccccccaccccacaacaggccccggtgtgtgatgttccccttcctgtgtccatgtgttctcactgttcaattcccacctatgagtgagaacatgcggtgtttggttttttgtccttgtgatagtttgctgagaatgatggtttccagcttcatccgtgttcctacaaaggacatgaactcatccttttttatggctgcatagtattccctggtgtatatgtgccacattttcttaatccagtctatcattgttggacatttgggttggttccaagtctttgctattgtgaatagtgctgcaataaacatacgtgtgcatgtgtctttatagcagcatgatttataatcctttgggtatatacccagtaatgggatggctgggtcaaatggtatttctacttctagatccttgaggaatcaccacactgtcttccacaatggatgaactagtttacagtcccaccaacagtgtaaaagtgttcctatttctccacatcctctccagcacctgttgtttcctgactttttaatgattgccattctaactggtgtgagatggtatctcattgtgcttttgaattgcatttctctgatggccagggatgatgagcattttttcatgtgtctgttggctgcctaaatgtcttcttttgagaagtgtctgttcatatcctttgcccactttttgatggggttgtttgtttttttcttgtaaatttgtttgagttcattgtagattctggatatagcactttgtcagatgagtagattgcaaaaattttctcccattttgtaggttgccttttcactctgatggtagtttcttttgctgtgcagaagctctttcatttaataagatcccatttgtcaattttggcttttgttgccattgcttttggtgttttagacattgaagtccttgcccatgcctatgtcctgaatggtattgcctaggttttcttttagggtttttatggttttaggtctaacgtttaagtctttaatccatcttgaattaatttttgtataaggtgtaaggaagggatccagtttcagctttctacatatggctagccagttttcccagcaccatttattaaatagggaatcctttccccatttcttgtttttgtcaggtttgtcaaagatcagatggttgtagatatgtggcattatttctgagggctctgttctgttccattggtctatatctctgttttggtaccagtaccatgctgttttggttattacagccttgtagtatagtttgaagtcaggtagcatgatgcctccagctttattcttttggcttaggattgacttggcaatgtgggctgttttttggttccatatgaactttaaagtagttttttccaattctgtgaagaaagtcattggtagcttgatggggatggtattgaatctataaattaccttgggcagtatggccattttcacgatattgattcttcctacccatgagcatggaatattcttccatttgtttgtatcctcttttatttcattgagcagtggtttgtagttccccttgaagaggtccttcacatcccttgtaatttggattcctaggtattttattctctttgaagcaattgtgaatgggagttcactcatgatttggctctctgtttgtctgttattggtgtacaagaatgcttgtgattttcgcacattgattttgtatcctgagactttgctgaagttgcctattagcttaaggagattttgggctgagacgatggggttttctcaatatacagtcatgtcatctgcaaacagggacaatttgacatcctcttttcctaattgaataccctttatttccttctcctgcctgattgccctggccagaacttccaacactatgttaaataggagtgctgagagagggcatccctgtcttgtgccagttttcaaagggaatgcttccaggttttgcccattcagtatgatattggctgtgggtttgtcataaacagcttttaatattttgagatacgtcccatcaatacctaatttattgagaggttttagcatgaagcgttgttgaattttgtcaaaggccttttctgcatctattgagataatcatatggttttgtcgttggttctgtttatatgctggattatgtttattgatttgcgtatgttgaaccatccttgcatcccagggatgaagcccacttgatcatggtggataagctttttgatgtgctgctagattctgtttgccagtattttattgaggatttttgcatcgatgttcatcagggatattggtctaaaattctcttttttttgttgtgtctctgccaggctttagtatcaggatgatgctggcctcataaaatgagttagggaggattccctctttttctatcgattggaatagtttcagaaggaatggtaccagctcctccttgtacctctggtagaatttggctgtgaatccatctggtcttggactttttttggttggtaagctattaattattgcctcaatttcagagcctgttattggtctattcagagattcagcttcttcatggtttagtcttgggtgggtgtatgtgtccaggaatttacccatttcttctagattttctagtttattttcataggggtgtttatagtattctctgatggtagtttgtatttctgtgggatcggtggtgatatcccctttatcattttttattgcgtctatttgatttttctctcttttcttctttattagtcttgctagcggtctatcaattttgttgatcttttcaagaaaccagctcctggattcattgattttttgaagggtttttttgtatctctatttccttcagttctgctctgatcttagttatttcttgccttctgctagcttttgaatgtgtttgctcttgcttctctagttcttttaattgtgatgttagggtgtcaattttagatctttcctgctttctcttgtgggcatttattgctataaatttccctctacacactgctttgaatgtgtcccagagattccgatatgttgtgtctttgttctcgttggtttcaaagaacatctttatttctgccttcatttcgttatgtacccagtagtcattcaggagcaggttgttcagtttccatgtagctgagcggttttgaatgagtttcttaattctgagttctagtttgattgcactgtggtctgagagacagtttgttataatttctgttcttttacatttgctgaggagtgctttacttccaactatgtggtcaattttggaataagtgtggtgtggtgctgtgaagaatgtatattctgttgatttggggtggagagttctgtagatgtctattagaaccacttggtgcagagctgagttcaatcctggatatcctcattaactttctgtctcgttgatgtgtctaatgttgacagtggggtgttaaagtctcccattattattgtgtgggaatctaagtctctttgtaggtctctaaggacttgctttatgaatctgggtgctcctgtattgggtgcatatatatttaggatagttagttcttcttgttgaattgatccctttaccattatgtaatggccttctttgtctcttttgatctttgttggtttaaagtctgttttatcagagactaggattgcgacccctgcatttttttgctttccatttgcttggtagatcttcctccatccctttattttgaacctatgtgtgtctctgcacgtgagatgggtttcctgaatacagcacactgatgggtcttgactctttatccaatttgacagtctgtgtcttttaattgggacatttagcccattacatttaaggttaatattgttatgtgtgaatttgatcctgtcattatgatgttagctggttattttgcttgttagttgatgcagtttcttcctagcctcgatggtctttacaaattggcatgtttttgcagtggctggtaccggttgttcctttccatgtttagtgcttccttcaggagctcttttaggtgaggcctggtggtgacaaaatctctcagcatttgcttgtctgtaaagtattttatttctccttcacttatgaagcttagtttggctggatatgaaattctgggttgaaaattcttttctttaagaatgttgaatattggcccccactctcttctggcttgtagagttactgccaagagatcagctgttagtctgatgggcttccctttgtgggtaacctgacctttctctctggctgccattaacattttttccttcatttcaactttagtgaatctgacaattatgtgtcttggagttgctcttctcgaggagtatctttgtggcattctctgtatttcctgaatttgaatgttggcctgctttgctagattggggaagttctcctggataatatcctgcagaatgttttccaacttggttccattctccccgtcactttcaggtacaccaatcagacgtagatttggtcttttcacagagtcccatatttcttggaggctttttttgtttctttttattcttttttctctaaacttctctcgtcatttcatttcattaatttgatcttccatcactgataccctttcttccagttgattgaattggctactgaggcttgtgcattcgtcatgtagttcttgtgccttggttttcagctccatcaggtcctttaaggacttctctcattggttattctagttagccattcatctaatttttttcaaggtttttaacttctttgccatgggttcgaacttcttcctttagctcggagtagtttcatcatctgtagccttcttctctcaactcatcaaagtcattctccatccagctttgttccattgctagtgaggagctgcgttcctttggaggaggagaggtgctctgatttttagagtttccagttttgctgctctggtttttccgcatcttttggttttatctacctttggtctttgatgatggtgacgtacagatggggttttggtgtggatgtcctttctgtttgttagttttccttctaacagtcaggaccctcagctgcaagtctgttggagtttgctggaggtccactccagagcctgtttgcctggatatcagcagtggaggctgcagaacagcagatattggtgagcagcaaatgttgctgcatgatcattcctctggaagttttgtctcagaggattacctggccatgtgaggtgtcagtttgcccctacttgggggtgcctaccagttaggctacttgggggtcagggacccacttgaagagggtccattctcagatctccagctgcgtgctgggagaaccactactctcttcaaagctgtcagacagggacatttaagtctgcagaggattctgctgccttttgt

SEQ ID NO: 10293 - DNA, 6499 bp, Homo sapiens
tttagttttttagttttttttttattattattatactttaagttttagagtacatgtacacaatgtgcaggttagttacatatgtatacatgtgacatgctggtgtgctgcacccattaactcgtcatttagcattaggtatatctcctaatgctatccctcccccctccccccaccccacagcagtccccagagtgtgatgttccccttcctgtgtccatgtgttctcattcttcacttcccacctatgagtgagaatatgcagtgtttggttttttgttcttgtgatattttactgagcatgatgatttccaatttcatccatgtccctacaaaggacatgaactcatcatttttttttttttttttttttttttttttttttttttttttgagacggagtctcgctctgtcgcccaggctggagtgcagtggcgggatctagggttactgcaagctccgcctcccgggttcacgccattctcctgcctcagcctcccaagtagctgggactacaggcgcctgccactacgcccggctaattttttgtatttttagtagagacggggtttcaccgttttagccgggatggtctcgatctcctgacctcgtgatccgcccgcctcggcctcccaaagtgctgggattacaggcgtgagccaccgcgcccagccgaactcatcattttttatggctgcatagtattccacggtgtatatgtgccacattttcttaatccagtctatcattgttggacatttgggttggttccaagtctttgctattgtgaatagtgccacaataaacatacttgtgcatgtgtctttatagcagcatgatctatagtcctttgggtatatacccagtaatgggatggctgggtcaaatggtatttctagttctagatccctgaggaatcaccacactgacttccacaagggttgaactagtttacagtcccaccaatggtgtaaaagtggtcctatttctccacatcctctccagcacctgttgtttcctgactttttaatgatcaccattctaactggtgtgagatggtatctcattgtggttttgatttgcatttctctgatggccagtgatggtgagcattttttcatgtgttttttggctgcataaatgtcttcttttgagaagtgtctgttcatgtccttcgcccactttttgatggggttgtttgtttttgtcttgtaaatttgtttgagttcattgtagattctggatattagcccttcgtcagatgagtagattgcaaaaattttctcccattttgtaggctgcctgttcactctgatggtagtttcttttgctgtgcagaagctctttagtttaattagatcccatttgtcaattttggcttttgttgccattgcttttggtgttttagacatgaagtccttgcccatgcctatgtcctgaatggtaatgcctaggttttcttctagggtttttatggttttaggtctaacgtttaagtctaatccatcttgaattaatttttgtataaggtgtaaggaagggatccagtttcagctttctacatatggctagccagttttcccagcaccatttattacatagggaatcctttccccattgcttgtttttctcaggtttgtcgaagatcagatagttgtagatgtgcggcgttatttctgagggctctgttctgttccattgatctatatctctgttttggtaccagtaccatgctgttttggttactgtagccttgtagtaggttgaagtcaggtagtgtaatgcctccagctttgttcttttggcttaggattgacttggcaatgtgggcttttttttggttccatatgaactttaaagtagttttttccaattctgtgaagaaagtcattggtagcttgatggggatggcattgaatctataaattaccttggtcaatatggccattttcacgatattgattcttcctacccatgagcatggaatgttcttccatttctttgtatcctcttttatttcattgagcagtggtttgtagttctccttgaagaggtccttcacgtcccttgtaagttggattcctaggtattttattctctttgaagcaattgtgaatgggagttcactcatgatttggctctctgtttgtctgttattggtgtataagaatgcttgtgatttttatacattgattttgtatcctgagacttttggcttatcagcttaaggagattttgggctgagacaatggggttttctagatatacaatcatgtcatctgcaaacagggacaatttgagttcctcttttcctaattgaataccctttatttccttctcctgcctaactgccctggccagaacttccaacactatgttgaataggagtggtgagagagggcatccctgtcttggcgagttttcaaagggaatgcttccagtttttgcccattcagtatgatattggctgtgggtttgtcatagatagctcttattattttgagatacgtcccatcaatacctaatttattgagagtttttagcatgaagcgttgttgaattttgtcaaaggccttttctgcatctattgagataaccatgtggtttttgtctttggttctgtttatatgctggattacatttactgatttgcgtatattgaaccagtcttgcatcccagggatgaagcccacttgatcatggtggataagctttttgatgtgctgctggattcggtttgccagtattttattgaggatttttgcatcaatgttcatcaaggatattggtctaaaattctcttttttggttgtgtctctgcccagctttggtgtcaggatgatgctggcctcataaaatgagttagggaggattccctctttttctattgattggaatagtttcagaaggaatggtaccagttcctccttgtacctctggtagaattcggctgtgaatccatctggtcctggactctttttggttggtaagctattgattattgccacaatttcagagcctgttattcgtctattcagagattcaacttcttcctggtttagtcttgggagggtgtatgtgtcgaggaatgtatccatttcttctagattttctagtttatttgcgtagaggtgtttgtagtattctctgatggtagtttgtatttctgtgggatcggtggtgatatccccttttatcattttttattgcatctatttgattcttctctcttttcttctttattagtcttgctagtggtcgatcaattttgttgatcctttcaaaaaaccagctcctggattcattaattttttgaagggttttttgtgtctctatttccttcagttctgttctgattttagttatttcttgccttctgctagcttttgaatgtgtttgctcttgcttttctagttcttttaattgtgatgttagggtgtcaattttggatctttcctgctttcttttgtgggcatttcatgctataaatttccctctacacactgctttgaatgtgtcccagagattctggtatgttgtgtctttcttcttgttggtttcaaagaacatctttatttctgtcttcatttcgttatgtacccagtagtcattcaggagcacgttgttcagtttccatgtagttgagcggttttgagtgagtttcttaatcctgagttctagtttgattgcactgtggtctgagagacagtttgttataatttctgttcttttacatttgctgaggagagctttacttccaactatgtggtcaattttggaataggtgtggtgtggtgctggaaaaaatgtatattctgttgatttggggtggagagttctgtagatgtctattaggtctgcttggtgcagagctgagttcaattcctggatatccttgttgactttctgtctcgttgatctgtctaatgttgacagtggggtgttaaagtctcccattattattgtgtgggagtctaaatctctttgtaggtcactcaggacttgctttatgaatctgggtgctcctgtattgggtgcatatatatttaggatagtttgctcttcttgttgaattgatccctttaccattatgtaatggccttctttgtctcttttgatctttgttggtttaaagtctgttttatcagagactaggattgcaacccttgtcttttttttgttttccatttacttggtagatcttcctccatccttttattttgagtctatgtgtgtctctgcacgtgagatgggtttcctgaatacagcacactgatgggtcttgactctttatccaatttgccagtctgtgtcttttaattggagcatttagtccatttacatttaaagttgatattattatgtgtgaatttgatcctgtcattatgatgttcgctggttattttgctcgttagttgatgcagtttcttcctagcctcgatggtctttacaatttggcatgattttgcagtggctggtaccagttgttcctttccatgtttagtgcttccttcaggagctcttttagggcaggcctggttgtgacaaaatctctcagcatttgcttgtctgtaaaggattttatttctccttcacttatgaagtttagtttggctggatatgaagttctgggttgataattcttttctttaagaatgttgaatatcggcccccactctcttctggcttgtagagtttctgccaagagatccactgttagtctgatgggcttccctttgtgggtaacccgacctttctctctggctgcccttaacattttttccttcatttcaactttggtgaatctgacagttatgtgtcttggagttgctcttctcgaggagtatctttgtggcattctctgtatttcctgaatttgaatgttggcctgccttgctaggttggggaagttctgctggataatatcctgcggagtgttttccaacttggttccattctccccatcactttcaggtacaccaatcagatgtagatttggtcttttcacatagtcccatatttcttggaggctttgttcatttctttttattcttttttctctaaacttcccttctcgcttcatttcattcatttcatcttccatcactgataccctttctttcagttgatcgcatcggctcctgaggcttctgcattcctcacgtagttctcgagccttggctttcagctccatcagctcctttaagcacttctctgtattggttattctagttatacattcgtctaaatttttttcaaagtttttaacttctttgcctttgatttgaatttcttcctgtagctcggagtagtttgatcgtctgaagccttcttctctcaactcgtcaaagtcattctccatccagctttgttccgttgctggtgaggaactgcgttcctttggaagaggagaggcgctctgctttttagagtttccagtttttctgctctgttctttccccctctttgtggttttatcttcttttgttctttgatgatggtgatgtacagatgggtttttggtgtggatgtcctttctgtttgttagttttccttctaacagacaggaccctcagctgcaagtctgttggagtttgctagaggtccactccctaccctgtttgcccgggtaccagcagcggtagctgcacagcagcggattttcgtgaaccgtgaatgctgctgtctgatcgttcctctggaagttttttctcagaggagtacccggtcatgtgaggtgtcagtctgcccctactggggggtgcctcccagttaggctgctcaggggtcaggggtcagggacccacttgaggaggcagtctgcctgttctcagatctccagctgcgtgctaggagaaccactgctctcctcaaagctgtcagacagggacatttaagtctgcagaggttactgctgtctttttgtttgtctgtgccccgcccccagaggtggagcctacagaggcaggcaggcctccttgagctgtggtgggctccacccagttcgagcttcccggctgctttgtttacctaagcaagcctgggcaatggcgggcgcccctcccccagcctcactgccgccttgcagtttgatctcagactgctgtgctagcaatcagtgagactccgtgggcgtaggaccctccgagccaggtgcggcatataatctcctggtgcgccgttttttaagcccatcagaaaagcgcagtattcgggtgggagtgacccaattttccaggtgccgtctgtcacccctttctttgactaggaaagggaactccctgaccccttgcacttcccgagtgaggcaatgcctcgccctgcttcagctcgcacacggtgcgctgcacccactatcctgcacccactgtctggcactccctagtgagatgaacccggtacctcagatggaaatgcagaaatcacccatcttctgcgtcgctcacgctgggaactgtagaccggagctgttcctattcggccatctcggctcccacct

SEQ ID NO: 10294 - DNA, 5594 bp, Homo sapiens
ttttttgtttttctttttaattttattaatattatactttaagttttagggtacatgtgcacaacgtgcaggttggttacatatgtatacatgtgccatgttggtgtgctgcacccattaactcatcatttagcattaggtatatctcctaatgctatcccttccccctccccccaccccacaacagtccccggtgtgtgatgttccccttcctgtgtccatttgttctcattgttcaattcccgcccatgagtgagaacatgaggtgtttggttttttgtccttgcaatagtttgctgagaatgatggtttccagtttcatctatgtccctacaaaggacatgaactcatcctttttttatggctgcatagtattccatggtgtatatgtgccacattttcttaatccagtctatcattgttggacatttgggttggttccaagtctttgctattgtgaatagtgctgcaataaacatacatgtgcatgtgtctttataggagcatgatttataatcctttgggtatatacccagtattgggatggctgggtcaaatggtatttctagttctagatccttgagaaatctccacactgacttccacaatggttgaactagtttacagtcccaccaacagtgtaagagtgttcctatttctccacatcctctccagcacctgttgtttcctgactttttaatgatagtcattctaactggtgtgagatggtatctcattgtggttttgacttgcatttctctgatggccagtaatgatgagcattttttcatgtgttttttggctgcataaatgtcttcttttgagaattgtctgttcatatccttcgcccatttttgatggggttgtttgtttttttcttgtaaatttgttggagttcattgtagattctggatattagccctttgtcagatgagtaggttgcaaaaattttctaccattctgtaggttgcctgttcactctgatggtagtttcttttgctgtgcagaagctctttagtttaattagatcccatttgtcaattttggcttttgttgccattgcttttggtgtttcagacatgaagtccttgcccatgcctatgtcctgaatggtattgcctaggttttcttctagggtttttatggttttaggtctaacatgtaagtctttaatccatcttgaattaatttttgtgtaaggtataagaaagggatccagtttcagcgttctacatatggctagccagttttcccagcaccagttattcaatagggaatcctttccccatttcttgtttttctcaggtttgtcaaagatcagatagttgtagatgtaccgcattatttctgagggctctgttctgttacattggtttataactctgttttggtaccagtaccatgctgttttgtttactgtagccttgcagtatagtttgaagtcaggtagtgtgatgcctccagctttgttcttttggcttaggattgacttggcaatgcgggctcttttttggttccatatgaactttaaagtagttttttttttccaattctgtgaagaaagtcattggtagcttgatggggatggcattgaatctataaattaccttgggcagtatggccattttcacaatattgactcttcctactcatgagcatggaatgttctcccatttgtttgtatcctcttttatttcgatgagcagtggtttgtagttctccttgaagaggtccttcacgtcccttgtaagttggattcctaggtattttattctctttgaagcaattgtgaataggagttcactcatgatttggctctctgtttgtctgatattggtgtataggaatgcttgtgatttttgcaccttgattttgtatcctgagactttgctgaagttgcttatcagcttaaggagattttgggctgagacgatggggttttctagatatacagtcatgtcatctgcacacaggaaaaatttgacttcctcttttcctaattgaatgccctttatttccttctcctacctgattgccctggccagaacttccaatactatgttgaataggagtagtgagagaggacatccctgccttatgccagttttcaaagggaatgcttccagtttttgtccattcagtatgatgttggctgtgggtttgtcatagatagctcttattattttgagatgcgtcccatcaatacctaatttattgagagtttttagcatgaagggttgttgaattttgtcaaaggccttttctgcatctattgagataatcatgtggtttttgtctttggttctgtttatatgctggattacatttattgatttgcatatgttgaaccagccttgcatcccagggatgaagcccacttgatcattgtggataagctttctgatgtgttgctggattcactttgccagtattttattgaggatttttgcatcaatgttcatcaaggatattggtctaaaattctctttttttgttgtgtctctgcccggctttggtatcaggatgatgctggcctcataaaatgagttagggaggatttcctccttttccattgattggaatagttgcagaaggaatggtaccagctcctccttgtacctgtggtagaattcggctgtgaatccatctggtcctggactttttttggttggtaggctattaattattgcctcaatttcagagcctgttattggtctattcggagattcaacttcttcctggtttagtcttgggagggtgtatgtgttgaagaatgtatccatttcttctagattttctagtttatttgcatagaggtgtttatagtattctctgataatagtttgtatctctgtgggatcagtggtgatatctcctttgtcatttttttattgagtctatttgattcttctctcttttcttctttattagtcttgctagcagtctatcaattttgttgatcttttcaaaaaaccagctcctggattcattgatttttttgaagggttttttgtatctctatttccttcagttctgctctgatcttagttatttcttgccttctgctagcttttgaaggtgtttgctcttgcttctctagttcttttaattgtgatgttagggtgtcaattttagatctttcctgctttctcttatgggcatttactgctatacgtttccctctacacactgctttgaatgtgtcccagagattctggtatgttgtgtcttttttctcgttggtttcaaagaacatctttatttctgccttcattttgttatgtacccagcagtcattcaggagcaggttgttcagtttccatgtagttgagcagttttgagtgagtttcttaatcctgagttctagtttgatttcactgtggtctgagagacagttataatttctgttcttttacatttgctgaggagagctttagttccaactatgtggtaaattttggaataagtgtggtgtggtgctgagaagaatgtatattctgttgatttggggtggagagttctgtagatgtctattaggtcttcttggtgcagagctgagttcaattcctggatatccttgttaactttctgtctcattgatctgcctaatgttgacagtggggtgttaaagtctcccaacattattgtgtgggagtctaagtctctttgtaggtctctaatgacttgctttatgaatctaggttctcctgtattgggtgcatatacatttaggatagttagctcttcttgttgaattgatccctttaccattatgtaacagccttctttgtctcttttgatctttgttggtttaaagtctgttgaatcagagactaggattgcaacccctgcctttgtttttgatttgcttggtagatcttcctccatccctttattttgggcctatgtgtgtctctgcacgtgagatgggtttcctgaatacagcacactaataggtcttgactctttatccaatttgtctgtctgtgtcttttaaatggagcatttagcacatttacatttaaggttaatattgttatgtgtgaatttgatcctgtcgttatgatgttagctggttattttgctcattcgttgatgcagtttcttcctaaccttgatggtctttataatttggcatgtttttgcagtggctggtaccagttgttcctttccatgttttgtgcttccttcaggagctcttgtaatgcaggcctggtggtgacaaaatctctcagcatttgcttgtctgtaaaggattttatttctccttcacttatgaagcttaggttggctggatgtgaaattctgggttgaaaattcttttctttaagaacgttgaatattggcccccactctcttctggcttgtagagtttctgctgggagaccagctgttagtctgatgggcttccctttgtgggtaacctgacctttctctttggctacccttaccattttttccttcatttcaactttggtgaatctgacgattatgtgtcttggagttgctcttctcgaggagtatctttgtggcattctctgtatttcctgaatctgaatgttggcctgccttgctagattggggaagttctcctgggtaatatcctgcagggtgttttccaacttggttccattctccccgtcactttcaggtacaccaatcagacatagatttggtcttttcactagtcccttatttcttggaggctttgttcatttctttttattctttttttctctaaacttctcttcctgcttcatttcattcatttcatcttccatcactgataccctttcttccggttgatcgcatcggctactgatgcttgtgcattcatcacgtagttctcatgctgtggttttcagctccatcaggtcctttagggacttctctgcattggttattctagttagccattcgtctaatttttttcaaggtttttaacttctttgccattggttcaaacttactactttagcttggagtagtttgatcttctgaagccttcttctctcaactcatcaaagtcattctccatccatctttgttctgttgctggtgaggagctgcattcctttggaggaggagaggcgctctgatttttagagtttcctgtttttctgctctgttttttccccatctttgtggttttatctacctttggtctttgatgatggtgatgtacagatgggtttttggtgtgtatgtcctttctgtttgttagttttccttctaacagtcaggaccctcagctgcaggtctgttggagtttgctggaggtccactccagaccctgtttgcctgggtatcagcagtggtggctgcagaacagcagatattggtgaactgcaaatgctgctgcctgatcgttcctctggaagttttgtcttagaggagtacctggtcgtgtgagatgtcagtgtgcccctactggggggtgcctcccagttaggctgctcaggggtcagggacccacttgaggaggcagtctgtcttttctcagatctcaagctgcatgctgggagaaccactactttcttcaaagctgtcagacagggacatttaagtctgcagaggttactgctgccttttgt

SEQ ID NO: 10295 - DNA, 6053 bp, Homo sapiens
ttcttttttttttagtctttttttaaaaatttatttatttattattataatactttaagttttagggtacatgtgcacaatgtgcaggttagttacatgtgtatacatgtgccatggtggtgcgctgcacccactaactcgtcatccagcattaggtatatctcccaatgctatccctcccccctccccccaccccacaacaggccccagagtgtgatgttccccttcctgtgtccatgtgttctcattgttcaattcccacctgtgagtgagaatatgcggtgtttggttttttgttcttgcgatagtttactgagaatgatgatttccaatttcatccatgtccctacaaaggacatgaactcatccttttttatggctgcatagtattccatggtgtatatgtgccacattttcttaatccagtctatcattgttggatatttgggttggttccaagtctttgctattgtgaataatgccgcaataaacatacgtgtgcatgtgtctttatagcagcatgatttatagtcctttgggtatatacccagtaatgggatggctgggtcaaatggtatttctagttctagatctctgaggaattgccacactgacttccacaatggttgaactagtttacagtcccaccaacagtgtaaaattgttcctatttctccacatcctctccagcacctgttgtttcctgactttttaatgattgccattctaactggtgtgagatggcatctcattgtggttttgatttgcatttctctgatggccagtgatggtgagcattttttcatgtgttttttggctgcataaatgtcttcttttgagaagtgtctgttcatatccttcgcccactttttgatggggttgtttgtttttttcttgtaaatttgtttgagttcattgtagattctggatattagccctttgtcagatgagtaggttgcaaaaattttctcccattctgtaggttgcctgttcactctgatggtagtttcttttgctgtgcagaagctcttgagtttaattagatcccatttgtcaattttggcttttgttgccattgcttttggtgttttagacatgaagtccttgcccatgcctatgtcctgaatggtaatgcctaggttttcttctagggtttttatggttttaggtctaacgtttaagtctttaatccatcttgaattgatttttgtataagctgtaaggaagggatccaatttcagctttctacatatggctagccagttttcccagcaccatttattaaatagggaatcctttccccattgcttgtttttctcaggtttgtcaaagatcagatagttgtagatatgtggcattatttctgagggctctgttctgttccattgatctatatctctgttttggtaccagtactatgctgttttggttactgtagccttgtagtatagtttgaagtcaggtagtgtgatgcctccagctttgttcttttggcttaggattgatttggcaatgcgggctcttttttggttccatgtgaactttaaagtagttttttccaattctgtgaagaaagtcactggtagcttgatggggatggcattgaatctgtaaattaccttgggcagtatggccattttcacgatattgattcttcctacccatgagcatggaatgttcttccatttgtttgtatcctcttttatttccttgagcagtggtttgtagttctccttgaagaggtccttcacatcccttgtaagttggattcctaggtattttattctctttgaagcaattgtgaatgggaattcactcatgatttggctctctgtttgtctgttgctggtgtataagaatgcttgtgatttttgtacattgattttgtatcctgagactttgctgaagttgcttatcagcttaaggagcttttgggctgagacaatggggttttctagatatacaatcatgtcgtctgcaaacagggacaatttgacttcctcttctcctaattgaataccctttatttccttctcctgcctaattgccctggccagaacttccaacactatgttgaataggagtggtgagagagggcatccctgtcttgtgccagttttcaaagggaatgcttccagttttggcccattcagtatgatattggctgtgggtttgtcatagatagctcttattattttgaaatacatcccatcaatacctaatttattgagagtttttagcatgaagggttgttgaattttgtcaaaggccttttctgcatctattgagataatcatgtggtttttgtctttggttctgtttatatgctggattacatttattgatttgcgtatattgaaccagccttgcatcccagggatgaagcccacttgatcatggtggataagctttttgatgtgctgctggattcggtttgccagtattttactgaggatttttgcatcaatgttcatcaaagatattggtctaaaattctcttttttggttgtgtctctgcccggctttggtatcaggatgatgctggcctcatgaaatgacttagggaggattccctctttttctattgattggaatagtttcagaaggaatggtaccagttcctccttgtacctctggtagaatttggctgtgaatccatctggtcctggactctttttggttggtaagctattgatcattgccacaatttcagatcctgttattggtctattcagagattcaacttcttcctggtttagtcttgggagagtgtatgtgtccagaaatttatccatttcttctagattttctagtttatttgcatagaggtgtttgtagtattctctgatggtagtttgtatttctgtgggatcggtggtgatatcccctttatcattttttattgtgtctatttgattcttctctctttttttctttattagtcttgttagcggtctatcaattttgttgatcctttcaaaaaaccagctcctggattcattaattttttgaagggttttttgtgtctctatttccttcagttctgctctgattttagttatttcttgccttctgctagcttttgaatgtgtttgctcttgcttttctagttcctttaattgtgatgttagggtgtcaattttggatctttcctgctttctcttgtgggcatttagtgctataaatttccctctacacactgctttgaatgcgtccctgagattctggtgtgttgtgtctttgttctcgttggtttcaaagaacatctttatttctgccttcatttcattatgtatccagtagtcattcaggggcaagttgttcagtttccatgtagttgagccgttttgagtgagattcttaatcctgagttctagtttgattgcactgtggtctgagagatagtttgttataatttctgttcttttacatttgctgaggagagctttacttcccagtatgtggtcaattttggaataggtgtggtgtggtgctgaaaaaaatgtatattctgttgatttggggtggagagttctgtagatgtctattaggtccgcttggtgcagagctgagttcaattcctgggtatccttgttgactttctgtctcgttgatctgtctaatgttgacagtggggtgttaaagcctcccattattaatgtgtgggagtctaagtctctttgtaggtcactcaggacttgctttatgaatcttggtgctcctgtattgggtgcatataaatttaggagagttagctcttcttgttgaattgatccctttaccattatgtaatggccttctttgtctcttttgatctttgttggtttgaagtctgttttatcagagactaggattgcaacccctgcttttttttgttttccatttgcttggtagatcttcctccatccttttatcttgagcctatgtgtgtctctgcatgtgagatgggtttcctgaatacagcacactgatgggtcttgactctttatccaatttgccagtctgtgtcttttaattggagcatttagtccatttacattcaaagttaatattgttatgtgtgaatttgatcctgtcattatgatgttagctggtgattttgctcattagttgatggagtttcttcctagtcttgatggtctttacattttggcatgattttgcagtggctggtactggttgttcctttccatgtttagcgcttccttcaggagctcttttagggcaggcctggtggtgacaaaatctcttagcatttgcttgtctgtaacgtattttatttctccttcacttatgaagcttagtttggctggatatgaaattcggggttgaaaattcttttctttaagaatgttgaatattggcccccactctcttctggcttgtagggtttctgccgagagatccgctgttagtctgatgggcttccctttgagggtaacccaacctttctctctggctgcccttaacattttttccttcatttcaactttggtgaatctgacaattatgtgtcttggagttgctcttctcgaggagtatctttgtggcgttctctgtatttcctgaatctgaacgttggcctgccttgctagattggggaagttctcctggataatatcctgcagagtgttttccaacttggttccattctccccatcactttcaggtacaccaatcagacgtagatttggtcttttcacatagtcccatatttcttagaggctttgctcatttctttttattcttttttctctaaacttcccttctcacttcatttcgttcatttcatcttccatcgctgataccctttcttccagttgatcgcatcggctcctgaggcttctgcattcttcacgtagttctcgagccttgcttttcagctccatcagctcctttaagcacttctctgtattggttattctagttatacattcttctaaatttttttcaaagttttcaacttctttgcctttggtttgaatgtcctcccgtagctcagagtaatttgatcgtctgaagccttcttctctcagctcgtcaaagtcattctccatccagctttgttccgttgctggtgaggaacttcatttctttggaggaggagaggcggtctgctttttagagtttccagtttttctgttctgttttttccccatctttgtggttttatctacttttggtctttgatgatggtgatgtacagatgggtttttggtgtggatgtcctttctgtttgtcagttttccttctaacagacaggacactcagctgcaggtctgttggagtaccctgccgtgtgaagtgtcagtgtgcccctgctggggggtgcctcccagttaggctgcttgggggtcaggggtcagggacccacttgaggaggcagtctgcctgttctcagatctccagctgtgtgctgggagaaccactgctctcttcaaagctgtcagacagggacatttaagtgtgcagaggttactgctgtctttttgtttgtctgtgccctgaggtggagcctacagaggcaggctggcctccttgagctgtggtgggctccacccagttcgagcttccaggctgctttgtttcagtaagcaagcctgggcaatggcgggcgcccctcccccagcctctctgccgccttgcagtttgatctcagactgctgtgccagcaatcagcgagactccgtgggcgtaggaccctctgatccaggtgcgggatataatctcctgatgcgccgttttttaagcctgtcggaaaagtgcagtattggggtgggagtgaccccattttccaggtgccgtccgtcacccctttctttgactcggaaagggaactccctgaccccttgcacttcctgagtgaggcaatgcctcgccctgcttcggctcgcgcacagtgcacgcacccactgacttgtgcccactgtgcggcactccctagtgagatgaaccccatacctcagatggaaatgcagaaatcactgtcttctgggtcgctcaggctgggagctgtagacctgagctgttcctattcggccatcttggctcct

SEQ ID NO: 10296 - DNA, 6040 bp, Homo sapiens
ttgacttttctttttttttttaatttaagttttagggtacatgtgcacattgtgcaggttagttacatatgtatacatgtgccacgctggtgcactgcacccactaactcgtcatctagcattaggtatatctcccaatgctatccctcccccctccccccaccccaccatagtccccagagtgtgatattccccttcctgtgtccatgtgatctcattgttcaattcccacctatgagtgagaatatgcggtgtttggttttttgttcttgcgatagtttactgagaatgatgatttccagtttcatccatgtccctacaaaggacataaactcatcattttttatggctgcatagtattccatggtgtatatgtgccacattttcttaatccagtctatcattgttggacatttgggttggttccaagtctttgctattgtgaataatgccgcaataaacatacgtgtgcatgtgtctttatagcagcatgatttatagtcctttgggtatatacccagtaatgggatgtctgggtcaaatggtatttctagttctagatccctgaggaatcaccacactgacttccacaatggttgaactagtttacagtcccaccaacagtgtaaaagtgttcctatttctccacgtcctctccagcacctgttgtttcctgactttttaatgattgccgttctaactggtgtgagatggtatctcattgcggttttgatttgcatttctctgatggccagtgatgattagcattttttcatgtgttttttggctgcataaatgtcttcttttgagaagtgtctgttcatgtccttcgcccactttttgatggggttgtttgtttttttcttgtaaatttgtttgagttcattgtagattctggatattagccctttgtcagatgagtaggttgtgaaaattttctcccattttgtaggttgcctgttcactctcatggtagtttcttttgctgtgcagaagctctttagtttaattagatcccatttgtcaattttgtcttttgttgccattgcttttggtgttttggacatgaagtccttgcccatgcctatgtcttgaatggtgatgcctaggttttcttctagggtttttatggttttaggtctaacgtttaagtctttaatccatcttgcattgatttttgtataaggtgtaaggaagggatccagtttcagctttctacatacggctagccagttttccccgcaccatttattaaatacggaatcctttccctattgcttctttttctcaggtttgtcaaagatcagatagttatagatatgcggcattatttctgagggctctgttctgttccattgatctatatctctgttttggtaccagtaccatgctgttttggttactgtagccttgtagtatagtttgaagtcaggtagtgtgatgcctccagctttgttcttttggcttaggattgccttggcaatgcgggctcttttttggttccgtatgaactttaaagtagttttttccaattctgtgaagaaagtcattggtagcttgatggggatggcattgaatctgtaaattaccttgggcagtatggccattttcacgatattgattcttcctacccatgagcatggaatgttcttccatttgtttgtatcctcttttatttccttgagcagtggtttgtagttctccttgaagaggtccttcacctcccttgtaagttggattcctaggtattttattctctttgaagcaattgtgaatgagagttcactcatgatttggctctctgtttgtctgttattggtgtataagaatgcttgtgatttttgtacattgattttatatcctgagactttgctgaagttgcttatcagcttaaggagattttgggctgagacaatggggttttctagatatacaatcatgtcatctgcaaacagggacaatttgacttcctcttttcctaattgaataccctttcttttcttctcctgcctaattgccctggccagaacttccaacactatgttgaataggagtggtgagagagggcatccctgtcttgtgccagttttcaaagggaatgcttccagtttttgcccattcagtatgatattggctgtgggtttgtcatagatagctcttattattttgaaatacgtcccatcaatacctaatttattgagagtttttagcatgaagggttgttgaattttgtcaaaggctttttctgcatctattgagataatcatgtggtttttgtctttggctctgtttatatgctggattacatttattgatttgcatatattgaaccagccttgcatcccagggatgaagcccacttgatcatggtggataagctttttgatgtgctgctggattcgttttgccagtattttattgaggatttttgcatcaatgttcatcaaggatattggtctaaaattctcttttttggttgtgtctctgcctggctttggtatcagaatgatgctggcctcataaaatgagttagggaggattccctctttttctattgattggaatagtttcagaaggaatggtaccagttcctccttgtacctctgatagaattcggctgtgaatccatctggtcctggactctttttggttggtaaactattgattattgccacaatttcagctcctgttattggtctattcagagattcaacttcttcctggtttagtcttgggagagtgtatgtgttgaggaatttatccatttcttctagattttctagtttatttgcgtagaggtgtttgtagtattctctgatggtagtttgtatttctgtgggatcggtggtgatatcccctttatcattttttattgtgtctatttgattcttctctctttttttctttattagtcttgctagcagtctatcaattttgttgatcctttcaaaaaaccagctcctggattcattaattttttgaagggttttttgtgtctctatttccttcagttctgctctggttttagttatttcttgccttctgctagcttttgaatgtgtttgctcttgcttttctagttcttttaattgtgatgttagggtgtcaattttggatctttcctgctttctcttgtgggcatttagtgctataaatttccctctacacactgctttgaatgcgtcccagagattctggtatgttgtgtctttgttctcattggtttcaaagaacatctttatttctgccttcatttcgttatgtatccagtagtcattcaggagcaggttgttcagtttccatgtagttgagcggttttgagtgagattcttaatcctgagttctagtttgattgcactgtggtctgagagatagtttgttataatttctgttcttttacatttgctgaggagagctttacttccaactatgtggtcaattttggaataggtgtggtgtggtgctgaaaaaaatgtatattctgttgatttggggtggagagttctgtagatgtctattaggtccgcttggtgcagagctgagttcaattcctgggtatccttgttgactttctgtctcgttgatctgtctaatgttgacagtggggtgttaaagtctcccattattaatgtgtgggagtctaagtctctttgtaggtcactcaggacttgctttatgaatctgggtgctcctgtattgggtgcatatatatttaggatagttagctcttcttgttgaattgatccttttaccattatgtaatggccttctttgtctcttttgatccttgttggtttaaagtctgttttatcagacactaggattgcaacccctgcctttttttgttttccatttgcttggtagatcttcctccatctttttattttgagcctatgtgtgtctctgcacatgagatgggtttcctgaatacagcacactgatgggtcttgactctttatccaatttgccagtctgtgtcttttaattggagcatttagtccatttacatttaaagttaatattgttatgtgtgaatttgatcctctcattatgatgttagctggtgattttgctcgttagttgatgcagtttcttcctagtctcgatggtctttacattttggcatgattttgcagcggctggtactggttgttcctttccatgtttagctcttccttcaggagctcttttagggcaggcctggtggtgacaaaatctctcagcatttgcttgtctgtaaagtattttatttctccttcacttatgaagcttagtttggctggatatgaaattctgggttgaaaattctttcctttaagaatgttgaatattggcccccactctcttctggcttgtagggtttctgccgagagatccgctgttagtctgatgggcttccctttgagggtaacccgacctttctctctggctgcccttaacattttttccttcatttcaactttggtgaatctgacaattatgtgtcttggagttgctcttctcaaggagtatctttgtggcgttctctgtatttcctgaatctgaacgttggcctgccttgctagattggggaagttctcctggataatatcctgcagagtgttttccaacttggttccattctccccatcactttcaggtacaccaatcagatgtagatttggtcttttcacatagtcccatatttcttggaggctttgctcatttctttttattcttttttctctaaacttcccttctcgcttcatttcattcatttcatcttccatcgctgataccctttcttccagttgatcgcatcagctcctgaggcttctgcattcttcacgtagttctcgagccttggttttcagctccatcagctcctttaagcacttctctgtattggttattctagttatacattcttctaaatttttttcaaagttgtcaacttctttgcctttggtttgaatgtcctcccgtagctcagagtaatttgatcgtctgaagccttcttctctcagctcgtcaaagtcattctccatccagctttgttccgttgctggtgaggaactgcgttcctttggaggaggagagatgctctgcgttttagagtttccagtttttctgttctgttttttccccatctttgtggttttatctacttttggtctttgatgatggtgatgtacagatgggtttttggtgtggatgtcctttctgtttgttagttttccttctaacagacaggaccctcagctgcaggtctgttggaataccctgccgtgtgaggtgtcagtgtgcccctgctggggggtgcctcccagttaggctgctcgggggtcaggggtcagggacccacttgaggaggcagtctgcccgttctcagatctccagctgcgtgctgggagaaccactgctctcttcaaagctgtcagacagggacatttaagtctgcagaggttactgctgtctttttgtttgtctgtgccctgcccccagaggtggagcctacagaggcaggcaggcctccttgagctgctgtgggctccacccagttcgagcttccaggctgctttgtttacctaaggaagcctgggcaatggcgggcgcccctcccccagcctcgctgccaccttgcagtttgatctcagactgctgtgctagcaatcagcgagactccatgggcgtatgaccctctgagccaggtgcgggatataatctcgtggtgcgctgttttttaagccggtccgaaaagcgcaatattcgggtgggagtgacccgattttccaggtgcgtccctcacccctttctttgactcggaaagggaagtccctgaccccttgcgcttcccaagtgaggcaatgcctcgccctgcttcagctcgcgcacggtgcgcgcacccactgacctgcgcccactgtctggcactccctagtgagatgaacccggtacctctgatggaaatgcagaaatcacccgtcttctgtgtcgctcacgctgggagcggtagaccggagctgttcctattcggccatcttggctcctccccagcctt

SEQ ID NO: 10297 - DNA, 6050 bp, Homo sapiens
cttctttttttttttttttattatactttaagttttagggtacatgtgcacgttgtgcaggttagttacatatgtatacatgtgccacgctggtgcgctgcacccactaactcgtcatctagcattaggtatatctcccaatgctatccctcccccctccccccaccctaccacagtccccagagtgtgatattccccttcctgtgtccaggtgatctcattgttcaattcccacctatgagtgagaatatgcggtgtttggttttttgttcttgcgatagtttactgagaatgatgatttccaatttcatccatgtccctacaaaggacatgaactcatcattttttatggctgcatagtattccatggtgtatatgtgccacattttcttaatccagtttatcattgttggacatttgggttggttccaagtctttgctattgagaataatgccgcaataaacatacgtgtgcatgtgtctttatagcagcatgatttatagtcatttgggtatatacccagtaatgggatggctgggtcaaatggtatttctagttctagatccctgaggaatcgccacactgacttccacaatggttgaactagtttacagtcccaccaacaatgtaaaagtgttcctatttctccacatcctctccagcacctgttgtttcctgactttttaatgattgccattctaactggtgtgagatggtatctcattgtggttttgatttgcatttctctgatggccagtgatgatgagcattttttcatgtgttttttggctgcataaatgtcttcttttgaaaagtgtctgttcatgtccttcgcccactttttgatggggttgtttgtttttttcttgtaaatttgtttgagttcattgtagattctggatattagccctttgtcagatgagtaggttgcgaaaattttctcccattttgtgggttgcctgttcactctgatggtagtttcttttgctgtgcagaagctcttgagtttaattagatcccatttgtcaattttgtcttttgttgccattgcttttggtgttttggacatgaagtccttgcccatgcctatgtcctgaatggtaatgcctaggttttcttctagggtttttatggttttaggtctaacgtttaaatctttaatccatcttgaattgatttttgtataaggtgtaaggaagggatccagtttcagctttctacatacggctagccagttttcccagcaccatttattaaatagggaatcctttccccatttcttgtttttctcaggtttgtcaaagatcagacagttgtaggtatgcggcgttatttctgagggctctgttctgttccattgatctatatctctgttttggtaccagtaccatgctgttttggttactgtagccttgtagtaaagtttgaagtcaggtagtgtgatgcctccagctttgttcttttggcttaggattgacttggcgatgcgggctcttttttggttctatatgaactttaaagtagttttttccaattctgtgaagaaagtcattggtagcttgatggggatggcattgaatctgtaaattaccttgggcagtatggccattttcacaatattgattcttccgacccatgagcatggaatgttcttccatttgtttgtatcctcttttatttccttgagcagtggtttgtagttctccttgaagaggtccttcacatcccttgtaagttggattcctaggtattttattctctttgaagcaattgtgaatgggagttcactcatgatttggctctctgtttgtctgttgttggtgtataagaatgcttgtgatttttgtacattgattttgtatcctgagactttgctgaagttgcttgtcagcttaaggagattttgggctgaaacaatggggttttctagatatacaatcatgtcatctgcaaacagggacaatttgacttcctcttttcctaattgaataccctttatttccttctcctgcctgattgccctggccagaacttccaacactatgttgaataggagtggtgagagagggcatccctgtcttgtgccagttttcaaagggaatgcttccagtttttgcccattcagtatgatattggctgtgggtttgtcatatatagctcttattattttgaaatacgtcccatcaatacctaatttattgagagtttttagcatgaagggttgttgaattttgtcaaaggctttttctgcatctattgagataatcatgtggtttttgtctttggttctgtttatatgctggattacatttattgatttgcgtatattgaaccagccttgcatcccagggatgaagcccacttgatcatggtggataagctttttgatgtgctgctggattcggtttgccagtattttattgaggatttttgcatcaatgttcatcaaggatattggtctaaaattctctttttttgttgtgtctctgcccggctttggtatcagaatgatgctggcctcataaaatgagttagggaggattccctctttttctattgattggaatagtttcagaaggaatggtaccagttcctccttgtacctctggtagaattcggctgtgaatccatctggtcctggactctttttggttggtaagctattgcttattgccacaatttcagctcctgttattggtctattaggagattcaacttcttcctggtttagtcttgggagagtatatgtgtcgaggaatttatccatttcttctagattttctagtttatttgcgtagaggtgtttgtagtattctctgatggtagtttgtatttctgtgggatcggtggtgatatcccctttatcattttttattgtgtctatttgattcttctctctttttttctttattagtcttgctagtggtctatcaattttgttgatcctttcaaaaaaccagctcctggattcattgattttttgaagggttttttgtgtctctatttccttcagttctgctctaattttagttatttcttgccttctgctagcttttgaatgtgtttgctcttgcttttctagttcttttaattgtgatgttagggtgtcaattttggatctttcctgctttctcttgtgggcatttagtgctataaatttccctctacacactgctttgaatgcgtcccagagattctggtatgttgtgtctttgttcttgttggtttcaaagaacatctttatttctgccttcatttcattatgtacccagtagtcattcaggagcaggttgttcagtttccatgtagttgagcggctttgagtgagattcttaatcctgagttctagtttgattgcactgtggtctgagagatagtttgttataatttctgttcttttacatttgctgaggagagctttacttcccagtatgtggtcaattttggaataggtgtggtgtggtgctgaaaaaaatgtatattctgttgatttggggtggagagttctgtagatgtctattaggtctgcttggtgcagagctgagttcaattcctgggtatccttgttgactttctgtctcgttgatctgtctaatgttgacagtggggtgttaaagtctcccattattattgtgtgggagtctaagtctctttgtaggtcactcagaacttgctttatgaatctgggtgctcctgtattgggtgcatatatatttaggatagttagctcttcttgttgaattgatccctttaccattatgtaatggccttctttgtctcttttgatctttgttggtttaaagtctgttttatcagagactaggattgcaacccctgcctttttttgttttccatttgcttggtagatcttcctccatccttttattttgagcctatgtgtgtctctgcacgtgagatgggtttcctgaatacagcacactgatgggtcttgactctttatccaatttgccagtctgtgtcttttaattggagcatttagtccatttacatttaaagttaatattgttatgtgtgaatttgatcctgtcattatgatgttagctggtgattttgctcgttagttgatgcagtttcttcctagtctcgatggtctttacattttggcatgattttgcagcggctggtactggttgttcctttccatgtttagcgcttccttcaggagctcttttagggcaggtctggtggtgacaaaatctctcagcatttgcttgtctgtaaagtactttatttctccttcacttatgaagcttagcttggctggatatgaaattctgggttgaaaattcttttctttaagaatgttgaatattggcccccactctcttctggcttgtagggtttctgccgagagatccgctgttagtctgatgggcttccctttgagggtaacccgacctttctctctggctgcccttaacattttttccttcatttcaactttggtgaatctgacaattatgtgtcttggagttgctcttctcgaggagtatctttgtggcgttctctgtatttcctgaatctgaacgttggcctgccttgctagattggggaagttctcctggataatatcctgcagagtgttttcccacttggttccattctccccatcactttcaggtacaccaatcagacgtagatttggtcttttcacatagtcccatatttcttggaggctttgctcatttctttttattcttttttctctaaacttcccttctcgcttcatttcattcatttcatcttccattgctgacaccctttcttccagttgatcgcatcggctcctgaggcttctgcattcttcacgtagttctcgagccttggttttcagctccatcagctccttaaagcacttctctgtattggttattctagttatacattcttctaaatttttttcaaagttttcaacttctttgcctttggcttgaatgtcctcccatagctcagagtaatttgatcgtctgaagccttcttctctcagctcgtcaaagtcattctccatccagctttgttctgttgctggtgaggagctgcgttcctttggaggaggagaggtgctctgatttttagagcttccagtttttctgttctgttttttccccatctttgtggttttatctacttttggtctttgatgatggtgatgtacagatgggtttttggtgtggatgtcctttctgtttgttagctttccttctaacagacaggaccctcagctgcaggtctgttggaataccctgccgtgtgaggtgtcagtgtgcccctgctggggggtgcctcccagttaggctgctcaggggtcaggggtcagggacccacttgaagaggcagtctgccggttctcagatctccagctgcgtgctgggagaaccactgctcccttcaaagctatcagacagggacatttaagtctgcagaggttactgctgtctttttgtttgtctgtgccctgcccccagaggtggagcctacagaggcaggcaggcctccttgagctgtggtgggctccacccagttcgagcttcctggctgctttgtttacctaagcaagcctgggcaatggcgggcgcccctcccccagcctcgctgccgccttgcagtttgatcacagactgctgtgctagcaatcagcgagattccgtgggcgtaggaccctctgagccaggtgtgggatatagtctcgtggtgcgccgttttttaagccggtctgaaaagcgcaatgttcgggtgggagtgacccgattttccaggtgcgtccgtcacccctttctttgactcggaaagggaactccctgaccccttgcgcttcccaggtgaggcaatgcctcgccctgctttggctcgctcaccgtgcgcgcacccactggcctgcgcccactgtctggcgctccctagtgagatgaacccggtacctcagatggaaatgcagaaatcaccgtcttctgcgtcggtcacgctgggagctgtagaccggagctgttcctattcggccatcttggctcctccccctcaaggcttcttt

SEQ ID NO: 10298 - DNA, 5159 bp, Homo sapiens
attctttttttttattattatactttaagttttagggtacatgtgcacaatgtgcaggtttgttacatatgtatacatgtgccatgttggtatgctgcacccattaactcgtcacttagcattaggtatatctcctaatgctatccctcccctatccacgcaccccacaacaggctccggtgtgtgatattccccatcctgtgtccatgtgttctcattgttcaattcccacctatgagtgagaacatgcagtgtttggttttttgtccttgcaatagtttgctgagaatgatggtttccagcttcatccatgtccctacaaaggacatgaactcatccttttttatggctgcatagtactccatgatgtatatgtgccacattttcttaatccactctatcattgttggacatttgggttggttccaagtctttgctattgtgaatagtgccgcaataaacatatgtgtgcatgtgtctttataggagcatgatttataatcctttgggtatatacccagtaatgggattgctgggtcaaatggtatttctagttctagatccctgaggaatcatcacactgacttccacaatggttgaactagtttacagtcccaccaacagtgtaaaagtgttcatatttctccacatcctctccagcacctgttgtttcctgacattttaatgatcgccattctaactggtgtgagatggtatctcactatggttttgatttgcatttctctgatggccagtgatgatgagcattttttcatgtgttttttggctgcataaatgtcttcttttgggaagtgtctgttcatatccttcatccacttgttgatggggttttttgtttttttcttgtaaatttgtttgagttcattgtagattctggatattagccctttgtcagaggagtagattgcaaaaattttctcccattctgtaggttgcctgttcactctgatggtagtttcttttgctgtgcacaagctctttactttaattagatcccaattgtcaatttttgcttttgttgccatggcttttggtgttttagacatgaagtccttgcccatgcctatgtcctgaatggtattgcctaggttttcttctagggtttttatggttttaggtctaacatttaaatctttaatccatcttgaattaattttagtataaagtgtaaggaagggatccagtttcagctttctacctatggttagccagttttcccagtagcatttattaaatagggaatcctttccccattgcttgtttttgtcagggttgtcaaagatcagatagttgtagatacgtggcattatttctgagggctctgttctgttccattggtctatatctctgttttggtaccagtaccatgctgttttggttactgtagccttgtagtatagtttgaagtcaggtagtgggatgcctccagctttgttcttttggcttaggattgacttggcaatgtgggctcttttgtggttccatatgaactttaaagtagttttttccaattctgtgaagaaagtctttggtagcttgatggggatggcattgaatctataaattaccttgggcagtatggccattttcacgatattgattcttcctacccatgagcatggaatgttcttccatttgtttgtatcctctcttatttcattgagcagtggtttgtagttctcattgaagaggtccttcacatcccttctaagttggattcctaggtattttattctctttgaagcaattgtgaatgggagatcattcatgatttggctctctgtctgttattagtgtataagaatgcttgtgatttttgtacattgattttgtattctgagactttgctgaagttgcttatcagcttaaggagattttgggctgagacaatggggttttctgatatacaatcatgtcatctgcaaacagggacaatttgacttcctcttttcctaattgaataccctttatttccttctcctgcctgattgccctggccagaacttccaacactatgttgaataggagtggtgagagagggcatccctgtcttgtgccagttttcaaagggaatgcttccagtttttgcccattcagtattatattggctgtgggtttgtcataaatagctcttattattttgagatatgtcccatcaatacttaatttattgagagtttttagcatgaagggctgttgaattttgtcaaaggccttttctgcatctattgagataatcatgtggtttttgtcgttggttctgttgagatgctggattacatttattgatttgcgtatattgaaccagccttgcatcccacggatgaagtccacttgatcatggtggataagctttttgatgtgctgctggattcggtttgccagtattttattgaggatttttgcatggatgttcattagggatattggtctaaaattctctttttttgttgtgtctctgcccggctttggtatcaggatgatgctggcctcataaaatgagttagggaggattccttctttttctattgattggaatagtttcagaaggaatggtaccagctcctccttgtacctctggtagaattcggctgtgaatccatctggtcccagacttttttttggttggtaagctattaattattgcctcaatttcagagcctgttattggtccattcagagattcaacttcttcctggtttagtcttgggagggtgtatgtgtccaggaatttatccatttcttccagattttctagtttatttgtgtagaggtgtttatagtatgctccgatggtagtttgtatttctgtgggatttgtggtgatatcccctttatcattttttattgcatctatttgattcttctctcttttcttctttattagtcttgctagtggtctatcaattttgtttatcttttcgaagaaccagctcctggattcattgattttttgaagggtttttttgtgtctctatttccttcagttctgctctgatcttagttgtttcttgccttctgctagcttttgaatgtgtttgctcttgcttctctagttcttttaattctgttgttagggtgtcaattttatatctttcctgctttctcttgtgggcacttagtgctataaatttccctctacacactgctttgaatgtgtcccagagattctggtatgttgtctctttgttctcgttggtttcaaagaacatatttatttctgccttcatttcattatgtacccagtagtcattcaggagcaggctgttcagtttccatgtagttgagaggttttgagtgagtttcttaatcctgagttctagtttgattgcactgtggtctgagagacagtttgttataatttctgttcttttacatttgctgcggagtactttacttccaactgtgtggtcaattttggaataggtgtggtgtggtgctgaaaagaatgaatattctgttgatttggggtggagagatctgtagatgtctattaggtccgcttggtgcagagctgagttcaattcctggatatccttgttaactttctgtctcattgatctgtctaatgttgacagtggggtgttaaagtctcccatcattattgtgtgggagtctaagtctgtttctaggtctctaagcacttagtttatgaatctgggtgctcctgtattgggtgcatatatatgtaagatagttagctcttcttgttgaattgatccctttaccattatgtaatggccttctttgtctcttttgatttttgttggtttaaagtctgttttatcagagactaggattgcaacccctgccttttttgttttccgtttgcttggtagatcttccccccctcctttattttgagcctatgtgtgcctttgcatgtgagatgggtttcttgaatacagcacactgatgggtcttgactcttcatccaatttgccagtctgtgtcttttaattggagcatttagcccatttacatttaaggttaatattcttttttttttttttttttttttgagacggagtctcgctctgtcgcccaggctggagtgcagtggcgggatctcggctcactgcaagctccgcctcccgggttcacgccattctcctgcctcagcctcccaagtagctgggactacaggcgcccgccactacgcccggctaattttttgtatttttagtagagacggggtttcaccgttttagccgggatggtctcgatctcctgacctcgtgatccgcccgcctcggcctcccaaagtgctgggattacaggcatgagccactgcgcccggccaggttaatattcttatgtgtgaatttgatcctgtcatcatgatgttagctggttattttgctcattagttgatgcagtttcttcctagcctagatggcctttacaatgcggcatgtttttgcagtggctggtaccggttgttcctttccatgtttagtgctttcttcaggagctcttgtagggcaggcctggtggtgacaaaatctctcagcatttgcttgtctgtaaaggattttatttctccttcacttatgaagcttagtttggctggatatgaaattctgggttgaaaattcttttaagaatgctgaatattggcccccactctcttctggcttgtagagtttctgccaagagatcagctgttagtctgatgggcttccctttgtgggtaacccgatctttctctctggctgcccttaacattttttccttcatttcaaccttggtgaatctgacaattatgtatcttggagttgctcttctcgaggagtatctttgtggcgttctctgtatttcctgaatttgaatgttggcctgccttgctatattggggaagttctcctggataatatcctgcagagtgttttccaacttggttccattctccctgtcactttcaggtacaccaatcagacacagatttggtcttttcacatagtcccatatttcttggaggctttgttcgtttctttttttttttctctaaacttttcttcttgcttcatttcattcatttgatcttccatcactgatacgctttcttccagttgattgaatcagctactgaggcttgtgcattcatcatgtagttctcgtgctgtggttttcagctc

SEQ ID NO: 10299 - DNA, 27473 bp, Homo sapiens
ttcttttttttattattattatactttaagttctagggtacatgtgcacaacctgcaggtttgttacatatgtacacatgtgccatgatcgtgtgctgcacccattaacttgtcatttacattaggtatatctcctaatgctatgcctcccccctcccccaccaaacgacaggccccagtatgtggtgttccccaccctgtgtccaagtattctcattgttcaattcccacctatgagtgagaacatgtggtgtttggctttctgtccttgtgatagtttgctcagaatgatggtttccagcttcatccatgtccctacaaaggacaagaactcatccatttttatggctatatagtattccatggtgtatatgtgccacattttcttaatccagtctatcattgatggacatttgggttggttccaagtctttgctattgtgaatagtgtctcaataaacatacgtgtgcatgtgtctttatagcagcatgatttacaatcctttgggtatatacccagtaatgggatggctgggtcaagtggtatttctagttctagatccttgaggaatagccacactgtcttccacaatggttgaactagtttacagtcccaccaacattgtaaaagtgttcctatttctccacatcctctccagcacctgttttttcctgactttttaatgatggccattctgactggtgagagatggtatctcattgtggttttgatttgcatttctctgatggccagtgatgatgaacattttttcatgtgtctgttggctgcataaatgtcttcttttgagaagtgtctgttcacatcctttgcccactttttgatggaattgtttgattctttcttctaaatttatttaggttctttgtggattctggatattagccctttgtcagatgagtaggttgcgaaaattttctcccattctgtaggttgcctgttcactctgatggtagtttcttttactgtgcacaagctctttagtttaattagatcccatttgtcaattttggcttttgtagccattgcttttggtgttttagacatgaagtccttgcccatgcctatgtcctgaatggtactgcctaggttttctcctagggtttttatggttttaggtctgacatttaagtctttaatccatcatgaattaatttttgtataaggtgtaaggaagggatccagtttcagctttctacatataggtagccagttttcccagcatcatttattaaatagggaatcctttccccatttcttgtttttgtcaggtttgtcaaagatcagatggttgtagatgtgtggtattatttctgagggctctgttctgttccattggtctatatctctgttttggtaccagtatcatgctgtcttggttactgtagccttgtagtgtagtttgaagtcaggtagggtgatgcctccagctttgttattttggcttaggattgacttggcatgcaggctcttttttggttccatatgaactttaaagtaattttttccaattctgtgaagagagtcatttgtagcttgatggggatggcattgaatctataaattaccttgggcagtatggccattttcacgacattgattcttcctacacatgagcatggaatgttattccatttgtttgtatcctcttttatttcattgagcagtggtttgtagttctccttgaggaggtccttcacatcccttgtaagttggattcctaggtattttattctctttgaagcaattgtgaatgggagttcactcatgatttggctctctgtttgtctgttattggtgtataggaatgcttgtgatttttgcacattgatttggtatcctgagactttgctgaagttgcttatcagcttaaggagattttgggctgagacgatgaggttttctaaatatacaatcatgtcgtctgcaaacagggacaatttgacttcctttttttctatttgaataccctttatttccttctcctgtttaattgccctggccagcacttccaacactatgttgaataggagtggtgagagagggcatccctgtcttgtgccagttttcaaagggaatgcttccagtttttgcccattcagtatgatattggctgtgggtttgtcatagatatctcctattattttgagatacatcccatcaatacctagtttattgagagtttttagcatgaagggctgttgaattttgtcaaaggccttttatgcatataatgagatattcatgtggtttttgtctttggttctgtttatatgctggattatgttcattgatttgcgtattttgaacctgccttgcatcccatggatgaagcccacttgatcatggtggataagttcttgatgtgctgctggattcggtttgccagtattttattgaggatttttgcgttgatgtttatcaaggttattggtgtgaaattctcttttttggttgtgtctctgccaggctttggtgtcaggatgatgctggccttatgaaacgagttagggaggattccctctttttctattgattggaatagtttcagaaggaatggtaccagctcctctttgcacctctggtagaattcagctgtgaatgcatctggtcctggactttttttggttggtaggctcttaattattgcctcaatttcagagcctcttattggtctattcagagattcaacttcttcctggtttagttttgggagggtgtatgtgtcgaggaatttatccatttcttctagattttctagtttatttgtgtagaggtgtttatagtattctctgatggtagtttgtatttctgtgggattggtggtggtatcccctttatcattttttattgcgtctatttgattcttctctcttttcttctttattagtcttgctagcagtctatcaattttgttgatcttttcaaaaaaccagctcctggattcattgattttttgaagggatttttgtgtctctatctctttcagttctgctctgatcttagttatttcttgtcttctgctagcttttgaatgtgtttgctcttgcttctctagttcttttaattgtgatgttagggtgtcaatttcggatctttcctgctttctcttgtgggcatttagtgctataaatttccctctacacgctgctttgaatgtgtcccagagattctggtatgttgtgtctttgttctcgttggcttcaaaaaacatctttatttctgccttcattttgttatgtacctagtagtccttcaggagcaagttgttcagtttccatgtagttgagcggttttgagtgagtttcttaatcctgagttctagtttgattgcactgtggtctgagagacagtttgttataatttctgttgtttcacatttgctgaggagtgctttacttccaagtatgtggtcaattttggaataggtgtggtgcggtgctgaaaaaaatgtgtagtctgttgatttggggtggagagttctgtagatgtctattaggtccacttgatgcagagctgagttcaattcctgagtatccttgttaactttctgtctcatggacatgtctaatgttgacagtgtggtgttaaagtctcccattattatcgtatgggagtctaagtttctttgtaggtctctaaggacttgttttatgaatctgggtgctcctgtgttgcatgcatatttatttaggatagttagctcttcttgtctaattgatccctttaccattatgtaatggccttcttcgtctcttctgatctttgttggtttaaagtctgttttatcagagactaggattgcaacccctggttttttttgttttccatttgtttggtagatcttcctccatccctttattttgagtctatgtgtgtctctgcacatgagatgggtttcttgaatacagcacatggatgggtcatgactctttatccaataaactagaaaatctagaagaaatggataaattcctcgacacatacaccctcccaagactaaaccaggaaaaagtccaattcctgaataggcctataacaagttccgaaactgaggcggtaattaatagcctaccaacaaaaaagcccaggaccagatggattcacagctgaattctactggaggtacaaagaggagctggtaccattccttctaaaactattccaaacaacagaaaaagaggaacttctccgtaactagttttctgaggccagcatcatcctgatatgaaaacctggcagagatacaacaacaaaaaagaaaatttcaggccaaaatccctgatgaacattgatgcgaaaatcatcaataaaatactggcaaaccgaatccagcggcaaattcaaaaggttatgcaccatgatcaagttggctttatccctgggatgcaagggtgattcatcatacacgaatcagtaaatgtaatccatcacataaacagaaccaatgacaaaaaacacatgattagctcaatagacgcagaaaaggccttagacaaaattcaacaccccttcacgctaaaaacacttaataaactaggtattgatggaacatatctgaaaataataggagatatttatgacaaacccacagccaatatcatactgaatggacaaaagctggaagtattccctttgaaaactggcacaaaactaggatgccctctgttaacactcttattcaacacagtattggaagttctggccagggtaagcaggcaagagaaaggaataaagggcattcaaataggaagagaggaagtcaaattgtctctgtttgtagatgacataattatatatttagaaaaccccatcatctcagtacaaaaactccttaagctgataagcaacttcagcaaagtgtcaggatacaaaatcaatgtgcaaaaatcacaagcattcctatacaccaataacagacaaacagagagccaaatcatgagtgaactcccattcacaattgctacaaagagaataaaatacctagggatccaacttacaacagatgtgaaggacctgttcaatgagagctacaaaccactgctcacagaaataagagagggcacaaacaaaaggaaaaacagtccatgctcatggatagaaagaatcaatatcgtgaaaatagtgatactacccaaagtaatttatagattcaatgctattcccatcaggctaccattgattttcttcacagaattataaaaaactgctttaaattttatatggaaccaaaagagagcctgtatagccaagacaatcctaagcaaaaagaacaaagctggaggcatcgcactctcaaaagaagacatttgtgtggccaataaacatatgaaaaaaagctcatcatcactgaccattagagaaatgcaaatcaaaaccacaatgagagaccatctcactccagttagaatggtgatcattaacaagtcaggaaacaacagatgctggagaggttgtggagaaacaggaacacttttacattgttggtatgagtgtacatgagttcaatcattgtggaagacaatgtggtgatttcccaaggatctagaaccagaaataccatttgatgcagcaatcccattactgggtatatacctgaaagattataaagacccatgcatatgtatgtttattgcggcactatttataatagcaaagacttggaaccaacccaaatgcccatcaatgatagactggataaagaaaatgtggcatatatataccatggaatactatgcagccataaaaaacaatgagttcatgtcctttgaagggacacggatgaagctgaaaaccatcattctcagcaaactaacacaggaacagaaaaccaaacacagcatgttgtcactcataagtgggaagtgcacaatgagaacacatggacacagggaggagagcatcacacaccagggcctatcggggggtggggggcaaggggagggatagcattaggagaaatacctaatgtagatgacgggttgatgggtgcagtaaaccaccatggcacgtgtatacctatgtaacaaacctgcacattctgtacatgtatcccataacttaaagtataataaaaaaaaaataacataaaaaatagagagtgtgatttttgttggggaatattttataagtattgctcttctgtccagagtgcaacattccatagttatctcctagcgatataaaggatgtgaaaaaaactataatccactggctgtttcagtcattactgagctgctcttttaagatcttttgttctgagaagaatcaaaggagctgctttgagtcagacactatggaaaacaatttttttaagtcactgctgatttgaaagtttgttgttcactttcctgaattctgtgttctgaattgcagttatatgaaagcagagctgtacaatggtagtttatttttcctttataatatgtggatggtatacgtcctatacatatatttggtttaaacaaatagccttaaaagttattaccagagtgactgcctgtgggacggctttctcttttggtgttttctatgcaaatgtttccttgacccagctcttggctctgggggttaatctgggcaaaagtggacctgcacaatggcatgggttcatgcaggaaagtgtccagtcaaggaatgatagaagacttttcaggtctgttggcttaggtagtgacccattctgctgggttccatcctaactcactgttttcctcctctgactgctataattctccagatgtgctgatgtagtctggtccagctttgcctccatggattaatttatttaataaatatttatgggactctctatgacattgggcatgattctagattcttgggaatgtagcagggagcaagacggtttaaggtccctatgcaggtacagataaacaacaaaatagacaactgataagttagttgcaggttgtggtaacagctaggaggggagaaacagggtgatgtgatgagtgaagcagagcgtattcaggagaggatggtcagggatgtctcacctcatccttaacagttcagctgagatctacatgtcaacagagagccaatcatgagatatgaggaataccattttatgttaagggaatgataaatgtgaagatccaaaggcaagaaagatttgcttgtttatggaatataagggaggtcaatctggctcaggcatcatgagtgaaagggagagtgatgaggaaatgcgttggaaggatgagcagatcatgcagtgcccaggagagctggagatcagtttagagcgtatagtaaatggatcgggaagccacagaaaggttttaaataggtggggcataggatttgaatttacttaaaaacatgtctcaggctgttgtatggagaacagagtgtggcaagtagcaaaagatcatggggattccagtgctgacattattcatttagacattcttttttttctctaaccttttttccttttttattgttttcttattttctgacagcgtcttgctctgtcactcagagtactggagtgcagtggcatgatcctcaacttcccaggccaagtgattctactaccttagccttgggagtggctgggaccacaggtgcacaccaccaagccctgattggcttttgatacatttttaattttgtaaagatggagtctccctatgttgcccagggtgatcttgaaattctaggctcaagtgatccttctgccttggcctcccagaattctgggattatagacatgagccttagtgcccagctatctctagctttgctgttaatgcttattcccctgtctccctgtcacaacctcaagtgccatgcagattgcagttttctgctgccagactgcagtgtcaaggtcatctctgctaacccaaagcacattccaatggatttcaattgccagctgttcccctgagatccaggccatctctgctaacccaaagcacattccaatagatttcaattgccagctgttcccctgagatccaggccatctctgctaacccaaagcacattccaatggatttcaattgccagctgttcccctgagatccaggccactgttctcagtgctctctatatccagctggtgccctgcctcattccagcagccaggaatgctcagctttggaagccaatgaggtgggcagcaagttgttctgtatcccatgtttccctctgtttaagaaatttgaaaaaggtataagtgtacatgctgtgttcaagctggcattcccatacatatatttgaagaatgttcaacactagtaaaaggactgacagagttcagttcctggagaccagggattcattgaaagtagttcaatgcattctttttattcactgaagacactccactgagatgcttttctggacctactatagctgaagtagggagtggttctgcctgggtgttctgataccatctgtgtatggctggccttccccgggccccaaggctgtgtctcattgagagcagagcccctgggaagttcacccctcagctgagtgggcaagtgccgggtatagtgctcaacgctagggagacatatatgagagaggtacagatgcttacacattccaacaccatttaagggtgaaggtgaaggttggttttgttccctgtctgcccaatctgcttgtggtgaattattttgccaactataagtatgactttaggaattttgggccaggggctgcagggggtgggaggtagacagagggaatgtcttcatatgaaggcttcgcatgttatgctagggcaagatggcacattcagcaaaagctcaggctgtactggctagcgctttcattcattcttgtgccaggtaccttgcagagccacccagctggagaaaaggaacccaaaattccctaccaggtcaggcttccttgttcttccctcggagccttttcagccccccatgtggtgcatcaggtgaggtgcagcagggcttggtgcaggagctctgcccgcctggcacctgcaggtgtaataagggatggcacattttgttagccacaagactctgaggccttcgtgcttgttcagttgagaccattggccaatccagtcttctattctcttacttcaaacacccctcactgcctgttggagataaatcctttttcttcccttgcctgtgaaaattgccctggtggattcataggtgtggggtttcactaggcagaaaaacaaggaggaagggcccttttccaagattccaccaccctcctttcctttcactgctattttgcattaacatatacatggtgtgcatgcctttcaagagctgaacagatgctggttcttgcattttgtgcagtgccagggaaggatgggtgttccattttccatgttaccctactgcctggggccactccatgctgatgctggtgctgatcatctgtctcttggggtgttgatggtggtggaaacctgttcttctggaccagaatgtgcttaccttttcccttcagaatgaatactgaaactacctctttgcagtaatcaaattcaactgattaataatctgtaaattccccatgtaagaagcaagccatcttgaagttgggtgtgactcctatcatggctgtgatacacccaggtccagagggagataattttcccctccccacactctggacccacagcaacttcctcacccacttcagttcaactctgtcactgatgcccctgagagtattttttatttgactgttgctcctttggttggttaatgactatgtcatcatcgaagtccccaagcttgtcttgattagcctcctttcctcagggaaattgagaagaatgagagagccagtgatttaaggggatttggagggaaggaaagaggctaaggagatgaaagaataaaggaggaaaagatatgatctcaagaagagaaggagaatgaagagagaggcagttaaatctggggatgtgggacagtagacttacttcttgggctgaatagaaggcacattttgggggaagtttaaacttgttccctttacttgcccaggaacccatggtgtggcttcactgtgtgatttgaaagggtgaaatgcagggttatgtatgatcagaatgactaacacacatatagccaggtgtgttctagagaccttcaaggaaattggcattgaaggtggaggctggaggcatttttgcttcactcacccctgctcagggccatttgttaaggcattcaaacccttccagatgctccccagggattctcctgggttctagagagtcccctgcatgggactgggcaagaaggaggtaacccaacggagatgggtctcttccacgtatcggcactgcatgctccagtgctctgctgtaccactgacaagaccagttcaggctgcgtgattccgtggaaagataaggactttcaaggccaactccctggtagcaggcatagccactaatcagttagtgtgactgtgaacaagtttcctcagtggtaaaatgggattagtcacccccaccagataggtttctgatgagtattaaataagataatatatgtcatatgtaggtcatgttgtacatgcctgaaaggtagtagagcttattcagtcttcatccgcccttcctggccctcccactactctgccctctccccaacccaggttttatgctactcttctaaattggagatggcaatacctggaaaagaaggagaaaggaggaaagtatgtattaacataactcacacctccctccacattaaacattcaaacatttattgatctttttatcaaactatgtgaaggaatggaagattaaaaagaaaggaaatcctttctcatttaagagtagaaatggagctctagtagtcaaaacgaccctcaagttaaaagagtccctaaattgttcagaatcagctactgagatttggtaacagcaaaccacatggtctttcctctggtatatgattaggacagaaaccttcttgttgggccaatgactgcgcaggttttgatgacatgaggaatacaataagttggccattgtatgaaagggaggcagcaggacctgagcttgtgcccttgtcactttctgtatgaggccaggagggtggagcttgatgacatctcctaacaatacccacatgcacatctctgtcatccttaaatcactgagtcttggacttcagggtctccttgtgccggtccacaagggaaccaacccactccaccgttttctgcttggcttcctcccagctgtagagtggcttatacgccagatctcgctgagccttcttataagagaaggtgaatacgctatttgacaatgtgactatgtggcggttgaagggcggtcgataggtgtaaattggcctgagtaggaagctcactatttccagcaggaagccaatccaatacatcagggataaaggaaagctccatctggaatcaaggcggaggccgaactctttgctcagggtgtaattaaggttatcatagctttggtgaggcgtgtcatctgagatatagtagaactgtcctcggatgcttggggccttcttggggtcctgcagggccctcaaggccagaatgtgggcccaggccacattgccaacatagactgggttaacagtggagaactttccaacacttgacaggatcccattgttgttcagggcctcgtttatactagcagaaaggaatcggcttccttccccatagatatacatgggtcgtaaggcacaagtgtacagggtgccgccgtttttcagattccacccgttagccgccagtacagccttctcagcaagctttttgctgtgtgggtatggagcgggccatgtgttttccagaggctcttcttcatggccattctggatgatttccttgtaggagttgggcccggctacctctatgctactggtgtagatgaagactggcacactagcttggacacaggcctctaacaggagctgggtacctgtccatgaagagcatattgtcactgtcaggatatatccctaagaggtgccaaccacgaacacagatctatgtgccccaccccccactcccaaatatggtggttgtaacagactcagggtacattcttctgtggttctgtctgagatttggtcgtactacagccataagaaaaataccaaaatgaagagaaactgacatgtgggttctggagagtaagaatttctagacttttgggtttcatggatgtgtgtgtgtgtgtactttaattttggaaagggacctagggttatcactttttattttgccaagtaagggtattgacaaattatgatttgtaatcagtaccattaaagtcagatcatttaaaatctaaaaaatcaggaggctatactctgtgaatatggacagttccagtccttaggcaaaatgggcagttgaagaattcacatcacacacacacatacaccattgtatataggcaatataaactcttcaatatatatgaaattgttggtacttttctcattttgctgggctctaataaaactttgtcacaaggaccatcctggagtcactgagcaagcagtgggttgtggggagatgctggaaacccacactcttcctgattgtgcattccctgggaaagctgcttccaattctggctgtgactctgtttacctggttatgtaaagtggaggtgataaaccttcttttaaaccctgccctggcatttcctgtggagcctggtggagggctggggagagaagtgtgtcctctgctggtaacacctgcagtgggaggaccttgcagcctcccctgagctgtgtagaagcaaagctcatggaggtacccatagtgccttcccttgaagaaggaaggaatttcctagggaaaggatcatttttatttacaaatttttgtattcttagcccttttaatgtctctgtgcaatttgagtttctggaaagacagcctcatgtgttcaaaaattaatcttgtggcagagaaaatttggagttagtttaccttcaagggggaaatgaccaacattgtgaagtattttctaagcttgggagttataatggttttagcaaacagatgcctctaacacttcccctgtcatttcatatcccctccttttgggagctgttgaagtagtaattaaaactggttactcttagcaccctccttgcacagcaggggtacttagaagtatgggtaagtagaaactggaagttgtttttttttttcttttatggtgctggagactcaaaagcaattggttgctttggaaaaagagtcagagtagactaaatgcggagggccaggccggggtttggggtgctatggtgctgaagagactggactctggagatcagagggtgagatttctgagaagattccttaaggaaatgtgtctgaatttaaggtagttggaaagccatactttgaaaggaaacgccaagcatttaagggatgaagattaaatgagggtgcactttgggcacctggctgaaaacggctctggaatagtaggccctgtggtgagctgaagagactgtattcttgatactggaaaaatctcactgttaaaaaaatattgtgggaaggcatgtgctggataattctgtcctgacagaccttgtgaaccagctttgctagttctctcgagaggactttttgtttgaggtgggcaggagggctctgaatgttttcatcagcctacacacaaggttcaaaatggtgactacagtggcacctgcaaggtctgcttctggcctgggaggcaaggggtgtctgggtatcaagagtctgaagtcagaaattagttgacttttgattggaaccacagtagaaagagcttttggagtcacagtagaaagagcctttggagtcacacagggatgagtttaaagtctaactctcctacctgcttacttacctgggggaccttggacaagttacttgccctctctcagtcctagttttatcatctaaaaaactaaagttagcagtcttgaactctcctattcgtagtgatcagcaaaggcacttggcccagagcacagcaggtgttcagtggagggacttctcttcccttcctgcccttctttgtgatccttaattccccaccttgctgcatctcctccccagcctaccatacctttcacattgacattcatgatagactctctgtgagtgacaccgaagacatcaatgatacaggcggtgtggatgatgaccgagacgtcctggcaggctctcttcaggaatggctcatccagaatgtctccttccagcactgtcagcttggtcttgttctggagttctgtgtgaacacaggtcaggtcattggaatgatttctgtatctggctgagaagttttctgataaaggtgatgttacataggtgttcaaggatggttagagtagggtgttagagtggagggtgtacattctacggaaagaacaagtaaaaaaggcacagaaatcagcatgtgtatcaatttcttggaaagagcaaacatctgtttctctcccatctcattttagaaaagtaatctgagcagtgagctgtcaggtatgcctggaatataagcattgctagagtcatgggaagcccatcaaattttctaaggagagtagtgtgattgtagagagtatgagggaaaagtttgaagttaattctgtaagtaatgagaaatcatgtatagaatcataattttgggactccagcatcatgttaaagaaaaccccttatttatatttggaataaaatgacaaaaaggccaagccccgtggctcatgcctgttattccagcactttgggaggctgtgatggatggatcactggagcgcaggaggttgagaccagcttggacaacatggggaaatcccatttctattaaaatacatgaaatagctgggcatggtggcatgtgcctgcctgcagtcccagctactctgcagactgaggtgggaggataaatggaggctggggtctctggttcctggcagtgagccaagatcacacctctgcactctagcctgggtggtagagcaagaccaccttgtctcaaaaaaaaaaaaaaaaaaaaaaaaaaaaaaaaaaaaagaaaaccacacaagcaacaacaaaaaaaggaacaaaagcagggttgtggtgtaggaagttaatcttggcttgaggatataaaatggactggtataggggatttgagaaagactgatgatcaagtgattaatcagaatgtctgtgccaaagtttcgatgaggactggaagcagggtccagcagtggaagcagaggaggggagagatataccaggtttgaatttcagaccttaccttgaaggtcctggtacctattggatctgagctgataggaaaaggagaagataaaatcacccctacagtttcctgcttgggcaactgggaggagagtggagtcattactcaggaattgtgggtgggcttcaatgatgaatttccctggaaaactattatcagatatcatcaaaagcaggtagcaatgctgaaaatgagttaaccaccaatgaactaacatcgcagctgtctagctggaggcagtggttacaacatcaatgtcttcaggttcctctgaaatccacaggaagtgacgctgccagtaaggttgtcacctggaattagcccacaaaatgaacaccatgctacatggagcttggataaatactctacacttgtttgtgctttatcatctgtatgcaacttacaggatatttatttctttttacagctatctcatgaggtaggtattctgagtcccactttatcagtgaggaaactgagtctcagagaggttaagggacagatctaaggtcacgtttctagtgaaggcttaaacacgcccaccctgcctccaagcttgtaccctgtacaccaggtgcaggactggctgtttaatatcaacttttctgttgtttaatatcattcttttccaaagaataagccagtttaactgaaattggcaacaaagaccaaagaccagtgagagcaaaattcagagtgaaaaattcgaagctggagaaattccttcctggggtacaagcaggaccacttgctctcctgatgcctctgccatgttttgtctactcccaacctcttcccgttgtcaggcaactccaagaaggtcctggagtgggggagtcagggaagaggctgctggtggtgatgtgggtaacagcctgagagtgggatgttctctggttctagttccacctctgcccttcctgctgccttcctctgcttcttctttgctgccacttcagacagactggctcaaaggagtgtcaaagtggaagaagtccaaagctgagagaaaaggactcttccccagtgagttcccagggatctagagggactaggaaaaggtactttgttgatgaagtcatggctcccttcttctccaaggcactgtagacttggcaagtgttttatgtagactaaatggagttgcttttatggtgtaagttgggctagaggaaggcctaaaggagctgtaagacaaactactgcttaagagcacagatgctgcactagtctgtctgggttcaaatctagctttgccatatgctaactgtgggaccttcaaaaagttaactaacctctctgtttctatctcctcatctttaaaaaaggaggataatattaccgatctcatagggttgttatgaggagcaaatgagttggcaaacctttggccaagtgcctggcacaaaaagaacactgaatgctttctctgtttttatcttcatacagatccctgcctgtctattatatgatctgcatttttaccataggggaacaatacctctaggctgagcattgcttttttctggcttcagatgttaaattgcaaatattgctgagacacaggcaaggattataagcatttcatatttgtttatcaaagacaacattaaaacagagggtggaagaaatcgaacatttcaagaggtcagagaagagcaaaagtagagtgttgggtgtggtccctgagtgctgtcaagtgggggattctctgtgggcagggcaggaccctctgggcagccagagcccacatgtagacacacagtcccccaaatcccctgggttggggaggaggacagggaattgttttggggcacaccaaggagcaaagggagagactgaagatccactttgccaagcatcagctctggggccaggtgaaatagcctatggataaagctctggtctgagctctgctacgcatcaatcagatggccttagcatgttgctttgtgattccggaccttgatgcgttcattgtcctgttggatgtgatgccttttctacctgcctcttggggccatttgtacaaggagttgccacagaaaattctgcagtcaatttctttttgatgatgagcaacagaggtaaatgttttgtttttttttttttaaaaaaaagccatatatgcaaaatctaaatgaggcatgtctggccttatactgcctcttactctgtctctgctctgtgctgtgcactgtgcacacacattctctcactgatgctctctctctcactatatatttttcattatttctctgtctttctcattgtctctctctctgagtctctctccccgactctctctccccgactctctctcccccttattgttttcctctctctctgtcacacacacccacttatacactcatctttaccttaacttccttttattttgccctcacaaaggatactaaggaagctgcaaaacaaaacacagcctggcacgttctagagagacaatgacccattggtgaggtctccagggtaatagtgtcctttatgaatgttgtacagcaattgccaagacaaaagcttcagaacataaaagagttgcagacaagacaaagaactgatgtgggattttctagatgagaagaaaagaggcctggaggctgaggtggctgcttctcaagttctgggtcagggccagaatctagtctctggaaatcccacccagtatctttcatactatgccattttatactatttaatatttatttcttgatgactttggatgtgagattggcttagatttggctacaaatttcaataacttgctagacaaggtccatctccccccacatacatgcagtgtttaagatggaaccacacacccatgacccaagtttacttactagaaaattcctctctcaattctggtccgaaggccttgtccaagaccctgatctccttcagctccttctccttcaccaagaggcggatgatcctctgtcccagaaaccctcctgctcctgtcacaaggcagctccagcccgtcatggccatccaaagtagcaggaatcactcaccaggaaacagaagatgctggggagcagatctgattctagggtgaccctggagagggctaaaaagagatgtcaaatggttatatactcacacagatgcctcattttcctccaccccattttttttgcaaacattctgtgtccccaccactgcaggagtagctgaaagaaaatgaaaaatctctaaccattagttagattgttaaaagctggacagaagagtggacgtacttctcacctcatttcctgtggcaagtctgaagctttatgcactgtggcttctggcccaacccttatcactttgatctctggccatgtactcattgctctctcctcctatgggatccttatctcagaaaaatagtgacctttgggttacatctctaattcttcccaggaacaggaagagaagtcccatcctaatgctgcagtgtggcaaagagtcttgggtttagccttaacaggacactagtcagttgataccagctgtctgggatccacaatctgtgaacttaaactagaccaggagaaatctgcaagtgcaatttgaattgtgcccttgttcagtaaatccatctggagggaaatccatgtaagcccattatctcctctctcagactatcatttgaaatgttgctgctgtcttacaaaatttagaaatttgcaatggtgacagctccaatcacttagttttatgtgaggtgactttctttcctacccaatatatctgaaacctcaatggtcatttgcccctggagagccctgggttcctagatgaacaacatcattgaaggaaagctatctggtgataaccacttaatgatatggcctgtatcacaagagtggggatttgtggttgtatgccccaatgactcttatcataggtgttcgaacttatccatatttttggctgcaaaacgattctcagcaaattcttgaactggacatactgtgaatgcttctgaagcctatgccccagaactgcccaaatatcaccgccataagcttcccaagacactttactcaaaaaaattgaaatataatttacatgcattaaaatgcccaggtcttcagtgttcagttcagtggaacttgacagttatatatgcccatgtaagtagcaccccaaaaaagatatagaccatttccgtcactccagaaagttgttttctgcctgttccctgttaattccctgaccttcccccaatctacctcataggcaactacttcctgatttttattcccacagttctcattttatttctatatttctctaattttttcttctaagatctctgtggttctggatatatatttaaatataaaattattttgaaatgaagttttgtgcagggagtacagaaaaattgaccgttgattgtctctgttgtttatttttctatttcatgattttcattatttttattattggcttacatttattaattttgtttttttttttcactcgtttttcacattttttttttttttttttgagatggagtcttgctctgtcacccaggctgaagtgcaggggcaccatctcagctcactgcaacctctgcctcccgggttcaagcaattctcccacctcagcctccgaagtagctgggattacaggtgcccgccactgcaccgggctaatttttgtattttcagtagaggtggggtttcatcatgttgaccagctggtatcaaactcctgactttgtgatctgcacgcctcagcctcccaaagtgctgggattacaggcgtgagccactgcacccagccccgtttttcaggatcctgataataaaagcatagaaaattgtttttctttactcctttcctatttccactataggcattaaaagttgtaaatttctctttaagcactgtgtgagctgtacccaacattttgatgtattgggttatcatcattcagttaataatatttaaagttttgtcttgtggtttcttctctgacccaagtgttattcagaagtgtgttgcttgttttctaaaagtgaggattttctagatatctcattgttatggatttctaattaaatactactgtggccagagcatatgcactgtatgattttgattcttgaatatttagtgagatttgttttatggtccagcatatggtctacattggtgaacatgccataagcacttgaaaagaatgctttctgcagttgttgaaagtaatactctacaaatgatttagtttgacaccccactctgggtcttgccctcctccatgttgtagacattcatcttctactttggacctcactaccaatgcttcaaaaccacttgcctaggaaaggttggccttgtgctacaagatgtagcagcttgttctctgaaactatcagaactatttacaggccctgggtcttgctgagacttgtggagtactatctgaaactacccaggtgcatcgcatgcctttgcctgctgtagcagtgctggagagcaccttaaagatcccccatcgccttcagtgtggggctggactttctttcagctgttgaacgttctggaggctcgtagatttcagctcatgtgtcttggagtctctgagtggaagcaataaatataagccctaaagaaagggagaaataaaacaaaggtccagagtgattgggaaccatactaccaactttcttttatttttaaataggtttactgaggtataattgacatcacatttgcttgttttaagtgtacagttcaattatttttagtaaaattttatacttgtgtggaccatcactgtaatcctgttttccaacatttctatcattcctaagaaatccctcgtgctcatcagtcaccattccttactcttactcacagctcaaggcaacctttaattgactcactgactttacagatttgccttttctagacattatataaatggaatcatagaatatttggtctttgtatttctattctttcacttagcttaatatacttttttttttttttgagacagagtcttgctctgttgcccaggctggagtgcagtggtgcgatgttggctcacttcaacctccacttccgggttcaagtgattctcctgcctcagcctccaggcacctgccaccatgcctgggtaatttttgtatttttagtagaggcgggatttcatcatgttggccaggctgatctaaacttttgaccccaaatgatccacccaccttggcctcccaaagtgctgggattacaggtgtgagtcaccacacctggccagcttaatgttcttttgtggttcatctatgttgtagcacgtatcaatattttactccttttaggtgccaaaccctattaaattgtatggatggctcccatttgtttattcattcatcaattgatcgatatttgatgtgtttccactttatggactattatggataaagctgctatgaatattcacattcatgtgttgtgtggacataggtttctgtttctttggggtagacagctaggagtgaaagtgctagatcataaggtaaatgtatatttaacattttaaggaactggcaatctgttttccaatgtggctgcatgtcccatcaacactgcaagagtagttcaatttttcacatcattgtttttcacttctttcaattgtttatttatttatttattttattattattatactttaagttttagggtacatgtacacaatgtgcaggtacatgtgacatgttgatgtgctacacccattaattcggcatttagcattaggtatatctccaaatgctatccctcccccctccccccaccccacaactgtccccggagtgtgatgttccccttcctgtgtccatgtgttctcattgttcaattcccacctatgagtgagaacatgcggtgtttggttttttgtccttgcaatagtttgctgagaatgatggtttccagcttcatccacgtccctacaaaggacatgaactcatcattttttatggctgcatagtattccatggcgtatatgtgccacattttcttaatccagtctatcattgttggacatttgggttggttccaagtctttgctattgtgaatagtgccacaataaacatacgtgtgcatgtgtctttatagcagcatgatttataatcctttgggtatatacccagtaatgggatggctgggtcaaatggtatttccagttctagatccctgagaaatcaccacactgacttccacaatggttgaactagtttacagtcccaccaacattgtaaaagtgttcctatttctccacatcctctccagcacttgttgtttcctgactttttaatgattgccattctaactggtgtgagatggtgtctcattgtgcttttgatttgcatttctctgatggccagtgatgatgagcattttttcatgtgttttttggctgcataaatgtcttcttttgagaagtgtctgttcatatcctttgcccacttttttatggggttgtttgtttttttcttgtaaatttgtctgggttcattgtagattctggatattagccctttgtcagatgaggaggttgtgaaaattttctcccattttgtaggttgcctgttcactctgatggtagtttctcctgctgtgcagaagctctttagtttcagtagatcccatttgtcaattctggcttttgttgccattgcttttggtgttttagacatgaagtccttgcccatgcctatgtcctgaatggtattgcctaagttttcttctagggtttttatggttttaggtctaacatgtaagtctttaacccatcttgaattaattttcatataaggtgtaaggaaggaatccagtttcagctttctacacatggctagccagttttcccagcaccatttattaaatagggaatcctttccccatttcttgtttttgtcaggtttgtcaaagatcagatagttgtagatatgtggcattatttctgaggtctctgttctgttccattgatctatatctctgttttggtaccagtaccatgctgttttggttactgtagccttttagtatagtttgaagtcaggtagcgtgttgcctctggctgtgttcttttggcttaggattgacttggcgatgcaggctcttttttgtttccatatgaactttaaagtagttttttccaattctgtgaaaaaagtcattggtagcttgatggggatggcattgaatctataaattaccttgggcagtatggccattttcaagacattgattcttcctacccatgagcatggaatgttattccatttgtttgtatcctcttttatttcattgagcagtggtttgtagttctccttgaggaggtccttcacatcccttgtaagttggattcctaggtattttattctctttgaagaaattgtgaatgggagttcactcatgatttggctctctgtttgtctgttattggtgtttaggaatgcttgtgatttttgcacattgattttgtatcctgagactttgctgaagttgcttatcagcttaaggagattttgggctgagacgatggggttttctagatatacaatcatgtcacctgcaaaaagggacaattagacctcctctttttctatttgaataccctttatttccttctcctgcttaattgccctggccagcacttccaacactatgttgaataggagtggtgagagagggcatccctgtcctgtgccagttttcaaagggaatgcttccagtttttgcccattcagtatgatattggctgtgggtttgtcatagataactcttattattttgagatacgtcccatcaatacctaatttattgagagtttttagcatgaagagttgttgaattttgtcaaaggccttttctgcatctattgagataatcatgtggtttttgtctttggttctttttatacgttggattacatttattgatttagcgtatgttgaaccagccttgcatctcagggatgaagcccacttgatcatggtgggtaagcttttttatgtgctgctggattcggtttgccagtattttattgaggatttttgcattaatgttcatcaaggatattggtctaaaattctcttttttggttgtgtctcttcccagctttggtatcaggatgatgctgacctcataaaatgagttagggaggattccctctttttctattgattggaatagtttcagaaggaatggtaccagctcctccttctacctctggtagaatttggctgtgaatccatctggtcctggactccttttggttggtaaactattgattattgccacaatttcagagcctgttattggtctattcagagattcaacttcttcctggtttagtcttgggagggtgtatgtgttgaggaatttatccatttcttctagattttctagtttatttgtgtagaggtgtttatagtattctctgatggtagtttgtatttctgtgggattggtggtggtatcccctttatcattttttattgcgtctatttgattcttctctcttttcttctttattagtcttgctagtggtctatcaattttgttgatcttttcaaaaaaccagctcctggattcattaattttttgaagggttttttgatgtctctatgtccttcagttctgctctgattttagttatttcttgccttctgctagcttttgaatgtgtttgctcttgcttttctggttcttttaattgtgatgttagggtgtcaatttcggatctttcctgctttctcttgtgggcatttagtgctataaatttccctctacacgctgctttgaatgtgtcccagagattctgatatgttgtgtctttgttctcgttggtttcaaaaaacatctttatttctgccttcattttgttatgtacctagtagtccttcaggagcagattgttcagtttccatgtagttgagcggttttgagtgagtttcttaatcctgagttctagtttgattgcactgtggtctgagagactatttgttataatttctgttgtttcacatttgctgaggagtgctttacttccaagtatgtggtcaattttggaataggtgtggtgcggtgctgaaaaaaatgtatattctgttgatttggggtggagagttctgtagatgtctattaggtccacttgatgcagagctgagttcaattcctgggtatccttgttaagtttctgtctcgttgatctgtctaatgttgacagtgtggtgttaaagtctcccattattattgtgtgggagtctaagtctctttgtaggtcactaaggacttgctttatgaatctgggtgttcctgtattgggtccatatttatttaggatagttcttcttgtctaattgatccctttaccattatgtaatgtccttctttgtctcttttgatctttgttggtttaaagtcggttttatcagagactaggattgctacccctgcctttttttgttttccatttgcttggtagatcttcctccatccctttattttgagtctatgtgtgtctctgcacatgagatgggtttcctgaatacagcacactgatgggtcttgactctttatcctatttgccagtctgtgtcttttaattggagcatttagcccatttacatttaaagttaatattgttatgtgtgaatatggtcctgagattatgatgttagctggttattttgctcattagttgatgcagtttcttcctagccttgatagtctttacattttggtatgtttttgcagtggctggtaccagttgttcctttccatgtttagtgcttccttcaggagctcttttagggcagacctggtggtgacaaaatctctcagcatttgcttgtctgtaaaatattttatttctccttcacttaagaagcttagtttggcagatatgaaattctgggttgaaaattattttctttaagaatgttgagtattggcccccactctcttctggcttgtagagtttctgccgagagatgtgctgtaagtctgatgggattctctttgtgggtaacccgacctttccctctggctgcccttaacattttttccttgatttcaactttggtgaatctgacaattatgtgtcttggagttgctcttctcaaggagtatctttgtggcattctctgtatttcctgaatctgaatgttggcctgccttgctaaattggggaagttctcctggataatatactgcagagtgttttccaacttggttccattctccccatcactttcaggtacaccaatcagacgtagatttggtcttttcacatagtcccatatatcttggagactttgtttgtttctttttattcttttttctctaaacttcccttctcacttcatttcattcatttcatcttccatcactgataccctttcttccagttgatcacatcggctcctgaggcttctgcattcttcatgtagttcctgaaccttggctttcagctctgtcagcccctttaaggacttctctgcattggttattctaggtatccattcgtctaattttttttcaaagtttttaacttctttgccattggtttgaatttcctcctgtagctcggagtaatttgatcatctgaagccttcttctctcaactcgtcaaagtcattctctgtccagctttgttccattgctggtgaggagctgcgttcctttggaggaggagaggtgctcttctttttagagtttctagtttttctgctctgttttttccccatctttgtggttttatctatttttggtctttgatgatggtgatgtacagatgggtttttggtgtggatgtcctttctgtttgttagttttctttctaacagacaggactgtcagctgcaggtctgttgaaatttgctagaggtccactccagaccctgtttgcctgggtatcagcagcggtggctgcagaacagcggtggctgtagaacagtggatactggtgaacggaaaatgctgctgcctgatcgttctggaagttttgtctcagaggagtacccggccgtgagaggtgtcagtctgcccctaatggggggtgcctcccagttaggctgctcgggggtcagagacccact

SEQ ID NO: 10300 - DNA, 6186 bp, Homo sapiens
tttttgtttgttttttttgttttgttttgttttgttttaatttattttattattattatactttaagttttagggtacatgtacacattgtgcaggttagttacatatgtatacatgtgccatgctggtgtgctgcacccactaactcgtcatctagcattagttatatctcccaatgccatccctcccccctacccccaccccacaacagtccccagagtgtgatgttccccttcctgtgtccatgtgatctcattgttcagttccccactatgagtgagaatacgcagtgtttggttttttgttcttgcgatagtttactgagaatgatggtttccaatttcatccatgtccctacaaaggacatgaactcatcattttttatggctgcatagtattccatggtgtatatgtgccacattttcttaatccagtctatcattgttggacacttgggttggttccaagtctttgctattgtgaataatgccgcaataaacatacatgtgcatgtgtctttatagcagcatgatttatagtcctttgggtatatacccagtaatgggatggctgggtcaaatggtatttctagttctagatccctgaggaatcgccacactgacttccacaatggttgaactagtttacagtcccaccaacagtgtaaaagtcttcctatttctccacatcctctccagcacctgttgtttcctgactttttaatgatcgccattctaactggtgtgagatggtatctcattgtggttttgatttgcatttctctgatggccagtgatggtgagcagtttttcatgtgttttttggctgcataaatgtcttcttttgagaagtgtctgttcatgtcctttgcccactttttgatggggttgtttgtttttttcttgtaaatttgtttgagttcattgtagattctggatattagccctttgtcagatgagtaggttgcgaaaattttctcccattttgtaggttgcctgttcactctgatggtagtttgttttgctgtgcagaagctctttagtttaattagatcccatttgtcaattttgtcttttgttgccattgcttttggtgttttagacatgaagtccttgcccatgcctatgtcctgaatggtaatgcctaggttttcttctagggtttttatggttttaggtctaacgtttaagtctttaatccatcttggattgatttttgtataaggtgtaaggaagtgatccagtttcagctttctacatatggctagccagttttcccagcaccatttattaaatagggaatcctttccccattgcttgtttttctcaggtttgtcgaagatcagatagttgtagatatgcggcgttatttctgagggctctgttctgttccattgatctatatctctgttttggtaccagtaccatgctgttttggttactgtagccttgtagtgtagtttgaagtcaggtagcgtgatgcctccagctttgttcttttggcttaggattgatttggcgatgcgggctcttttttggttccatatgaactttaaagtagttttttccaattctgtgaagaaaggcattggtagcttcatggggatggcattgagtctataaattaccttgggcagtatggccattttcacgatattgattcttcctacccatgagcatggaatgttcttccatttggttgtatcctcttttatttcattgagcagtggtttgtagttctccttgaagagttccttcacatcccttgtaagttggattcctaggtattttattctctttgaagcaattgtgaatgggagttcactcatgatttggctctctgtttgtctgttattagtgtataagaatgcttgtgatttttgtacattgattttgtatcctgagactgctgaagttccttatcagcttaaggagattttgggctgagacaatggggttttctagatatacaatcatgtcatctgcaaacagggacaatttgacttcctcttttcctaattgaataccctttatttccttctcctgcctgattgccctggccagaacttccaacagtatgttgaataggagtggtgagagagggcatccctgtcttgtgccagttttcaaagggaatgcttccagtttttgcccattcagtatgatattggctgtgggtttgtcatagatagctcttattattttgagatacgtcccatcaatacctaatttattgagagtttttagcatgaagggttgttgaattttgtcaaaggccttttctgcccctattgagataatcatgtggtttttgtctttggctctgtttatatgctggattacatttattgatttgcgtatattgaaccagccttgcatcccagggatgaagctcatttgatcatggtggataagctttttgatgtgctgctggattctgtttgccagtattttattgaggatttttgcatcaatgttcatcaaggatattggtctaaaattctcttttttgattgtgtctctgcccggctttggtatcaggtatgaggcggcctcataaaatgagttagggaggattccctctttttctattgattggaatagtttcagaaggaatggtaccagttcctccttgtacctctggtagaattcggctgtgaatccatctggtcctggactctttttggttggtaagctattgattattgccacaatttcagatcctgttattggtctattcagagattcgacttcttcctggtttagtcttgggagggtgtatgtgtctaggaatttatccatttcttctagattttctagtttatttgcgtagaaatgtttgtagtattctctgatggtagtttgtatttctgtgggatcagtggtgatatcccctttatcattttttattgtgtctgtttgattcttctctcttttcttctttattagtcttgctagcggtctatcaattttgttgatcctttcaaaaaaccagctcctggattcattaattttttgaagggttttttgtgtctctatttcctacagttctgctctgattttagttatttcttgccttctgctagcttttgaatatgtttgctcttgcttctctagttctcttaattgtgatgctagggtgtcaattttggatctttcctgctttctcttgtgggcatttagtgctataaatttccctctacacactgctttgaatgtgtcccagagattctggtatgttgtgtctttgttctccttggtttcaaagaacatctttatttctgccttcagttcgttatgtacccagtgcaggttgttcagtttccacgtagttgagcggttttgagtccgtttctgaatcctgagttctagtttgattgcactgtgttctgagagacagtttgttataatttctgttcttttacatttgctgaggagtgctttacttccaactatgtggtcaattttggaatagttatggtgtggtgctgaaaagaatgtatattctgttgatttggggtggagagttctgtagatgtctattaggtccacttggtgcagagctgagttcaattcctgggtatccttgttaactttctgtctcgttgatctgtctaatattgacagtggggtgttaaagtctcccattattattgtgtgggagtctaagtctctttgtaggtcactcaggacttgctttatgaacccgggtgctcctgtattgggtgcatatatatttaagatagttagctcttcttgttgaattgatccctttaccattatgtaatggccttctttgtctcttttgatctttattggtttaaagtctgtattatcagagactaggattgcaacccctgcctttttttgttttccatttgcttggtagatcttcctccatccttttattttgagcctatgtgtgtctctgcacgtgagatgggtttcctgaatacagcacactgatgggtcttgactctttatccaatttaccagtcgatgtcttttaattggagcatttagtccatttacatttaaggttaatattgttatgtgtgaatttgatcctgtcatgatgatgttagctggttattttgctcgttagttgatgcagtttcttcctagtctcgatggtctttacattttggcatgattttgcagcagctggtaccatttgttcctttccatgtttagtgcttccttcaggagctcttttagggcaggcctggtggtgacaaaatctctcagcatttgcttgtttgtaagggattttatttctccttcacttatgaagcttagtttggctggatatgaaattctgggttgaaaattcttttctttaagaatgttgaatattggcccccaatttcttctgacttgtagagtttctgccgagaaatccgctgttagtctgatgggcttccctttgtgggtaacctaacctttctctctggctgcccttaacattttttccttcatttcaactttggtgaatctgacaattatgtgtcttagagttgctcttctcgaggagtatctttgtggcgttctctgtatttcctgaatctgaacgttggcctgccttgctagattggagaagttctcctggatagtatcctgcagggtgttttccaacttggttccattctccccgtcactttcaggtacaccaatcagacgtagatttggtcttttcacatagtcccatatttcttggaatctttgttcgtttctttttattcttttttctctaaacttcccttctcacttcatttcattcatttgatcttccatcactgataccctttcttccagttgatcacttcagctcctgaggcttctgcactcttcacgtagttctcgagccttggctttcagctccatcagctcctttaagcacttctctgtattggttattctagttatacattcttctaaatttttttcaaagttttcaacttctttgcctttggtttgaatttcctcttgtagctcagagtagtttgatcatctgaaggcttcttctctcaattcgtcaaagtcattctccatccagctttgttccgttgctggtgaggaactgcgttcctttggaggaggagaggcgctctgctttttagagtttccagtttttctgctctgttttttccccatctttgtggttttatctacttttggtctttgatgatggtgatgtacagataggtttttggtgtggatgtcctttctgtttgttagttttccttctaacagacaggaccctcagctgcaagtctgttggagtttgctagaggtccactccagaccctgtttgcctgggtatcagcagcggtgtctgcagaacagcagattttcgtgaaccacgaatgctgctgtctgattattcctctggaagttttgtctcagaggagtacccggccgtgtgaggtgtcagtctgcccctactggggggtgcctcccagttaggctgctcgggggtcaagggtcagggacccacttgaggaggcagtctgcccattctcagatctccagctgcatgctgggagaaccactgctctcttcaaagctgtcagatgggggcatttaagtctgcagaggttactgctgtctttttgtttgtctgtgccctgcccccagaggtggagcctacagaggcaggcaggcctccttgagcagtggtgcactccacccagttcgagcttcccagctgctttgtttacctactgaagcctgggcaatggcgggcgcccctccccccgccttgctgctgccttgcagtttgatctcagactgctgtgctagcaatcagcgacactccgtgggcgtaggaccctccgagctaggtgcggaatataatctcctggtgtgccatttcctaagcccgttggaaaagcgcagtattcgggtgggagtgacccgattttccacgtgccgtctgtcacccctttccttgaccatgaaagggaactccctgatcccttgcacttcccgagtgaggcaatgcctcaccctgctttggctcatgcacggtgcgctgcacccactgtcctgcgcccactgtctagcacttcctagtgagatgaacccagtacctcagatggaaatgcagaaatcacccttcttctgcgtcgctcacgctgggagctgtagactggagctgttcctattcggccaccttggctcctcc

SEQ ID NO: 10301 - DNA, 4908 bp, Homo sapiens
tttttttctttctctttatgtatttattgagttacttacttgtttttgatatctttttttattatactttaagttctaggttacatgtgcacaacgtgcaggtttgttacgtatgtatacatttgccatgttggtgtgctgcacccattaactcgtcatttacattaggtatttctcctaatgcttatccctcccacctctccccaccccacaacaggacccagtgtgtgatgttccccttcctgtgtccaagtgttctcattgttcagttcccatctatgagtgagaacatgtggtgtttggttttctgtccttgcaatagtttgctcagaataatggtttccagcttcatccatgtccctacaaaggacatgaactcatccttttttatggctgcatagtattccatggtgtatatgtgccacaatttcttaatccagtctatcattgatggacatttgggttggttccaagtctttgctattgtgaatagtgccacagtaaacatacgtgtccatgtgtctttatagcagcatgatttataatcctttgggtatatacccagtagtgggatggctgagtcaaatggtatttctactctagatccttgaggaattgccacactgtcttccacaatggctgaactagtttacagtcccaccaacggtgtaaaagtgttcctatttctccacatcctctccagcacctgttgtttcctgactttttaatggtcaccattctaactggtgtgagatggtatctcattgtggttttgatttacatttttctgatggccagtgatgatgagcattttttcatgtgtcttttggctgcataaacatcttcttttgagaagtgtctgttcatatcctttgcccactttttgatggggttgtttgattttttcttgtaaatttgtttaagttctttgtagattctggatattagccctttgtcagatgcgtagattgcaaaaattttctcccattctgtaggttgcgtgttcactctgatgatagtttcttttgctgtgcagaagctcgttagtttaattagatcccatttgtcaattttggcttttgttgccattgcttttggtgttttagtcctgaagtccttgcccatgcctatgtcctgaatggtattgcctaggttttcttctagggtttttatggttttaggtctaacatttaagtctttaatccatcttgaattaatttttgtataaggtataaggaagggatccagtttcagctttctacataaggctagccagttttcccagcaccatttattaaatggggaatcctttccccatttcttgtttttgtcaggtttgtcaaagatcagatggttgtagatgtatggtattatttctgagggctctgttctgttccattggtctatatctctgttttggtaccagtaccgtgctgttttggttactgtagccttgtagtatagtttgaagtcaggtagcgtgatgcctccagctttgttcttttggcttaggattgtcttggcaatgtgggctcttttttggttccatatgaactttaaagtaattttttccaattctgtgaagaaagtcattggtagcttgatggggatggcattgaatctataaattaccttgggcagtatgaccattttcacgatattgattcttcctatccatgagcatggaatgttcttccatttatttgtgtcttcttttattccaatgagcagtggtttgtagttctccttgaagaggtccttcacatcccttgtaagttggattcctaggtattttattctctttgaagcaattgtgaatgggagttcactcatgatttggctctctgtttgtctgttattagtgtataggaatgcttgtgatttttgcacattaattttgtatcctgagactttgctgaagttgcttatcagcttaaggagattttgggctgagacaatggggttttctaaatatacaatgatgtcatctgcaaacggacaatttgacttcctcttttcctaattgaataccctttatttctttctcctgtctgattgccctggccagaacttccaacactatgttgaataggagtggtgagtgagggcatccttgtcttgtgccagttttcaaagagaatgcttccagtttttgtctattcaggatgatattggctgtgggtttgtcataaatagctcttattattttgagatacgtcccatcagtacctagtttattgagagtttttagcatgaagggctgttgaattttgtcaaagcccttttctgcatctattgagataattatgtggtttttgtcattggttctgtttatatgatggattatgtctattgatatgtgtatgttgaaccagccttgcaacccagggatgaggccaacttgatcgtggtggataagctttttgatgggctgctggattcggtttgccagtattttattgaggatttttgcatcgatgttcatcagggatattggtctaaaactctctttttttgttgtttttatgccaggctttggtatcagaatgatgctggcctcataaaatgagttagggaggattccctctttttctatcgattggaatagtttcagaaggaatggtaccagctcctctttgtacctctggtagaattcggctgtgaatccatctggtcctggactttttttgtttggtaggctattcattattgcctcaatttcagagcctgttattggtctattcagggattcaacttcttcctggtttagtcttgggagggtgtatgtgtccagtaatttatccatttcttctagattttgtagtttattttcatagaggtgtttatagtattctctgatggtagtttgtatttctgtaaaattggtggtgatatccccattatcattttttatcgtgtctatttgattcttctctcttttcttctttattagtcttgctagtggtctatcagttttgctgatcttttcaaaaaaccagctcctggattcattgattttttttttgaagggtttgttgtgtctctgtctccttcagttctgctccgatcttagttatttcttgccttctgccaacttttgaatgtgtttgctcttgcttctctagttcttttaattgtgatgttagggtgtcaattttagatctttcctgctttctcttgtgggcatttagtgctataaatttccctctacacactgctttaaatgtgtcccagagattctggtatgttgtgtctttcttctcattggtttcaaagaacatctttatttctgccttcatttcgttacgtacccagtagtccattgttcagtttccatgtagttgagtggttttgagtgagtttcttaatcctgagtctagtttgattccactgtggtcagagagacagtttgttgtaatttctgttcttttacatttgctgaggagtgttttacttgcaactatgtggtcaattttggaataagtgcaatgtggtgctgagaagaatgtgtattctgttgatttgggatggagagttctatagatgtctattaggtccacttggtgcagagctgagttcaattcgtggatatccttgttaactttctgtctcgttaatttgtctaacattgacagtggggtgttaaagcctcccaatattattgtatgggagtctaagtctctttgtaggtctctaaggacttgctttatgaatctgggtgctcctgtattgggtgcatatatatttaggatagttagctcttcttgttgaattgatccctttaccattatgtaatggccttctttgtctcttttgatctttgttggtttaaagtctgttttatcagagactaggattgcaacccctgccttttttttgttttccatttgcttggtagatcttcctccatccctttattttgagcctatgtgtgtctctgcccgtgagatgagtctcctgaatacagcacacttactggtcttgactctctatccaatttgccagtctgtgtctttcatttggagcatttagcccatttacatttaaggtgaatattgttatgtgtgaatttgatcctgtcattatgatgttagctggttattttgcttgttagttgatgcagtttcttcctggcatcaatggtctttacaatttggcatgtttttgcaatggctggtaccggttgttcctttccatgtttagtgcttccttcaggagctcttgttcagcaggcctggtagtgacaaaatctgtcagcatttgtttgtctgtaaaggattttatttctccctcacctatgaagcttagtttggctggatatgaaattctgggttgaaaattcttttctttaagaatgttgactattggcccccactctcttctggcttatagagtttctgctgagagatccactgttagtctgatgggcttccctttgtgggtaacccgacctttctctctggctgcccttaacattttttccttcatttcaactttggtgaatctgacgattatgtatcttggagttgctcttctcgaggagtatctttgtggcgttctctgtatttcctgaatttgaatgttggcctgcgttgctaggttggggaagttctcctggattatcctgaagagggttttccaacttggttccattctctccatcactttcaggtacactaatgagatgtagatttggtcttttcacatagtcccatatttcttggagtctttgtttctttttactcttttttctctaaacttctcttcttgcttcatttcattcatttgatcttcaatcactgataccctttcttccacttgatcaaatcagctactgaagcttgtgcatgtgtcacgtagttcttgtgccatggttttcagctccatcaggtcatttaaggtcttctc

SEQ ID NO: 10302 - DNA, 5708 bp, Homo sapiens
tgctcatttcctttcttttttttttcattatactttagttttagggtacatgtgcactacgtgcaggttaattacatatgtatacatgtgccatgttggtgtgctgaacccagtaactcgtcatttaacattaggtatatctccaaatgctatccctccccacttccctcaccccacaacaggccctggtgtgtgatgttcccattcctgtgtctatgtgttctcattgttcaattcccacctatgagtgaggacatgtggtgtttggttttttgtccttgcaatagtttgctgagaatgatggtttccagcttcatccatgtccctacaaaggacatgaactcatcattttttatggctgcatagtattccctggtatatatgtgccacattttcttaatccagtctatcattgttggacatttgggttggttccaagtctttgctattgtgaatagtgctgcaataaacatacgtgtgcatgtgtctttatagcagcatgatttataatcctttgggtatatacccagtaatgggatggctgggtcaaatggtatttctagttctaactgggtcaaatggtatttctagttctagatccctgaggaatcaccacactgacatccacaatggttgaactagtttacattcccaccaacagtgtaaaagtgttcctatttctccacatcctctccagcgtctgttgtttcctgactttttaatgatcgccattctaactggtgtgagatggtatctcattgtggttttgatttgcatttctctgatggccagtgatgatgagcattttttcatgtgttttttggctgcataaatgtcttcttttgagaagtgtctgttcatatccgttgcccactttttgatgggattgtttgtttttttcttgtaaatttgtttgagttcattgtagattctggatattagtcctttgtcagatgaatagattgcaaaaattttctcccattctgtaggttgcctgttcactctgatggtagtttcttttgctgtgcagaagctctttagtttaattagatcccatttgtcaattttggcttttgttgccattgcttttggtgttttagacatgaagtccttgcccttgcctatgtcctgaatggtattgcctaggttttcttctagggtttgtatggttttagatctaacatttaagtctttaatccatcttgaattaattttagtataaggtgtaaggaagggatccagtttcagctttctacatacgggtagccagttttcccagcaccatttattaaatagggaatcctttccccatttcttgtttttatcaggtttgtcaaagatcagatggttgtagatatgcggcattatttctgagggctctgttctgttccattggtctatatctctcttttgataccaataccatgctgttttggttactgtagccttgtagtatagtttgaagtcaggcagcgtgatgcctccagctttgttcttttggcttaggattgactttgcaatgcgggctctcttttggttccatatgaactttaaggtagttttttccaattctgtgaagaaagtcattggtagcttgatgggaatggcattgaatctataaattaccttgcgcagtaaggccattttcacaatattgattcttcctacccatgagcatggaatgttcttccatttgtttgtatcctcttttatttcattgagtagtggtttgtagttctcctcgaagaggtccttcacatcccttgtaagttggattcctaggtattttattctctttgaagcaattgtgaatgggagttcactcatgatttcgctctctgtttgtctgttattggtgtataagaatgcttgtgatttttgcacattgattttgtaccctgagactttgctgaagttgcctatcagcttaaggagatttggggctgagacaatggggttttctagatatataatcatgttatctgcaaacagggacaatttgacttcctcttttcctaattgaataccctttatttccttctcctgcctaattgccctggccagaacatccaacactatgttgaataggagtggtgagagagggcatccctgtcttctgccagttttcaaagggaatgcttccagtttttgcccattcagtatgatattggctgtgggtttgtcatagatagctcttattttgagatacgtcccatcaatacctaatttattgagagtttttagcatgaagtgttgttgaattttgtcaaaggccttttctgcatttattgaaataatcatgtggtttttgtcgttggttctgtttatatgctggattacgtttattgattttcgtgtgttgaaccagccttgcatcccagggatgaaacccacttgatcatggtggataagctttttgatgtactgctggatttggtttgccagtattttattgaggatttttgcattgatgttcatcagggatatcggtctaaaattctctttgtttgttgtgtccctgctaggcttttgtatcaggatgatgctgatctcataaaatgagttagggaggattccctctttttctattgattggactagtttcagaaggaatggtaccagctcctccttttacctctggtagaactcggctgtgaatccatctggtcctggactttttttggttggtaagctattaattattgcctcaatttcagagcctgttattggtctattcagagattcaacttcttccttgtttagtcttgggagagtgtatgtgtccaggaatttatccatttcttctagattttctagtttatttgtgtagaggtgtttatagtattctctgatggtagtttgtatttctgtggaattggcggtgatatcccctttatcattttttattgcgtcgatttgattcttctctcttttcttctttattagtcttgctagtggtctatcaattttgttgaccttttcaaaaaaccaggtcctggattcactgattttttgaagggttttttgtgtctctgtttccttcagttctgctctgatcttagttatttcttgccttctgctagcttttgaatgtgtttgctcttgcttctctagttcttttaattgtgatgttagggtgtccattttagatctttcctgctttctcttgtgggcatttagtgctataaatttccctctacacactgctttgaatgtgtcccagagattctggtatgttgtgtgtttgttctcgttggtttcaaagaacatctttatttctgccttcatttcgttatgtacccagtagtcattcaggagcaggttgttcagtttccatgtagttgagcagttttgagtgagtttcttaatcctgtgttctagtttgattgcactgtggtctgagagacagtttgttacaatttctgttcttttacatttgctgaggagtgctttacttccaactatgtggtccattttggaataagtgaggtgtggtgctgagaagaatgtatattctgttgatgtggggtggagagttctgtagttgtctattaggtccacttggtgcagagctgagttcaattcctggatatccttgttaactttctgtctcgttgatctgtctaatgttgacagtggggtgttaaagtctcccagtattattgtgtggtagtctaagtctctttgtaggtcactcaggacttgctttacgaatctgggtgctcctgtattgggtgcatatatatttaggatagttagctcttcttgttgaattgatccctttaccattatgtaatggccttctttgtctcttttgatctttgttggtgtaaagtctgttttatcagagactaggattgcaacccctgcctttttttcttttccatttgctcggtagatcttcctccatccttttattttgagcctatgtgtgtctctgcacgtgagatgggtttcctgaatacagcacactgatgggtcttgactctttatccaatttgccagtctgtgtcttttaattggagcatttagtccatttacatttaaagttaatattgttatgtgtgaatttgatcctgtcattatgatgttagctggttattgtgctcgttagttgatgcagtttcttcctagtctcgatggtctttacattttggcatgattttgcagcggctggtaccggttgtttctttccatgtttagcacttccttcaggagctcttttagggcaggcctggtggtgacaaaatctctcagcatttgcttgtctgtaaagtattttatttctccttcacttatgaagcttagtttggctggatatgaaattctgggttgaaaattcttttctttaagaatgttgaatatcggcccccactctcttctggcttgtagagtttctgccgagagatctgctgttaagtctgatgggcttccctttgtgggtaacccgacctttctctctggctgcccttaacattttttccttcatttcaactttggtgaatctgacaattatgtgtcttagagttgctcttctcgaggagtatctttgtggcgttctctgtgtttcctgaatttgaatgttggccttccttgctagattggggaagttctcctgggtaatatcctgcagagtgttttccaacttggttccattctctccatcactttcagttacaccaatcagacatagatttggtcttttcacatagtcccatatttcttggaggctttgttcgtttctttttattcttttttctctaaacttctcttcttgcttcattttattcatttgattttccatcactgataccctttcttccagttgattgaatgggctactgaggcttgtgcattcgtcacgtagttctcgtgcattggttttcaccaccatcaggtcctttaagaacttctctgcattggttattctagttagccattcgtctagttttttttcaaggtttttaacttctttgccatgggttagaacttcctccttcagctcagagtagtttgatcatctgaagacttcttctctcaactcatcaaagtcattctccatccagctttgttccgttgctggtgaggagctgcgttcctttggaggaggagaggcactcgatttttagagtttccagtttttctgctctgttttttccccatctttgtggttttatctacctttggcctttgatgatggtgacgtacagatggggttttggtgtggatattctttctgtttgttagttttccttctaacggtcaggaccctcagctgcaggtctgttggagtttgctggaggtccactccagaccctgtttgcctgggtatcagcagcggaagctgcagaacagcagatattggtgagcagcaaatgttcctgcctgattgttcctctggaagttttgtctcagaggagtagtcggctgtgtgaggtgtcagtctgcccctactgggaggtgcctcccagttaggctacttgggggtcagggacccacttgaggaggcagtctgtctgttctcagatctccagctgcgtgctgggagaaccactactctcttcaaagctgtcagacagggacatttaagtctgcagaggattctgctgccttctgtttggcaatgcgctgcctccagaggtggagtctgcagaggcaggcaggcctccttgagctgtggtgggctccacccagttggagcttcctgg

SEQ ID NO: 10303 - DNA, 6198 bp, Homo sapiens
tttctattccattatttttttttattgttttattttttattttttattttattattattctactttaagttttagggtacatgtgcacaatgtgcagtttagttacatatgtatatatgtgccatgctggtgtgctgcacccattaactcgtcatttagcattaggtatatcttctaatgctatccctcccccctccccccaccccacaacagtccctagagtgtgatgttccccttcctgtgtccatgtgttctcgttgttcaattcccacctatgagtgagaacatgcggtgtttgggtttttgtccttgcgatagtttactgagaatgatatttccaatttcatccatgtccctacaaaggacatgaactcatcatttttttgtggctgcatagtattccgtggtgtatatgtgccacatttttttaatccagtctatcattgttggacatttgggttggttccaagtctttgctattgtgaataatgccgcaataaacatacgtgtgcatgtgtctttatagcagcatgatttatagtcctttgggtatatacccagtaatgggatggctgggtcaaatggcatttctagttctagatccctgaggaatcgccacactgacttccacaatggttgaactagtttacagtcccaccaacagtgtaaaagtgttcctatttctccacatcctctccagcacctgttgtttcctgactttttaatgattgccattctaactggtgtgagatggtatctcattgtggttttgatttgcatttctctgatggccagtgatggtgagcattttttcatgtgtcttttggctgcataaatgtcttcttttgagaagtgtctgttcatgtcctttgcccactttttgatggggttgtttgtttttttcttgtaaatttgtttgagttcattgtagattctggatattagccctttgtcagatgagtaggttgcgaaaattttctcccattttgtaggttgcctgttcactctgatggtagtttcttttgctgtgcagaagctctttagtttaattagatctcatttgtcaattttggcttttgttgccattgcttttggtgttttagacatgaagtccttgcccatgcctatgtcctgaatggtactgcctaggttttcttctagggtttttatggttttaggtctaagtttaagtctttaattcatcttgaattaatttttgtataaggtgtaaggaagggatccagtttcagctttctacatatggctagccagtttccccagcaccatttattaaatagggaatcctttccccattgcttatttttctcaggtttgtcaaagatcagatagttgtagatatgcagcattatttctgagggctctgttctgttccattgatctatatctctgttttggtgccagtaccatgctgttttggttactgtagccttgtagtatagtttgaagtcaggtagtgtgatgcctccagctttgttcttttggcttaggattgacttggcaatgtgggctcttttttggttccatatgaactttaaagtacttttttccaattctgtgaagaaagtcattggtagcttgatggggatggcattgaatctataaattaccttgggcagtatggccattttcatgatattgattcttcttacccatgagcatggaatgttcttccatttgtttgtatcctcttttatttcattgagcagtggtttgtagttctccttgaagaggtccttcacgtcccttgtaagttagattcctaggtattttattctctttgaaataattgtgaatgggagtttgctcatgatttggctctctgtttgtctgttgttggtgtataagaatgcttgtgatttttgtacattgattttgtatcctgagactttgctgaagttgcttatcaacttaaggagattttgggctgagacaatggggttttctagatatacaatcatgtcatctgcaaacagggacaatttgacgtcctctttcctaattgaataccctttatttccttctcctgcctaattgccctggccagaacttccaacactatgttgaataggagtggtgagagagggcatccctgtcttgtgccagttttcaaagggaatgcttccagttattgcccattcagcatgatattggctgtgggtttgtcatagatagctcttattattttgagatacgtcccatcaatacctaatttattgagagattttagcatgaagggttgttgaattttgtcaaaggccttttctgcatctattgagataatcatgtggtttttgtctttggttctgtttatatgctggattacatttattgatttgcgtatattgaaccagccttccatcctggggatgaagcccacttgatcatggtggataaggtttttgatgtgctgctggattcggtttgccagtattttattgaggatttttgcatcaatgttcatcaaggatattggtctaaaattctttttttcggttgtgtctctgcctggctttggtatcaggatgatgctggcctcataaaatgagttagggaggattccctctttttctattgattggaatagtttcagaaggaatggtaccagctcctccttatacctctggtagaattcagctgtgaatccatctggtcctggactctttttggttggtaagctattgattattgccacaatttcagagcctgttattggtctattcagagattcaacttcttcctggtttagtcttgggagggtgtatgtgtcgaggaatttatccatttcttctagattttctagtttacttgtgtagaggtgtttgtagtattctctgatggtagtttgtatttctgtgggattggtggtgatatcccctttatcattttttattgcgtctatttgattcttctctcttttcttctttattagtcttgctagcggtctatcaattttgttgatcctttcaaaaaacaagctcctggattcattaattttttgaagggttttttgtgtctctatttccttcagttctgctctgattttagttatttcttgccttctgctagcttttgaatgtgtttgctcttgcttttctaattcttttaattgtgatgttagggtgtcaattttggatctttcctgctttctcttgtgggcatttagtgctataaatttccgtctacacactgctttgaatgtgttccagagattctggtatgttgtgtctttgttctcgttggtttcaaagaacatctttatttctgccttcatttcgttatgtacccagtagtcattcaggagcaggttgttcagtttccatgtagttgagtggttttgagtgagtttcttaatactgagttctagtttgattgcactgtggtctgagagatagtttgttataatttctgttcttttacatgtgctgaggagagctttacttcgaactatgtggtcaattttggaataggtgtggtgtggtgctgaaaaaaatgtatattctgttgatttggggtggagaattctgtagatgtctattaggtccacttggtgcagagctgagttgaattcctgggtatccttgttaactttctgtctcgttgatctgtctaatgttgacagtggggtgttaaagtctcccattattattgtgtgggagtctaagtctctttgtaggtcactaaggacttgctttatgaatctggatgctcctgtattgggtgcacatgtatttaggatagttaattcttcttgttgaattgatacctttaccattatgtaatggccttctttgtctcttttgatctttgttggtttaaaatctgttttatcagaggctaggattgcaacccctgcctttttttgttttccatttgcttggtagatcttcctccatccttttattttgagcctatgtgtgtctctgcacatgagatgggtttcctgaatacagcacactgatgggtcttgactctttatccaatttgccagtctgtgtcttttaattgaagcatttagtccatttacatttaaagttaatattgttatgtgtgaatttgatcctgtcattatgatgttagctggttattttgcttgttagttgatgcagtttcttcctagcctcaatggtctttacaatttggcctgattttgcagtggctgataccggtttttcctttccatgtttagtgcttccttcaggagctcttttagggcaggcctggtggtgacaaaatctctcagcatttgcttgtctgtaaagtattttatttctccttcacttatgaagtttagttggctcaatatgaaattctgggttgaaaattcttttctttaagaatgttgaatattggcccccactctcttttggcttgcagagtttctgccgagagatctgctgttagtctgatgggcttccctttgtgggtaacctgacctttctctctggctgcccttaacattttttccttcatttcaactttggtgaatctgacaattatgtgtcttggagttgctcttctcgaggagtatctttgtggcattctctgtatttcctgaatctgaatgttggcctgccttgctagattggggaagttctcctggataatatcctgcagagtgttttccaacttggttccattctccccgtcactttcaggtacaccaatcagacgtagatttggtcttttcacatagtcccatatttcttggaggctttgttcgtttctttttattcttttttctctaaacttcccttctcgcttcatttcattcatttcatcttccatcactgataccctttcttccagttgatcacatcggcccctgaggcctctgcattcttcatgtagttctcgagccttggctttcagctccatcggctcctttaagcacttcactgtattggttattgtagttatacattcatctaaatttttttcaaagtttttaacttctttgcctttggtttgaatttcctcctgtagctcggagtagtttgatcgtctgaagccttcttctctcaactcgtcaaagtcattctccgtccagctttgttctgttgctggtgaggaactgcattcctttggaggaggagaggcactctgctttttagagtttccagtttttctgctctgttttttccccatctttgtggttttatctacttttggtctttgatgatggtgatgtacagatgggtttttggtgtggatgtctttctgtttgttagttttccttctaacagacaggaccctcagctgtaggtctgttggagtttgctagaggtccactccagaccctgtttgcctgggtaacagcagcggtggctgcagaacagcggattttcatgaaccacgaatgctgctgtctgatcgttcctctggaagttttgtctcagaggagtacccggccgtatgaggtgtcagtctgcccctactggggggtgcctcccagttaggctgctcgggggtcaggggtcagggacccacttgatgaggcagtctgcgtgttctcagatctccagctgcgtgctgggagaaccattgctcccttcaaagctgtcagacagggacatttaagtctgcagaggttactgctgtctttttgtttgtctgtgccctgcccccagaggtggaacctacagaggcagtctggcctccttgagctgtggtggtctccacccagtttgagcttcccggctgctttgtttacctaagcaagcttgggcaatggcaggcgcccctcccccagcctcgctgccgccttgcagtttgatctcagactgctgtgctagcaatcagtgagactccgtgggcgtagaaccctctgagccatgtgcgggatataatctcctggtgcgccgttttttaagcccgtcagaaaagcgcagtattagagtgggagtgacccgattttctaggtgctgtctgtcacccctttctttgactaggaaagggaacttcctgaccccttgcacttcccgaatgaagcaatgcgtcgccctgctttggctcgcgtacggtgcgctgcacccactgtcctgcgcccactgtctggcactccctagtgagatgaacccggtacctcagatggaaatgcagagatcacctgtcttctgcatcgctcacgctgggagctgtagaccagagctgttcctattcagccatattggctgcccc

SEQ ID NO: 10304 - DNA, 44239 bp, Homo sapiens
atgttctttttttttttctttttctttttgttttttatactttaagttctagagtacatgtgcacaacatgcaggtttgttacatatgtatacatgtgccatgttggtgtgctgcacccattaactcgtcatttacattaggtatatctcctaatgctatccctcccccctccccccaccccacaacaggccccggtgtgtgaggttccccttcctgtgtccatgtgttctcattgttcaattcccacctatgagtgagaacatgggatgtttggttttttgtccttgcgatagtttgctgagaatgatggtttccagcttcatccatgtccctacaaaggacatgaactcatccttttttatggctgcatagtattccatggtgtatatgtgccacattttcttaatccagtctatcattgatggacatccgggttggttccaagtctttgctattgtgaatagtgccgcaataaacatacgtgtgcgtgtgtctttatagcagtatgatttataatcctttgggtatatacccagtaatgggatggctgggtcaaaaggtatttctagttctagatccctgagcaatcgccacactgtcttccacaatcgttgaactagtttacagtcccaccaacagtgtagaagtgttcctatttctccacatcctctccagcacctgttgtttcctgactttttaatgatcaccattctaactggtgtgagatggtatctcattgtggttttgatttgcatttctctgatggccagtgatgatgagcattttttcatgtatcttttggctgcataaatgtcttcttttgagaagtgtctgttcatatactttgcccactttttgatggtgttgtttgtttttttcttataaatttgtttgagttctttgtagattctggatattagatagccctttgtcagatgagtagattgcaaaaattttctcccattctgtaggttgcctattcactctgatggtagtttcttttgctgtgcagaagctctttagtttaattagatcccatttgtcaattttgacttttgttgccattgcttttggtgttttggacatgaagtccttgcccatgcctatgtcctgaatggtattgcctaggttttcttctagggtttctatggttttaggtctaagacttaagtctttaatccatcttgaattaatttttgtataagttgtaaagaagggatccagtttcagctttctacataaggctagccagttttcccagcaccatttattaaatagggaatcctttccccatttcctctttttgtcaggtttgtcaaagattagatggttgtagatgtgtagtattatttctgagggctctcttctgttccattggtctacatctctgttttggtaccagtaccttgctgttttggttactgtagccttgtagtatagtttgaagtcaggtagcatgatgcctccagctttgttcttttggcttaggattgacttggtgatgcgggctcttttttggttccatatgaactttagttttttccaattctgtgaagaaagtcactggtagcttaatggggatggcattgaatctataaattaccttgggcagtatggccattttcatgatattgattctacctatccatgagcatggaatgttcttccatttgtttgtgtcctcttttatttcgttgagcagtggtttgtagttctctttgaagaggtccttcacatcccttgtaagttggattcctaggtattttattctctttgaagcaattgtgaatgggagttcactcatgatttggctctctgtttgtctgttattggtatataagaatgcttgtgatttttgcacattgattttgtatcctgagactttgctgaagttgcttatcagcttaaggagattttgggctgagacaatggggttttctaaatatacaatcatgtcatctgcaaacagggacagtctgacttcctcttttcctaattgaataccctttatttctttctcctgcctgattgccctggctagaacttccaacactatgttgaataggagtggtgagagaggtcatccttgtgatgtgccagttttccaagggaatgcttccagtttttgcccattcagtatgatattggctgtgggtttgtcataaatagctcttattattttgagatacgtcccatcaataccaaatttattgagagtttttagcattggagggctgttgaattttgtcaaaggccttttctgcatctattgagataatcatgtggcttttgctttggttctgtttatatgctggattacgtttattgatttgcatgtgttgaaccagccttgaatcccagggatgaagcccacttgatcatggtggaatagctttttgatgtgctgctggattcggtttgccagtattttattgaggattttttcatcgatgttcatcagggatattggtctaaaattctctttttttgttgtgtctctgccaggctttggtatcaggatgatgctggcctcataaaatgagttagggaggattccctctttctattgattggaatagtttcagaagtaatggtaccagctcctccttgtacctctggtagaattctgctgtgaatccgtctgatcctggactttttttggttggtaagctgttaattattgcctcactttcagagcctgttattggtctattcagggattcaacttcttcctggtttagtcttcggagggtgtatgtgtcgaggaatttatccatttattctagattttctagtttatttgcgtagaggtgtttatagtattctctgatggtagtttgcatttctgtgggatcggtggtgatatcccagttatcattttttcttgcgtctatttgattcttctctcttttcttctttattagtcttgctagcagtctatcaattttgttgatcttttcaaaaaaccagctcctggattcattgattttttgaagggttttttatgtctctatttccttcagttctgctctgatcttagttatttctcaccttctgctagcttttgaatgtgtttgctcttgcttctctagttcttttaattgtgatattagggtgtcaattttagatctttcctgctttctcttgtgggcatttagtgctgtaaacttccctctacatactgctttaaatgtgtcccagagattctgatatgttgtgtctttgttctcattggtttcaaagaacatctttatttctgccttcatttcattgtgtacccagtagtcattcaggaacaggttgttcagtttccatgtagttgagcggttttaagtgagtttcttaatcctgagttctagtttgattgcactgtgttctgagagacagtttgttataatttctgttcttttacatttgctgaagattgctttagttctaactatgtggtcaattttggaataagtgctgtgtggtgctgagaagaacgtatattctgttgattttgggtggagagttctgtagatgtctattaggttggcttggtgcagagctgagttcaattcctggatatccttgttaagtttctgtctcattgatctgtctaatgttgacagtggggtgttaaagtatcccattattattgtgtgggagtctaagtctctttccaggtctctaaggacttgctttatgaatctgggtgctcctgtattgggtgcatatatatttaggatagttagctcttcatgttgaattgatccctttaccattatgtaatggccttctttgtctcttttgatctttgttggtttaaagtctgttttatgagagactaggattgcaacccctgccttttttttgttttccatttgcttggtagatcttcctccatcctttattttgagcctatgtgtgtctctgcatatgagatgggtctcctgaatacagcacactgatgggtcttgactttttatccaatttgccagtctgtgtcttttaattggagcatttagcccatttacatttaaggttaatattgttgtgtgtgaatttgatcctgtcattatgatgttagctggttattttgctcgttagttgatgcagtttcttcctagcctcgatggtctttacaatttggcatgtttttgcagtggctggtgccggttcttcctttccatgtttagtgcttccttcaagagctcttgtagggcaggcctggtggtgacaaaatctctcatcatttgcttgtctgtaaaggattttatttctccttcacttatgaagcttagtttggctggatatgaaattctgggttgaaaattctttcctttaagaatgttgaatattggtccccactctcttctggcttgtagagtttctgctgagagatcagctgttaatctgctgggcttccctttgtgggtaacccaacctttctctctggctgcccttaacattttttccttcatttcaactttggtgaatctgacaattatgtgtcttggagttgctcttctggaggagtatctttgtggcgttctctgtatttcctgaatttgaatgttggcctgccttgctaggttgggaagttctcctgaataattccctgcagagtgttttccaacttggttccattctccctgtcactttcaggtacaccaatcagacgtagatgtggtcttttcacatagtcccatatttcttggaggctttgttcatttctttttactgttttttctctaaacttctcttctcgcttcatttcattcatttgatttcaatcactgataccctttcttccagttgatgaaatcagctactgaagcttgtgcatttgtcacgtagttcacgtaccatggttttcagctccatgaggtcatttaaggacttttctacactggttattctagttagccattcgtctaatcttttttcgaggtttttagcttctttgtgatgagttcgaatttcctcctttagcttggagaagtttgatcatctgtggccttcttctctcaacttgtcagtcattctccatccagctttgttccattgctggtgaggagctgtgttcttttggagggggggaggtgctctgatttttagaattttcagcttttctgctctgttttttccccatctttgtggttttatctacctttggtctatgatgatggtgatgtacagatggggttttggtgtggatgtcctttctgttttttagttttccttctaacagtcaggaccctcagctgcaggtctgttggagtttgctggaggtccactccagaccctgtttgcctgggtgtcagcagcggaggctgcagaacagtgaatattgctgaacagcaaatgttgctgcctgatcattcctctgcaagcttcgtctcagaggtgtacccggccagttgacgtgtcagtctgcccctactgggaggtgcctcctggataggctactcgggggtcagggacccacttgaggaggcagtctgtctgttctcagatctcaaactccgtgccgggagaaccactactctcttcaaaggtgtcagacatggacgtttaaatctgcagaggtttctgctgccttttgttcggctatgtcctgcccccagagttggagcctacagaggcaggcagtcctccttgagctgtggtgggctccaccctgttccatcttccaggccgctttgtttacctattcaagccttggcaatggcgggcgcccctcccccagcctcgctgctgccttgcagttggatctcagcctgctgtgctagcaatgagcgaggctccatgggcgtgggatcctctgagccatgcgcgggatataatctcctggtgtgccgtttgctaagacccttggaaaagtgcagtattagggtgggagtgaccggattttccaggtgctgtctgtcatggcttcccttggctaggaaagggaattcccttaccccttgtgcttcctaggtgaggtgatgcctcgccctgcttcagctctcgctcagtgggctgcacccactgtcctgcacccactgtccaacacgccccagtgagatgaacccggtacttcggttggaaatgcagaaatcacccatcttctgtgtcactcacactgggagctgtatactgcagctgttcctatttggccaccttgccttagaattcaaaagtatgttcttatatgaatctgtttggcttcctttgttcataggtgttttttcacagataacaaagaaaaactagatgatatatctaatgatgaaaaaaatgaattcctgaacaagataaaacaggtaagaaggcagaagtcatgacttttacattataattacatttcatttttagttaatgtttaaaatatgtgagaaatatagaatttttcaaaaggatgtttttcattgaccaataatatggttgtttgtagtaatttaaaaaattttatctcctcccaaagtactttaattatatcaaagagcaaaggttgtccatgtacagaggaactgttttttggtaacttttcatgtgagtatgggtaccttaggactatccatgattaatggattaatggatatttttgatgtgaattatttagaaagttagaatcttcttgctgttgtgtgctacgcctgtgaagtgcagcaacctgctctacacttaagaatattctaaatattatatatcatattgtgatggttaatactgagtgtcaacttgactagatcaaaggatgcaaagtattgatcttgggtgtgtctgtgagggtgttgccaaaggagattaacatttgagtcagtaggctgggaaaagcagacccacccttaatctgggtgggcagcatctaatcagctgccagtgcggccaggatataaagcaggcagaaaaacgtgaaaagactagaccagcttagcctcccagactacatctttctcccatgctggatgcttcctgctctcgaacaccagattccaggttcttcagctttggtacttggactggcttcctggctcctcagcttgcagatggcctattgtgggaccttgtgattgtgtgagttaatactccttaataaactcccctttatgtatacatctatcctgttagttctgtccctctagagaaccctgactaatacacatattataatataatattctaaatacttatttagaagtatttgagtcagatttagcccccaggaaaattcactagacatttttcaaacttaggttaaaaaaaaatcatatcataagtagataatcatgtgagtaaaccaagatttagcctcaaaatattcaatgaagccttcattaggatagtgaaaaattgggggtgagggtgagtaatacaattaaaattcaaccaaaaggccttggttaaataagtatcagtattgctcataatacgttattgagtgacaaatactatattataaaacagtaggctagtcatggtggctcacgcctgtaattccagcactttgggaggcctaggtgagtggatcacctggggtcaggggtttgagatcagcctgaccaatatggtgaaaccccatttctacaaaaataaaaaattagctgggtgtggtggtgtgcacctgtagtcccagctgctcaggaggctgagacaggagaattgcttgaacctgggagacagaggttgcagtgagctgagatcgcaccactgcactccagcctgggggcagagcaagagtccctctaaaaaagagaaacaacagtatgtatgatatgatcccatttaattacttatacacacaaatatacatacacactagacataactgaaattcttcttgtcccttgtattgaaggagaaatatccttagtatctcttcccaacacctcatatatccaaacttaatttcctttcttttctttcttttttttctttttctttttctttttttttttgagacatagtctcactctatcacccaggctggagtgcagtggcatgatctcagctcactgcaacctctgcctctggggttcaagcgattctcctgcctcagcctcccaagtggctgggattacaggcttgtgccatgacacctggctaatttttgtacttttaatagagacagggtttcattatgttggtcaggctggtctccaactcctgacctgaaatgatccacccaccaggctggaatgcagtggcatagtcacaaatcactatagcctcaacctcccaggcctaggtgatcctcctgctgcagcctgctgaatagctgagactacaggcactcaacaccatgcccagctaatttttaaattatttgcagagacaggtcgctttatgttgcctcggctggttgtgaactcctcagttcaagcaatcctcctgccttggtctcccagaatgctggggattacaggcgtgagccaccacccctagccacacatacttaattttaattgttcaggacttgggtcaggtactctctgtctacatcctctatctttgttttgcccaagtcaaccaggatataaaattcacatttttcactagtttctaaaacaaatttaattacactaagcatttcatgatctattgcaaactctgttggaaattttagtggtcatggggagaaatcctgttgcagagcacaaagccatcttgttcaccaccttttctttctctcacagttcctcatctatcttcttgctgtaggataccaccccacatccaaattcttctccctcttttacaaagcataatatctgcctctgtacccatgccctgaggctcatcagggatatcaaaggcagctccctcccagaagaatgatttgtaccaattaaatgctttccatttttgcttttgtgagctatcagcatgagagatggcttcccctctgggctactgtgattcttttatttgcaaggatacctaacaacagacagaaaccagacaaggttggtttgttggctggttggttggtttcgaatttgtctttcattttgtgagcaaaatattatttttcctcccatttgtttcctactgcagaagctagtagacaactttctgacaataactccacattttctagcccacatgattttctgaacagtctaggacccctaaactggcatggcttacttggtcaaagagttttcctttaatccatagcccttagccaaattccatggttataagtgagtgatcacttcaaagaatgcaaggctcttgcttatttattattttcactagggtagaaactatgggctcttagtgacatccaatcataattctcatgagttattggaggaacattcaaagattgacattcaactcaaactttacctttttttcccagcatctcccctccctcaccttcccttgcaaccaccattctactctctacttctgagttcagtttttttttagattttgcgtataattgggatcatgtaatatttgtttttctgtacctgaattatttcacttaacatgatgtcctccagttcatccatgtgtcacaaatgacaagaatttcttcttttttaaggctgaatatattcaattgtgcatgtatacattttctttatccattcatcggctgatgaacacctaggttgattctacatcttagctactctgaatagtgctgcaatgaacatagaagtacagatatctctttgccatactgatttcatttccttgggatatatacccagcagtggcattgttggatttagctttgttattataaaatattacacattacagaacaatacataaaccataaatatacaatatttatgtacatatttttgatgaatataatttattaattttaatgaagtccagtttatcaatctttttagttaatgttctctatgtcctatgtcatgagactattctcttctgttaccattgagaagctttgttgtttgacctttcacatttaagactacgaaccatctggaatttatgtgtatgtgctttgagatagtggtcaagattcatatttttccataaggttgtccaattaaccagcaccatttactgaaaatacaatcctttccttcactacattgtggtcatactattgtcataaatcaagtatagatcataaatgtatatgtggattgttgactctattcatttgaactattcatctctcctcacactaaaacaatattgtcttaattagtacctttaaaatgagtttttatggccagtggtataaatccttcacctttgttcttcaaaagtgttccagctattcttgaccttttcaattttgtcacgttcttccaaaaaacctgtttggattttgattgggattgtgttaaatctgtaaatcagtttgaagagggtttcacattttcacagtattgaggcttccaatccgttaacatggcatatgtcttttgttttagatcttctttgttccctttgccttagctgttcagttgcactatgatgtgtccaaattttcttttcatttttcctccttgggatttatttggcttcttaaatctgagaatttctatatttcataagttctgcaaaattttcagccattatgtcctcacctgtttcttttgtcctattctccctgtgttgcccaggctggtctctaactcctgggctcaagtgatcctcccacctccgcctctcaaagtgctaggattacaggcacgagccaccacacctggcctatagtagattttgattgctttgttttacagtattgattttactcaaatgttgagaagctctagatatttgttcatcttttaattgtgcattcttttttatttatttatttatttatttttgagacaggatctcactctgtcacccagactagagtgcagtggtatgatcatggctcactgcagcctcggacctcccagtctcaagcaatcctcctgcctcagccttccaaagggtgaagctctttggaatcccagactaaaatagtgggaggtttatgtaggctcaacacctggatgagcattacatgttggcttttgttccacttgccatgcaaaaaaacccaaaacttggttttcaagtggtttcttctatgttagtaagtgttttcaaggcagaggaattttaagtgctagccttaccgctctggattcttcattctcctagaattaggcctagcaatcacctattatcctttattttttatttttatttttttagattcaagcacatgtgcaggtttattacaagggtatattgcataatgctgagatttgggctgctaatgatcccgtcacccaagtagtgaacataatacccaataggtagttttccaacccttccccacttcttccctccatctttttggagtcccagtgtctattgttcccatctttgggtccatgtatacctaatatttagctcctacttataaatgagaatatgcagtatttcattttctgcttctgcattaatccacttaggataatggcctctaggtgcacccatgttgctagaaaggatatgatttcattcttttttatggctgcataatgttccatggtgtattattaccacattttctttatccaatccactgttcatgggcacctgggttgattccatgtctttgctattctgaatagtgcagcaataaacatgagcacaggtatcctttcggtagattaatttattttcctttgggtatatactcagtaatgggattgctgggttgaatagtaattctatttttgttttttgaataattctttgttatcttgtgagttcttcaacacttctacaaatattttttcatgtagctattttagttgtcctcagatagaaggttgttttgaactattcagcccattgtttccgctaaacttgactttcttacctcgtttgaagcaatttaataagcaaaaaattctgatctcatgtagaacactggtgggtactattttttgtcctcaaatagaaatatttcacaagaagcaagcataatatcaactcaaaaatgttttgaggaagagcttctgaggatgttacattttctatagtttatattctggaaaaggacatactaacgttgctcagcagtcacagtttattcatcccattttgcatttcaatatggattattactctatggttttgcagcagggtttactatttttctatacttaaaaaaatttatagtagaggtctcaaaatatacagttgtatgtttgctatagaattaaatcactcggcatttatggcatattcacggtgggctaagcaatatcccaggtgctctccgagttgccacctgatgcagatggcctcagaggagcagtgaagccagtcctctcattcacctcctttgtttttctctagctggttgaaacactgcatgctgctcgtatggaatacaaagacctacgagagaaaatgaaaactcttgccagacaatataagattgttttaagtgaggaagaaaaagcttttttgcaaaaacaaaagattcatgatgagtatgtctttacccacacgtgtgattcaacatgccatcattatggggtgcttttcttgctatcaaagtggtggctctccacttaaacttatcctagttttaaaatctattgacaaaaatgaaaacatttgctatcattactggtttctgtctcagcagctcaggctgccataacaaaataccatagactggctgcttaagcaacagaaattgattttctcacggttctggaggctggaagtctgagtgagggcccttttctagcttacagccacccagccgctttctctctgtgtcttcacagggtggagagagaacatgctgtctgtctggtgtctttcttttataaggtcccaccctcatgtcctcatccaaacctaatcacttccccaaaggccccatctttataatatgctcgagcattatcacgacactaatgccccacaatgttcctttctgccattctaaagcactttaaattttaattttttctcatgaaaaaagcaatgcctgtacttgatttttaaattcaaatatagaaatgtatagcttagagagtaaaaattacccaaatctctctatttcttcatcatgttgggggttagcatttcaacagataaattctggagatgggggaggcacaattcagtccacagcagtttggaagatgagtcacttagataaaatactttctgatacaggcagcttcctatcaatagctgggcatttgaacaagactataaacttctctgagcctcattattttctcctgcaatttgagacaaaaaaataactacttgaaaccccatctctactaaaaatacaaaaaattagctgggcatggtggcgggtgcttgtaatcccagctactctgaaagctgaggcaggagaatcgcttcaacccaggaggcggaggttacagtaagctaagatcataccattgcactctggcctgggcgacaagagccagactccgtctcaaaacaaaacaaacaaaaaaaacccttatcaatccacacgctgagaggagcactttacatcttattaaattcattcatccgttgagctaggcattgtaattctcattttatagctggtgaaactgaagcttattcacaggtgaagctaattgttagcttaagatcacactcttattaaaaggtagagccaatatgcaaaattaatctgactgactccttcaccttccatggaagaacatgacagaattgataagcacgttaggagagacacacccactcagagacatggagcactacacaactgttcttgttgttttgtggttactattgtggtgaatattctttcagtggcttgggaattttcataaattttatgaaaatcctatgtgtatgctgggcacagtggctcacgcctgtaatccagcactttgggaggccaacatggaccaatcgcataagaccaggcatttgataccagcctgggcaacacagggaaaccccatctctacaaaagtacaaaaatcagctgggaaaaaatttgaaaaaaagaaaatcctttgcataaatttagatctagctaccactagcaaaaagacttgctttctattttttaataatttatgtagcaaatagctcatgatctgaactttcaaaactatttttgaaattcttatttgtgtttgcatatttatgtcagccttcaacaaataactctgtttttcatgatagaaatcagaaacagctgacatttatttctcagaaagaatactttctgtcacaaaagagagtagacatcaaaaatatggaagaaggactcatcacactccaggaacttcaacagtatgtttgttgcctttgaaattttttatctttactttctctgcatttattttttaataaatgatagcagtaaatctatgttgatttctaacatactacagaaaaggaagtttagaactagctctctctgtttcacagtctggaagtcactctcatggactttttcattgaaaggataaacaggttctgaattctatgggagctcctgggccccaggaatggaccagttggggtgcagtgacaagaatgtgcctgaacattatcacaacactgagtcccattgatgttcatttctgcattctaagtcattttaattttaatttttttctgattaaaaaataatacctgtacatgattttaaaattcatatataaaatgcataacttagagaataaaagttaccctaaaatctccatctctccacaggcataatcactgttaacagtttacaatatatgctttcaaatatatatttatatgtatgtatccaaaaattggattatactctactataactgaatttgttccacttaaaattatacctaggaggatgataaaacaaataaggtaaaatgttaacagttggagaatttggtgaaggatatatgggaattctttgtactatttttttatgcttacctgttgagtttaaaactatttcaaaacaaagagaatatatatatattctcaatatatctcaatcttttctctaactgcatagtattctatgcagattatagtataatacacattatactatactgtatttaaccagcactctattgatggagatttacttttgtctgttgcctatattacaaatatttgaagttaacatatctctctctacccatatgactttttttttgtaataaagtcctaaaagttgaagtgctggatcaaaggaggatgcatatttttcacttttataatgattgtcaaaatgacctatgtaaatattctaccattgtacacattaagactgagcataaggagcttatagttcagttgggcagagaagcaagactaacacatatgaaataattaatgaaccacatatgatggtgaaaaataaaccatgtatgacagtgaattatataaaacagtcgggcatgaaagtgaaatcaaggagtccttcgttatataggatttaaaatttgaactagacctttaaaagcaagtcagatttttctgtgctcattgtatgggagaatgatatcaccacacaaagggagacacatgatttaaatataggacaatcaagaagccagcttatagaactaaggtagggggtgatgaaaattcaagcacataccaacagatatctggaatgtgacaggaagcataggttccttgcttgaatggttgtccccatattgttaaataatatattcaaacatctgtttccaattatgtcagcttcataaggaaaactacgaactactaataaaagaggaggaagatcgatttggactgaatcaggttttatgttcctcatgaataatgcaaattttatagtcagttactgtgcataattgctctggtcaccaggaatctcaaagccaaatttgtggcccaatgttattatccatttaggatttttttatattattgttgctttattttaaactggttcaagttctttatggattacattaaatatgtaaataaacaaaatcagtaaggttggggtgaattgtgaagacccttagagatccagaggaggatattagatttattttggtaggaaattgagagtccatactacagtttcaaacagacaaagaaacacgagaacaggtatgtttctagtttatttaagagtgtttcctattctaagtttcatttgtgaatatttctttcaaaagatataaagcagcattttacttatgtggctttcaattcatttctgtccaagaatcacttaatagggaaaaggcggggctggggataaaaataaaggcttctgttacctatgttggaatcttcacatttccatccatcctaccacaagaaaatcttctatccttagttagtacttttccccagttcaagaaactatattggctttctgaattgtatattatatcaaatcagagctcaatctagggtctggagttcctcaacaatgtgttgaccttacttcctcttgtgtcatagggttattctttccttcatgtcctctgtatacagcaagcctaacttaagtcatagcagaggcctgacttgctgttccttccctctgtatttgcaaatgatgacaccctttccttggtaagattgcacctccattctggcaatccacattcctccctctgagaaacattaacctctagtaacccttcatcagttgcctccccagaaatctcttctctatccttggctattcaccacaaccgttgcagaatcagtttgcactaacatagaattgcaattgtctatcagtctgccactgaaatgtttagttgtttcacaaggcttattttgtctcccaattagactatagccttactgagcatacaaattatgcgtatagagtctattgtatattctaacagctcccataaatgcaaaatccaatatgtttttctttttagagcaacaaaaacagtgtatcagcaacaaatcaaaatcctgagtgctaacctggaaagagaaagtcagagatggtaaaaaaaaaaaaaaaaaaaaaaaagtttatttgtgttttgtgttatcagcagtatatgttatcttaatgaacagtgcagagtacttgttgttactagaacccaagggaatgattttcctaaattatgtgtaaattctctcggatctagatgtattggttaatttgatttttttttttttggcattgaacagaatcaaagttttccatttcaatcaagtgcggtcaccaaagagtaaaattgctaatatttgtgcaatgccttttgctcatccaggcctctttgtgaaccagtaggggaggtgacaggtatggtaagagaggaaggtggcgtgaaggctactggctctgcagatggcctgctttggttgctgtccttattagctctgtgaccaaggctaagttatttaatcacttctctttgctcccatccctataaagtggggaaggataacagtatctaccttataaagtagctgtgaatgtaaatgagatgatacatgtaaaatactgtatttagatcagtgcagctaaaaagctcttgcttatacttagctgtattttattatcgttgttgttattgttagtattattattattattttgagacagagtcttgctctgtcgcccaagatggagtgcagtggtgccatctcggcacactgcaacctctgcctcccaggttcaagcgattctcatgcctcagccaccagattagctaggactaccggcacgcactaccactcccagttaattttgtttgtttgtttgtttttgagacggactctcactccattgcccaggctgaagtgcagtggagtgatctcggctcaccacaacctccgcttcccaggttcaagcaattctcctgatagctgggattacaggcatgcactatcatgcccggctaatttttgtatttttagtagagatggggtttcactatgttggccacgctgctctcaaactcttggcctcaagtgatctgcccaccttggcctcccaaagtgctgggattacaggcatgagccaccatgcctggccaatgttattattgaatgtgcacttaaagactctaattgcacttttttttttgagacagagtttcactctttttgcccaggatagagtgcaatggcacaatctcagctcaccgcaacccccacctcccaggttcaagtgattctcctgcctcagcctcccaagtagctgggattacaggcttgtgccaccacacctggctaatttgtttgtatttttagtagagacagggtttctccatgttgggcaggctggtcttgaatgcctgacctcaggtgatctgcccgcctcggcctcccaaagtgctgggattataggcgtgagccactgcgcctggccctaattgcacatttttaccattcttcaaatatgtagctttttaatgttgtggtggagaaaaatttgagaaagcagaagtttgaaatctatcagtagcacatccggtaatttaggtaattctattactatttctgcctgggcctcattttccacttgccccaagccttcctcatttctatcctttacctgaaggaggcaagctgccaggtgtgctttgttcgctgttctattggaagtgtagatgtaacttcttactctgaagcaacttgcagagacagaattgaggcagttaatgttttgtcttactttttcatgcaatgtgtgtagtctgcaacactaatagcacaaacaattttgtgtagtcatagtatgacttgttttgctttgaatttcttcatctttttagtaaactgctatgtcaatttaatggcaattctttttgctctaatctctagtgttataactcagtggaaaatggcttgcttgagaaaaaagcatgcacgttggacagccaagataaaagctgaaatacaagctattacagaaaaaattcagaatgcagaagttagacgaattgaattacttaacgaggtaagagaactgaaagaacttagaattagtcccctacattgcatatcagcaattctcctttaatatttaattaaatcctatcttattaaaaagtattttcctttctgctgatttcatgtttagagtgagttatttgattttcttaggaaatgtattcacttgctgtatattaactagagagaattagcaaatacagtagaatatgcttttgaagcatgtaaccagaaacttacttgaggttagtctttaggggaattacctctaaaaatatgagcccatgtatcatttctttaagcttttatagttaccctctgctcactcactgtcctctaccctccccactcctcatgtcatatttataaaaatatcacttggtgaagaacttaatttctggaggaaaaaaatattcctctcagtggttgctgagaaattatatgaactgaaatcagaagcaggcctcctgcaaagagatattaatttcctggctattcgaaaatgtaaggctgatcactacaagagaaatgacaaattcttatttttctctaattagaccagtttcagacaacaggagatcagtggatttgtggcacagattgaaaaacttacaacagaattaaaagaagaggagaaagcatttgttaacaaagaaaaaatgttaatgaaagagttaagcaagtatgaggtaaattttattttgcatctaagaatacttttggatgactacatgagggggagggggaataatatttcatgctattctaatcagttaaatgtaaaataaatattctagtatgaaagaggctacaatttcattctggatctttcttcttttcctgaagaggaagcagagcaataagaaatattttttcagaaaaaataataataataatcacacttcaaattatgtagaactgttggcaatggccttagagacaggtggagttgtgtaggaagccatttggagctggcttgaaaatagctggggcaagggagattagtaaagtcagtctcagatgtgctctttaaaaagagggtatcatgctgtcttgagaactgccaaaagccaacctgagatagaacagggcatggatgctgggggaggtggagagaaaagccactgaaagtacccagaagtgccaggtccacagaaacacaataaaaaaatgcaccttcccaaggcgatgatattaccctggaggcagccattagcagagcagctgagaacagggatggtggtagaagccttcctgaacttgatcaggtttgaaaatgaagaagaggtcttggccacaccaaagaggggctttatttgaaggaaataaccccatactgcaggatgaaaatagggagcttggaaatttcctaatttagagtctttacctgatccaagttgtcttcccccaccccatcccatcctgccacatcctgcagaaaccctctgcagatgactggcccaaggacagccagttctttctattaataatattaataaccaaaagaaagtagtcacatttttcatacaaaaatactaggagaaaaactactgaaaagaggagcaaactttcctacaaatgaagaacactcagaaaaaatggtggcatggaacaaataaaaactatgatcaggccaggtgcagtggctcaggccagtaatcccagcactttgggaggccaaggtaggtggatcacgatgtcaggagttcaagatcagcctggccaagatagtgaaacctcgtctctactaaaaatacaaaaaaattagccaggcatggtggcatgcccctgtaatcccagctactcgggaggctgaggcagagaattacctgaacccagcaggcagaggttgcagtgagccgagatcacaccactgcactccagcctgggcgacagagcgagactccatctcaaaaacaaacaaacaaaatactatgatcaaacattcttctatgaatttaaaaaaataatttaatagcagtacaaaggaaaattattagcatggaaatgtagacacttagggaagagatgtcagaaggtgagggccagaaaataggaagaggtgaaacagaaaccggtgcaactcggggaacaaacgaaggaaagatgacacaaatgactacaatgttagaagaaacggggtgaggggggagaggaggcggggtggaaagcattagtctaggtgcctggcattcttctaaatgctgaaaaacaggcaaaaactctgcctttatggagctttctatctagcacgggggaatgaaaataaatgagatgaacaagtagtatattggatggtgataaatggcatagagaaaaatcaagcagggaagtgggatagggagagtgcacgtgatatggtctgtgtgctgttgtaaataggggtagtcagagaagggtccagctctgaatataaggcagggtgccctgcagatgtctgcaggagatggctccgggcagagggcatgctaggcaggaagggcctgaggcaggaccctcctatctaaggaatcacaagggggtggggttgctgaataagagctggggagtgccaggggtggtgggagtcatgttcatgaagcagatgctgagatggaattaggagtgataaggtatattagggagaagtatctatgacaagattgggcagggaaagctgtcaggccattatgtagcctgacaaactctctctggggagctctggagcaaggattgcctgttagaagaggactgccttgggcagaaatggcttcctgcatccttgtaccacctccttgcttagtcactgactgggactgccccaaaggagcatgatattggctagatagctgagctgaccctgaaggagccaactattggatgtgtgagctaaacacattcctcacaatggtgtggcgagtccgccttcaaggggagatccaagtggagcatcaggcacacccttataggccatcataagtactttgtcctttgttgtgtctgggctagaaagccattggagggttctgagtggagagctgaaataatctgagtttttcctttaattaggatcattctagcttctatgttgagtggaatttaggaaagaaaagggtggacataggaagaacaattagggagctaaagcaataacccaagttagaaatgaaggtagcttgaacaaaaatggtaaccaaagaggtgttaagaagcggtcagtatctcagatatttttgataattttaccatcatgcctactggtaaaacaatgagggcaatcccctttgagtcatgaacaggataaggaataaggatcctatttaactttttactcaagtttatacagtgcaattaggcaagatacataaaatagaagcataagacttggcagatgagatgatcagtagatcgcaaaactcaagaaaatcaactgcaaaaccactacacacaagcctccagcctgcactcggcttgccaggctgtgtgcccactgcaggactgtgtccacccatgcctaattcacacaaagggatgggccaatgacagcctgtgcaccattattatatagcaataacccaatttcccctcgataatcagcaccaataacctcaggcacattgtaatcccatttctgcctttgattcagtggcatgaggagcccaaaattagaaggaagcaacctcacattgtggtttatgaaactattgttgtgcccctggtggaaccatttttctccccactagtatctctaaatcaacagaacccaaagtcacacggaggaaaagcaaaatcattaggtttaatagtgagaagtcccactaccatttgggtctctgacccatacattctaaggaaaacagccctgaatattaattagattagtcactggttcataatataaacatcccagtgttgggatgtgttgtcgacagggcagtgctgtggctgacttttccataggcctgactctgataccggaccctccgttgtaaatcttctatcagagcttgccacagatttttcacatcatcctgataaagcatggacaagcccaggccaaggaccattcacttttctgggtcctacagccccgtatatggcagaatttgatcagagaagcagagctgccaggaaaagggtttattataggacttgaccttctgcaactgtgatatctagttacacagtctggtgaggctgtcagctttacatctggtgctggggcctgaagtcagcagggcaggtacttgggatggaaagaccaacaggaagtgaatggaagcaaaaacaaactagaactcacaggatgagcgagggtggactggaatctgcattggtctctcttttccaacgctccaccttcagggagatgggggacctggatcagaaactggagcctgtcatcactgatctataaatatgcatgtggcttaggaatcagagacaatgagaaaggatctagaaggatctgaagaccgtgtgaaccttactggctgccccactccaacaacctgagcccacaggcaagcaacttgctacactgaacctagtaccccacagtctctttcagagaacggaacaagagaatggcttcttatcacagcagccctgggaacctgagctgcatacaggcaatggaatgaattaatgcatgcacatacaaacttgtatttacaggctattcttgtttaaaaaacctagtatggataatacaggattgcgtttctttttttttttttttttttaaaaggggtctcaccctgttgcccaggctggagtgcagtggcgcgatctaggctcactgcaacctccgcctcccgggttcaagcgattctcctgcctcagcctcccaagtagctgggactacaggtgcatgccaccaggcctggctaatttttttgtatttttagtagagacggggtttcaccatgttagccaggatagtctcgatctcctgaccttgtgatctgcccgcctctgcctcccaaagtgctgggattccaggtgtgagccaccatgcctggctggattgagtttcttaactcaacctgcttaaatgttgcagtctggagaaatgtactcctgcttctgcattatgatatttttgaattatggtatttttctatgcattttagcttctttgtatttattcataaggatgctaatggcaatttgggaggagacatatcagccagcatatcggtgtattagttaaggtgcaagaaaactactctatcaaagatatgctaaaacacagtgaacataagcaagatgtgaaaagggttaacaaccctctttcctttttcattgggaaactggccctgggttaaccactttctggctccttcccctaatagcctgatgaaggtagaatatcagctatattatgaagcaacattgcttgtataacaatgactcctgatttgtatgctgcatcttgactggaaaaataacccatgggaaactgtggcattgggcttccctgggtttggtggctctcttaagtgggtatgccctttgaaatctggaagatacgtccaagagatattagttcctatatgaacatggggtttctaagccagggagactataaccccacctgtgtgagtctctctgtctctcttgcatctgaagtatcactttggtgggcttgaaggaaacagccactggtctgctgtcttgtgcagacacctcccaataaggaagcatgcctggcactgccctgctaaaacttagcatttccttccaattatgtgtgcatacaacttggataaaaatgaaaaccaaaactaaaagtttttaagagtaaactgggacaagtgtagcctaatcaaattttgtgagtctgaacatctagtcgggaagatgctcaaaggggtcattacagcaagagagatgtttgtttctctttcccagtccaggccatagggaaggggtccagggctggcagggtggctctgccatcctcagcatgagcctaacatctgtgcgtcaaggagtagcttccattctcattctcctctggccaggggagggaggaaaggaacaggggagcacacagctgttcctgttgcaggagcagagcccagaagtggcacacatgacttccatgcacaaactccttggtcacacccacccacaagggaaggccagaaaccacactctagccagaagccatgtgctcagctgaaactcaggagccctaatattgaaggagaagagaacaaacattaaatgtcagctggtggtctctgccttagtcaccatttaaaatccatcctgatttgctaagaaaggtccaactattattccatttgaaactaaacaaaacttgagtttgaataagtaggcaggcatcttcatgttttgctttgggcactttttactcatttattttaacattatatccaattacttctatctttttcccatttctcacatccaacatttcttagaagtgtattctgtttatctgcctctttttggtaaaatattactgaaggaaattttctcagatatgtttttgggctgtatacatggtagtgttcatagagatatagcagaagaggtttaaagcagaagggatctttagagaaccaattgaatctaatctccttactttgtggattgtcagagtgtcagtgagtcagggaacaaatatttattaaaagattagtatatgccatatgtctttctatgtacctcaggataggagaccaagacagatgaaactctttccctcaaaaaacttatattctactttaaattgttgtgtgaattatccaaaattatatttctcaattgattttattttctttaaaggaaatatttgttaaggaaacacaaattaacaaagaaaaggaagaagaactagttgagtatcttccacaacttcaggtggcagaacaagagtataaagagaaaagaagaaagttagaagagctcagtaatattattacaggtacatatgaagcatttagtaattaaactcaatcccaggtaaggatttcactgtcatcttctaacacaaggaggtcatcagttacaagccaatggtgaaactcaccaaactttccccattacctttagccctctgttctctagtttttgcttcacctactaatttctcctccacactaccatcttaccattgctattgtcaaaattttccttttctcttttaaaaactatttaagacttagtcctttaccatattattttctttctctccatacttgggaaaggtagaactaactcatttgtttgctaccatgtggaattttttttgtattttcttaccgtgaatttgcaaattatatctcttttcctgctatgattttaaccatttattgagtaagcactcctcagattttttttttcactaacttcctcctgaggcacagataggtaagagcttgtctcagatctgagagttagtagaggacgtgaaatatgtccgaaagtatgcatattttaaattatattacatggtataatcatgcatgtttaatataaaaataattattttctccacaaaaaattggatgtaatcattcaaccctgtgcccaaggtccaaagtttatatatccagaatctttttttttttttaaacaaaaccaaaaacacacagggtctcactatgttgcccaggctaatctcaaactcctgggcttaggagatccttctgccttggcctcccaaagtgctgtgcctggcccagaatcatctttttgggttttgagtcttgtattgcatttggtgagtagagggtcattatctaaggaatccgcccaggtctttaagcaggaacaacttccagaatttgtatcttctagatgatgaaagaagagacatgggaatcagaaggccaggaccaaaagttacagaaaggactacaatgggaacaaaaattgtctactggttagcaaagacaaatatggggataggaattaaaatcgcctgtgtcaaaatgggacattcatatggaaccccaatatgttcaaatgtagaataaaaaaatattcagaagtgaatagtgattattgccaaggagggtggatttttaaaaatgtaagaatgttataataataatacatgggtaattggcctggtacccactcctcagatgattttccactttcttgtcaggttttcatttagtcaacttaagtaggttttcttggcctcttatcacttttacccagacttacaatacatatgtctcttattcccaattttcttttcttttcccttccctcccctcccctcccctcctctcccctccccttcccttcctttcctttccttttctttctttctctctctctctgtctctttcttttttgctttctttctttctttttttgagatggagtctcactctgttgtccaggctggagtgcaatggtacaatctctgctcactgcaacctccacctcctgggttcaagcgattctcctgcctcagcctcctgagtagctgggattacaggtgtgcgccaccatgcctggccaatttttgtatttttagtagagatggggtttcaccatgttggtcagggtggtcgtgaactcctggcctcatgaggtccacctcagcctcccaaagtgctgggattataggcatgagccaccacacccagcctagtcccaattttctactttcccagccattcttcctatccctttgtttactaggtagaggatgtaagaaacagtaggagtataaaagtaagcaaaaacattgcaagtactaaatctcttaatgtaaacaaaggggagaaaatgctgaagaaagtagataaaagagaggaagacaggagaaaagaagtaaaaggaacataagagtgggaaagttgacctgccagcagttacgcttgcagagaatggcatgcatgggctccatacacagaaagcttttagttaaatctgatggataaagcatgtacatatatctttgttccctcataaaactcccaaatatgtatataaaggtttttttttctgaaaaagatacaaatccataagtaccaagacactggaagagataagacatttgctatctgctgatttattatttatttattacctgataatatcaacaaattttgggaagatgtaattggatagaggcagaaagagaaatataaacaccaaaagcctgccaaaaagggcacgatgaaggcaaaaagttctttcccccaaagctgtaaagtcataggcagtggcatcccctgaaactatgacagctgagatgagtcacagggctaaaggttggttgaaagtctttataaagagcaattagagctccaggtcaaatccccttcttgtgcagttagctgagtgactcctcctcctcaatgctggcaaaagaaactggaccagatggcttcagaccgcaaggcatcagatatggctgagagcagaagacaggtactgtactgagatccccactgagatcccctctgagctcagtttgctgaatgctgccagccagtggtgttgtgaactcttccataatcccttaccccaacctgaggaaggagactaacatattcttccttaaaggaaactgaacaattcagagaaaagccccacaacagcaccgacattcgatggtcccctcaaatggctggttccttcctgatcactgtatattgaagctcacccaggactattaaatgggatcagacaaagatctgaagcatccagtgtgaaagagaaactgaaatggacagaacaagagaacttgatggaaacagagaaaatgcaaagagcataagcatacttttaaagagtatattcttagagaaataaatatattgcatttttgaaaaaagaaaatgatgcttaaagattagagaacagaaagagctctcagaaattaaaagtataataacaaatgttaaaattcaataggaaaattataagaaaagttaagaaaatctctgtaaaaatagagcaacaacaacaaaaagagatgaggaaaaggagagaaaggcaagaaaatttaaaaactattctgagatgccaaatatctaccaaacaagaccagaaaaaaatcagtgaataatgcttacattattataatgatctaaagagttaaaatttatttaaacgaaaactataactttataggaaggttagggatgaaatgtagaggttgtgggtgtgggtgggggatgtgggaatgggagtaagcatgctaaaatctcctctactatatatgacgaataagtagaaactgcctgacaatgataaatcaagatatagccatatattcatgtttttaaagaactaataaaattatcaaagaaataatacaaaaatatttcttataactagagaatatagatttccatttttaaatgtccaagcaaatccccaaaacaatatttaaaagaaaagactaagccatattagtgtggaatttcagaaggaaaaatggaaagagaggatcctaaaagctcctagagagaaaaatcagatctcacacaaaatattagaaatcagaatcatttcaaacttcttaacagcaatattatagtagaagttataagacaatgccttcaaaatttgagagaaaataatttccaacattagatacccagctaaactatcaagaatatagaatagaaacatattgagatatacaagatctcaaaacatttatcccatttactctttttcctgaagatgtctagaatttgcttcaacaaatagaataaatgaatcaagaaaaagagtataagaaatttaggaaacaggaggtccgacataagaataatacaaagggttctggttgaataaaacctttaaaaaaagaaaaagaaaaatgcaaaaggaagtccaaagaagtcagctgcaaagcaagcacaaagaaagaaaagattccagaaggcatatctcagagggaggttctgagggagaggggagaaatgaaactcacagatatgttaatgtgtttgactatatgtgaaataaaatttgaaaggttgtacagttctgttgtagatttggtatgaattaattatatgtacatgaaacactgagcaattttttaaacaaagcaatctttaactccaagaaaaaacaaaaattatactaaaaagaaaatctaatcatattataccatttggctcatcggggataatccttattgccataatgatctaaatggttacaatttatttaaacaaaaactataactttataggaaggttagggatgaaatatagaggttgtaggtgtgggagaaggatgtgggaatgggactaagtaaatggaaaatgcctgaaaatgataaatcagaaaataggcatatatgcatatttttaaagaaaattgagctaaatggaagaggaaacaactaaaaagagttaaaaatgtttgattctgaggagtcagacaggagtaaacatagcattgtggagtgcctgacagttggtttttgttataaaccttgtgagataatttgatttttaaaactaggtacttctttgattaatattttttaactaaatttttgaggtagttatttttttctttgttttaatagcacaaagacaggaggaagatttactgaacaatcacatttttctgtttacaagggacttttcaagatacattagcaacatggtaaaagatcaatgcattaattcttttttttattattattagaatagtggtatatacagatggtagtatttacctggcattgaagttttcatgaaatccacatttgttaaacttacccattcaatatcaatgtttaacaatctttgttataacacatatatatgcacatgtatacacatacacctgtacacatatgctatgtatgtatgtgtatatatgtatacttatgtgtatatgtatacagagaaagagggagagagactagaaccaactaacatgtacttgtggaacagtcattgagtggacctcggttttcttatttataagttagaaacttgattctgctttttaagggtgagtgaacaaaggttgcagtgggggagtggatgaattagcagcaggtaaagagatgtttagtgcctttttaaaatttacaatcaacagttggtgataagcatatgcatgtggaattggttaattaaaaatggaaacattctctgagatgcattgatatcaaaatgtaacttttttttttttttgagatggagtctcactctgttgcccaggctcgagtgcagtggcacaatctcggcttactgcaacctcagcctcccaggttcaagcgatttctggctaatttttgtattttttagtagagatgaggtttcaccatgttggccaggctggtttcgaactcttgatctcaagtgatccgcctgcctcggcctcccaaagtgccgggattataggtgtgagctactgcaccaggcttcaaaatgtaacttttaatacgttataaaatatgaaggaatatataggaaaatatgaaggagaaaattacaagtatagtgtatatacagttccattttcttaataagatgcttctggtgatgattatgtaataataaatatcatgcaacttataatagtataataatagagaactgaatagagaattcaatagagaaaacattagagaattctgaaaaaattcataatcttcttctttcttcaagaaacattaagtcctcctttaaaagcctcaatacatttccccttctctatttttgctggacaattgtttatatatcaaagtacagtcatcccttgatatctatgggggattggttccaggaccaacatgactatcaaaatccacggatgctcaaatcccttgtatgacatgatgtagtatttgcatataacctacccacattctccaatatactttaaattatttctagattactgataatatctaatataatgtaaatgctatgttagtagttgtcatactgtattgtttattatttgtattatttgttgttgttattatttttatttttgtgaatgtattctattcatgtttagtcaaatccacaaatgcggaacccacggatacagagggctgactgtatattttattttgtgaagttgtctcaaggtctggggttcttatcttgaagtccacagacccccttcctagagtccatgaataaatgtggggttgataggtttttctaaggaagaatatctatcctctgctggatacttcagaaattaatttagaatctggctccaaatgtgacctaggcagtataataccctcgtgccctactgtttgaactcagagataatttggggttttctgtttgagcaggaagatgtaaaacaagaattacaacaattacgagatcaagaaagcaaaaaaaacaaagatcattttgaaactctaaagaacttagaaaatggattctatataaatgaccaaaaagcagatcttctgctcctggaaaataaaaaattaaaagaagtaagtttaagagcaccatccttttcatgatggctttgattaattgactagacctgtaatagttataagagaaaagaagagaatagctcttgaaaaatgtttaatggagcataaagtacacacagaaaagtgcccagattgcaagtgtacagccccatgaacacacttgtgtaccaggacccacatcaagaaacaaagcattatcagtatccagatatcctctatgccccttctagtcactaaccagccccactaagggtaccaccatgctaacaccataggctagttttccctggtttggaacattataggtatagaacaatacagtgtaggttcttttgctcaacattatgtttgtgaggttcagccttattgttgagtgtagtttgttattcttagttctgtatagtattgcactgtatgactactactacaatgcatttatacactcgactattgatggatattcagagagtttctagtttttggctattacaaatagtattgctgtgaacattctagttcatgtttttttggtgaacatacatacatatttctgttgagtgtacatctcaagtggaattgcagagccatagggatgtgtatctccaactttagtacatactaccagtctcccaaaggagttgcaccaattgccactcccaccagcaatgcatgagagcaccagttgctccacactctcacaaaactgtctttttcaatttaaccattctaatgggtgtgtagtggtgccccactaatttgtgttttcctgatcactgttgaagcacctattctatgttgctggcctcttggatatcctttttttgtgaagtgactgttcaagtcttttgcccgttttttaaaaagtaggttgtctatttcatactgattatagctctttttatagcagaggaatttgttcatccaacccctaaaattaaagtctatttatacttaaaatgtattcgttttaacattttaaatgttatatttaataattagatatttataagatactgatttttaatgcccagaactgttgcattcaaagcatatttttaaagtgtatagagtccaacattttatatactgtgacaaaacagtaacaacaaaaatttacataatattctttagtttgaaagacctggattagagtctgtcattcaccagtgacactgtgtgactttgggcagatcactgaacttgtaagcttcattttggcctcttaaaatgggaataactgctactcacaggttgaatgtgactttttttttttcttttttcttttttgagacggagtcttgctctgtcgcccaggctggagtgcagtggcacgatctcggctcactgcaagctccgcctcccaggttcacgccattctcctgcctcagcctcccgagtagctgggactacaggtgcccgccaccatgcccggctaattttttgtatttttagtagagacggggtttcaccgtgttagccaggatggtctcgatctcctgaccttgtgatccgcccgcctcggcctcccatagtgctaggattacaggcttgagccaccgcgcccggctgaatgtgacttctttataaactgaaaaggcaaaagaaataccatttctaaaatcctttttttccagccatccataatgacctcatggtcaagatctgttatcaatgtaccccaagtgttttgcacaatgcctgtaatgttagagggattcagtctcatttgacgtttaagactgtaaccttaaaaagtggataatacattgtgtcccttttatagatgtgtaaattgaagctgtattttttttagaagttttaatagctagaaaaaaatcagtgactagtccaatggcatgaagaaaatccttcacctcgctgggtaatttttttcatctgttaaatggcaatagttatcccaccactctcatgggtttttttataaactaaaatggcataataggtactaatgtactttgaaaaggtaattgtgctccaaagagcctagatacataccatcattgataaccctcacacatgcaatgcaccttcattcttctagaccttgagacaaactgatttgttccactagactgtcttcctatcaagatatagattatttcttaaaagaattggaatatgtattgctattttggcagtaggtgagcagatggatgtgtggatgaaagactgattatgaaagtcctgttttttttaaattcagtgtccatctgctagtcaccgaatgactctgtgctgttttcttattcactcaccactcagttttgctggttgcatctctttactctaaacatgcactgagtcccaagcactgggcaagacacagtaaatacagagataagtaagatactgccgcagccctttggaagctcatggtctagctgaagagatgcacatagaaacagatcattacaattcagtatgttaagtgcaacaatctgaacaagacacatacagtgccccagagcaagggaaccttgccacaccaggtgaagaacacaaaggagaactctcactgtgtatcattaatgtagaggcaggatttacacctgggagatggatgagtctcttcagggacagtgtgttaagtgagaagattaggggctgtgaacagaatcctggagaaaaacaactttgaaggagtgagctgtggagaggagataaaaagagagactgaaagaaaatagagagtttgggagaagcacaagagtccagctgaactaggaaagtctgcagacccatggtcaaagaggggcaagaatgtggccttgcggttggcttaaggtggcttttacttttgtttactataatatcagaaaacaagctatgaaaaggctgacacaacatcaaagatacatgagtagaccctataatacacgcttagaaacagtctacgtaacagtcccatgtctacctcatctgtagcactgaacacaatttcaaagatttttatggatagtttatagtatttgtttctttcttgaaactggaccagttttatgtcccaaagcccatatttccagagttcctgggactttagagtttctgggcattgggtggtcagaacagaaagccatgactgtaatactcaaagtcacctgtcactactgccaccactggcacccaacccagtgaacatctgacttgagtaagtaattccatgcagtctcctgactcaattaatcatctctctgaggtcttacactgaatgccagtctggcagcattactgctttgtgacatctactgtacacacattttgcataaggaacatttttgttgtggacatattgcattcagacagaacaccttctaatttcttttggtggaaaattatactcagaatgccatgtttatttaaatgctgaagtgaaatgcttcataggaagcagaatcctttatctcctttcccaggatggaatcctgaccaaggtatgttttattccccactgttacccctgtacctagaatagtgggtggcgcagaggaggaatttatacatgtttgctgaatgactacatgataatttatctatagtaactaaactgctaaaagcaatcacatgcttttaattttcagtatattttatacttgaagaataacatagagaaatacagagaaggacaagaagccctcatgcacacctcaagcgacttgtctcggcaactaatagctcaggagggtaagtaatgtgtgggtgcttgtattagtcagggttctttagcgggacagaactaataggatatatgtatatatgaaagggagcttattaaggagaactgactcacatgatcacaaggtaaagtcccatgataggtcttctgcaagttgaggagcaaggaatccagtggtggatccgtcagagtcccaaagcctcacaagtagggaagccaacagtgcagccttcagtctgtggccaaaggcccaagagcccctgccaaaccactggtgtaaatccaagagtccaaaagctgaagaacttggagtccaatgttcgagggcaggaagcatctagcacaggagaaagaggaatcttggaagactcagccagtctagccacgctggcagctgattagacggttcccacccagattgagagtgggtttgcctctcccaatccacagactcaaatgtgaatctcctttggttaacaccctcatagacatacccaggaacagtactttgcatctttcaatccagtcaagttgacaatattaaccattacagtgttctttacatataaagtttttacttcatttaaatccagtttattgatttgcatacaaaaaatgcacccattttcaggttagtgaatttgacaaatgtacatgctattgtaaccactatcaccacaagcaagatatagagcattttcatgactacaaaattttctctgtatccctttgccgtcgatcacctaccccatctctagttcctggaaaccattgatctgctttctgtcattaataatgagatataaatgaaatgacagggtgcacacttttatacctggcttctttcactcagcaaattgttttaagattcatctaagttgttgcatgtctcactagtttgctcctttttatagctgtacagtagaatcccattgtatagatataccatattttatttattcattcaccagtcgaaagacatttagattatttccagtttgggataattatgaatgaagctattgtgaacatttgtttacaagtgtttttatggccatgttttcatttctcttgggtaaatacctataatggaattgctgaattatatagcaattagtgtatgattaactttataggaaatatatatggttagtgtatgattaactttataagaaaccgccagacaaatttgccagagtggttgttaagtgtctcatcccactaacaatggagaagagttcccattgctctacatcctcatcaacacttaaaatggtgaaaacgctttaaattgttaatattttggtcattttaataggtatgtaatggcatttcattgtgattgtaacttgtacttctctaatgagtaatgttgttgagtatactttttcatgtgtttcttggccatttgaatattatcttttgtgacaaatattgcaaacatggtagctgaagacaaattatttactttgctcacaaaatggcaatttgatcagagctcgttgaagacaactaaatgtctgctctgcatggcatcagccagggcaacttgaaggctgagggtaattcaacagccgggaactgaaatcatctgaagactcactcattcctgtgtctgaagttgatgctggccctcagctggatctcgagggaggccattggccagaacacctcctcatggcctctccatgtagcagtttggcctgctgggttccaaaagcatcccaagagaacgaagtggaagttcatggcgtcttatgacctagcttcagtcacagtgttattttcacaatacgctaatggttgaggcagtcactcaggtgcaaggggaggggtcatagccaccacctctcaatggaagaagtgtcagcatcatgtcagggaaaaaaacttgtggaatggaatatactgtggggatatctttggaaaatacaatctgtcacatgtctgtccaaatcttttactcattgctttgtgttgttttcctattatccagttaaaatctttacgttttctggaaatgagtcctttttctgtctgaagcttgacttttcattttcttcatggtgtctcagaaagagtaaacattttttcatttgaacgaagcccatctatcgattttgtcttttaaggtagtactttttgtttcctgcctaaaacatttgtgcctaccccaggctcttcaatattttcttgtataatttttttagtttcagtgtttatgtctagatttctaattcatttcaagtgaactttttttttattactatactttaagttttacggtacatgtgcacaatgtgcaggttagttacatatgtatacatgtgccatgttagtgtgctgaaccctgtaactcatcatttaacattaggtatatctccaaatgctatccctccctcataacccaccgacaacaggccctggtatgtgatgttccccttcctgtgtccaagtgttctcattgttcaattcccacctatgagtgagaacatgtggtgtttggttttttgtccttgcaatagtttgctgagaatgatggtttccagctccatccatgtccctacaaaggacatgaactcatcattttttatggctgcatagtattccatgctgtatatgtgccccatattcttaatccagtctattgttgttggacatttgggttggttccaagtctttgctattgtgaatagtgccacaataaacatacatgtgcatgtgtctttatagcagcatgatttataatcctttgggtatatacccagtaatgggatggctgggtcaaatggtatttctagttctagatccctgaggaatcaccacactgacttccacaatggttgaactagtttacagtcccaccaacagtgtaaaagtgttcctgtttctccatatcctctccagcacctgttttttcctgactttttaatgattgccattctaactggtgtgagatggtatctcattgtggttttgatttgcatttctctgatgtccagtgatgatgagcattttttcatgtgtcttttggctgtataaatgtcttcttttgagaaatgtctgttcatatccttcgcccacttgttgatgggcttgtttttttcttgtaaatttgtctgagttcattgtagattctggatattagccctttgtcagatgagtagattgcaaaaattttctcccattctgtaggttgcctgttcactctgatgatagtttcttttgctgtgcagaagctctttagtttcattagatcccatttgtcaattttggcttttgttgccattgcttttggtgttttagacatgaagtccttgcccatgcctatgtcctgaatggtattgcctaggttttcttctagggtttttatggttttaggtctaagatttaagtctttagtccatcttgaattaatttttgtataaggtgtaaggaagggatccagtttcagctttctccatatggctagccagttttcccagcactaattattaaatagggaatcgtttccccatttcttgtttttgtcaggtttgtcaaagatcagatggttgtagatatgcggcattatttctgagggctctgttcggttccattgctctatatctctgttttggtaccagtaccatgctgtcttggttactgtagccttgtagtatagtttgaagtcaggtagcgtgatgcctccagctttgtccttttggcttaggattgacttggcgatgcgggctcttttttggttccatatgaactttaaagtagttttttccaattctgtgaagaaagtcattggtagcttgatggggatggcattgaatctataaattaccttgggcagtatggctgttttcacgatattgattcttcctacccgtgagcatggaatgttcttccatttgtttgtatcctcttttatttcgttgagcagtggtttgtagttctccttgaagaggtccttcacatctcttgtaagttggattcctaggcattttattctctttgaagcaattgtgaatgggagttcactcacgatttggctctctgtttgtctgttattggtgtataagaatgcttgtgatttttgcacattgattttgtatcctgagactttgctgaagttgcctatcagcttaaggagattttgggctgagacaatggggttttctaaatatacaataatgtcatctgcaaacagggacaattggatttcctcttttgctaattgaataccctttatttccttctcctgcctgattgccctggccagaacttccaacactatgttgaataggagtggtgagagagggcatccctgtcttgtaccagttttccaagggaatgcttccagtttttgcccattcagtatgatattggctgtgggtttgtcatagatagctcttattattttgagatacatcccatcaataccgaatttattgagagtttttagcatgaagggctgttgaattttgtcaaaggccttttctgcatctgttgagataatcatatggtttttgtctttggttctgtttgtatgctggattacatttattgatttgtgtctgttgaaccagccttgcatcccagggatgaagccctcttgatcatggtggataagctttttgatgtgctgctggattcggattgccagtattttagtgaggatttttgcatcaatgttcatcagggatattggtctaaaattctctttttttgttgtgtctctgctaggctttggtatcaggatgatgctggcctcataaaatgagttagggaggattccctctttttctattgattggaatagtttcagaaggaatggtaccagctcctccttgtacctctggtagaattcggctgggaatccatctggtcctggactttttttggttggtaagctattaattattgcttcaatttcagagcctgttattggtctattcagagattcaacttcttcctggtttagtcttcggagggtgtatgtgtcgaggaatttatccatttattctagattttctagcttatttgcatagagatgtttatagtattctctgatggtagtttgtatttctgtgggatcggtggtgatatcccagttatcattttttattgcgtctatttgattcttctctcttttcttctttattagccttgctagcaatctatcgattttgttgatcttttcaaaaaaccagctcctggattcattgatttttttgaaggtttttttgagtctctatttccttcagttctgctctgatcttagttatttctcaccttctgctagcttttgaatgtgtttgctcttgcttctctagttcttttaattgtgatgttagggtgtcaattttagatctttcctgctttctcttgtgggcatttagtgctataattttccctctacatactgctttgaatgtgtcccagagattctggtatgtcgtgtctttgttctcattggtttcaaagaacatctttatttctgccttcatttcgttatgtacccagtagtcattcaggagcaggttgttcagtttccaagtagttgagcgattttgagtgagtttcttaatcctgagttctagtttgattgcactgtgttctgagagacagtttgttataatttctgttcttttacatttgctgaggagtgctttagttccaactatgtggtcaattttggaataagtgcggtgtggtgctgagaagaatgtatattctgttgatttggcgtggagaattctgtagatgtctgttaggtctgcttggtgcagagctgagttcaattcctggatattcttgctaactttctgtctcattgatctgtctaatgttgacagtggggtgttaaagtatcccattattattgtgtgggagtctaagtctctttccaggtctctaaggacttgctttatgaatctgggtgctcctgtattgggtgcatatatatttaggatagttagctcttcttgttgaattgatccctttaccattatgtaatggccttctttgtctcttttgatctttgttggtttaaagtctgttttatgagagactaggattgcaacccctgcctttttttgttttccatttgtttggtagatcttcctccatccctttattttgagcctatatgtgtctctgcatgtgagatgggtctcctgaatacagcacactgatgggtcttaactctttatccaatttgccagtctgtgtcttttaattggagcatttagcccatttacatttaaggctaatattgttatgtgtgaatttgatcctgccattatgatgttagctggttattttgcttgttagtggatgcagtttcttcctagcctcaatggtctttacaatttggcatgctttttcagtggctggtaccagttgttcctttccatgtttagtgcttccttcaggagctcttgtagggcaggcctggtggtgacaaaatctctcatcatttgcttgtctataaaggattttatttctccttcatttatgaagcttagtttggctggatattaaattctgggttgaaaattcttttctttaagaatgttgaatattggcccccactctcttctggcttgtagtgtttctgctgagaggtcagctgttagtctgctgggcttccctttgtgggtaacccgacctttctctctggctgcccttaacattttttccttcatttcaactttggtgaatctgacaattatgtgtcttggagttgctcttctggaggagtatctttgtggcattctctgtatttcctgaatttgaatgttggcctgccttgctagattggggaagttctcctgtatgatatcctgcagagtgttttccaacttggttccattctccctgtcactttcaggtacaccaatcagacgtagatttggtcttttcacatactcccatatttcttggaggctttgttcatttctttttattcttttttctctaaacttctcttctcgcttcatttcattcatttgatcttccatcactgatagcctttcttccagttgatctaatcggctactgaggcttatgcatttgtcatgtagttctcgtgccttgtttttcagctccatcaggtcctttaaggacttctccgcattggttattctagttagccattcgtctaattttttttcaaggtttttaacttctttgacatgggtttgaacttccacctttagctctgagtagtttgatcgtctgaagccttcttctctcaactcatcaaagtcattctctgtccaactttgttccattgctggtgaggagctgcgttcctttggaggaagagaggcactctgatttttagaatttccagtttttctgctctgttttttccccatctttgtggttttatctacctttggtctttgatgatggtgacgtacagatggggttttggtgtggatgtcctttctgttttttagttttccttctaacagtcaggaccttcagctgcaggtctgttggagtttgctggaggtccactccagaccccgtttgcctgggtatcagcagcggaggctgcagaacagcggatattggtgaacatcaaatgttgctgcctgatcatgcctctggaagttttgtctcagaggagtacccggccatgtgaggtgtcagtctgcccctactaggaggtgcctcccagttacgctactcgggggtcaaggacgtgcttgaggaggcagtctgtccattctcagatctccagctgcgtgctaggagaacctctactctcttcaaagctgtcagacagggacatttaaatctgcagaggattctgctgccttttgtttggcaatgccctgcccccagaggtggagtctacagaggcaggcaggcctccttgagctgcggtgggctctacccagtttgagcttccaggctgctttgtttacctagtcaagcctcagcaatggcaggcacccctcccccagcctcgctgctgccttgcagtttgatctcagactgctgtgctagcaatgagtgaggctccgtgggcataggaccctccaagccaggcacgggatataatctcttgctgtgccgtttgctaagacagttggaaaagcaccatattggggtgggagtgacttgattttccaggtgccatccatcacccctttctttgactaggaaaggg

SEQ ID NO: 10305 - DNA, 6067 bp, Homo sapiens
ttttcttcttgttttctttaatacatttttttaattaattaatttattattattatactttaagttttagggtatatgtgcacaatgtgcaggttagttacatatgtatacatgtgccatgctgctgcgctgcacccactaactcgtcatctagcattaggtatatctcccaatgctatccctcccccctccccctaccccacaacagtccccagagtgtgatgttccccttcctgtgtccatgtgttctcattgttcaattcccacctatgagtgagaatatgcagtgtctggttttttgttcttgtgatagtttactgagaatgatgatttccaatttcatccatgtccctacaaaggacatgaactcatcattttttatggctgcatagtattccatggtgtatatgtgccacgctttcttaatccagtctatcattgttggacatttgggttggttccaagtctttgctattgtgaataatgccacaataaacatacgtgtgcatgtgtctttatagcagcatgatttatagtcccttgggtatatacccagtaattggatggctgggtcaaatggtatttctagttctagatccctgaggaatcgccacactgacttccacaatggttgaactagtttacagtcccaccaacagtgtaaaagtgttcctatttctccacatcctctccagcacctgttgtttcctgactttttaatgattgccattctaactggtgtgagatggtatctcattgtggttttgagttgcatttctctgatggccagtgatggtgagcattttttcatgtgtttttggctgcataaatgtcttcttttgagaagtgtctgttcatgtccttcgcccactttttgatggggttgtttgtttttttcttgtaaattgtttgagttcattgtagattctggatattagccctttgtcagacgagtaggttgcgaaaattttctcccattttttaggttgcctgttcactctgatggtagtttcttttgctgtgcagaagctctttagtttaattagatcccatttgtcaattttggcttttgttgccattgctttaagtgttttagacatgaagtccttgcccatgcctatgtcctgaatggtaatgcctaggttttcttctagggtttttatggttttaggtcttacatttaagtctttaatccatcttgaattgatttttgtataaggtgtaaggaaggcatccagtttcagctttctatatatggctagccagttttcccagcaccatttattaaatagggaatcctttccccattgcttgtttttctcaggtttgtcaaagatcagatagttgtagatatgcggcattatttctgagggctctgttctgttccattgatctatatctctgttttggtaccagtaccatgctgttttggttactgtagccttgtagtatagtttgaagtcaggtagtgtgatgcctccagccttgttcttttggctcaggattgacttggcgatgcgggctcttttttggttccatatgaactttaaagtagttttttccaattctgtgaagaaagtcattggtagcttgatggggatggcattgaatctgtaaattaccttgggcagtatggccattttcacgatattgattcttcctacccgtgagcatggaatgttcttccatttgtttgtatcctcttttatttccttgagcagtggtttgtagttctccttgaagaggtccttcacatcccttgtaagttggattcctaggtattttattctctttgaagcaattgtgaatgggagttcactcatgatttggctctctgtttgtctgttgttggtgtataagaatgcttgtgatttttgtacattgattttgtatcctgagactttgctgaagttgcttatcagcttaaggagattttcggctgagacaatggggttttctagatatacaatcatgtcgtctgcaaacagggacaatttgacttcctcttttcctaattgaataccctttatttccttctcctgcctaattgccctgaccagaacttccaacactatgttaaatagaagtggtgagagagggcatccctgtcttgtgccagttttcaaagggaatgcttccagtttttgcccattcagtatgatattggctgtgggtttgtcatagatagctcttattattttgaaatacgtcccatcaatacctaatttattgagagtttttagcatgaagggctgttgaattttgtcaaaggcctcttctgcatctattgagataatcatgtggtttttgtctttggttctgtttatatgctggattacatttattgatttgcatatattgaaccagccttgcatcccagggatgaagcccacttgatcatggtggataagctttttgatgtgttgctggattcggtttgccagtattttattgaggatttttgcatcaatgttcatcaaggatattggtctaaaattctcttttttggttgtgtctctgcccggctttggtatcaggatgatgctggcctcataaaatcagttagggaggattccctctttttctattgattggaatagtttcagaaggaatggtaccagttcctccttgtacctctggtagaattcggctgtgaatccatttagtcctggactctttttggttggtaagctattgattactgccacaatttcagaccctgttattggtctattcagagattcagcttcttcctggtttagtcttgggagagtgtatgtgtccagaagtttatccatttcttctagattttctagtttatttgcatagaggtgtttgtagtattctctgatggtagtttgtatttctgtgggatcggtgatgatatcccctttatcattttttattgcatctatttgattcttctctctttttttctttattagtcttgctagcggtctatcaattttgctgatcctttcaaaaaaccagctcctggattcatcaattttttgaagggttttttgtgtctctatttccttcagttctgctctgattttagttatttcctgccttctgctagcttttgaatgtgtttgctcttgcttttctagttcctttaattgtgatgttaggctgtcaattttggatctttcctgctttctcttgtgggcatttagtgctataaatttccctctacacactgctttaaatgcgtcccagagattctggtatgttgtgtctttgttctcgttggtttcaaagaacatctttatttctgccttcatttcgttatgtacccagtagtcactcaggagcaggttgttcagtttccatgtagttgagcggttttgagtgagattcttaatcctgagttctagtttgattgcactgtggtctgagagatagtttgttataatttctgttcttttacatttgctgaggagagctttacttccaagtatgtggtcaattttggaataggtgtggtgtggtgctgaaaaaaatgtatattctgttgatttggggtggagagttctgtagatgtctattaggtctgcttggtgcagagctgagttcaattcctgggtatccttgttgactttctgtctcgttgatctgtctaatgttgacagtggggtgttaaagtctcccattattaatgtgtgggagtctaagtctctttgtaggtcactcaggacttgcattatgaatctgggtgctcctgtattgggtgcatatatatttaggatagttagctcttcttgttgaattgatccctttaccattatgtaacggccttctttgtctcttttgatctttgttggtttaaagtctgttttatcagagattcggattgcaacccctgcctttttttgttttccatttgcttggtagatcttcctccaaccttttattttgagcctatgtgtgtctctgcacgtgagatgggtttcctgaatacagcacactgatgggtcttgactctttatccaatttgccagtctgtgtcttttaattggagcatttagtccatttacatttaaagttaatattgttatgtgtgaatttgatcctgtcattatgatgttagctggttattttgctcattagttgatgcagtttcttcctagtctcgatggtctttacattttggcatgattttgcagcggctggtaccggttgttcctttccatgtttagcgcttccttcaggagctcttttagggcagacctggtggtgacaaaatctctcagcatttgcttgtctgtaaagtattttatttctccttcacttatgaagcttgtttggctggatatgaaattctgggttgaaaattcttttctttaagaatgttgaatgttggcccccactctcttctggcttgtagagtttctgccaagagatctgctgttagtctgatgggcttccctttgagggtaacccgacctttctctctggctgcgcttaacattttttccttcatttcaactttggtgaatctgacaattatgtgtcttggagttgctcttcttgaggagtatctttgtggcgttctctgtatttcctgaatctgaatgttggcttgccttgctagattggggaagttctcctggataatatcctgcagagtgttttccaacttggttccattctccccgtcactttcaggtacaccaatcagacgtagatttggtcttttcacatagtcccatatttcttggaggctttgctcatttctttttattcttttttctctaaacttcccttcttgcttcatttcattcctttcatcttccatcgctgataccctttcttccagttgattgcatcggctcctgaggcttctgcattcttcacatagttctcgagccttggttttcagctccatcagctcctttaagcacttccctgtcttggttattctagttatacattcttctaaatttttttcaaagttttcaacttctttgcctttggtttgaatgtcctcccgtagctcggagtaatttgatcatctgaagccttcttctctcagctcgtcaaagtcattctccatccagctttgttccgttgctggtgaggaactgcgttcctttggaggaggaaagtcgctctgcttttcagagtttccagtttttctgctctgttttttccccatctttgtggttttatctacttttggtctttgatgatggtgatgtacagatgggtttttggtgtggatgtcctttctgtttgttagttttccttctaacagacaggaccctcagctgcaggtctgctggagtacccggccgtgtgaggtgtcagtctgcccctgctgagggatgcctcccagttaggctgctcgggggtcaggggtcagggacccacttgaggaggcagtctgcccgttctcagatctccagctgcgtgctgggagaaccactgctctcttcaaagctgtcagacagggacatttatgtctgcagaggttactgctgtctttttgtttgtctgtgccctgcccccagaggtggagcctacagaggcaggcaggcctccttgagctgtggtgggctccacccagttcgagcttcctggctgctttgtttacctaagcaagcctgggcaatggcgggtgcccctccctgagcctcgctgccgccttgcagtttgatctcagactgctgtgctagcaatcagtgagactccatgggcgtaggaccctctgagccaggtgcgggatataatctcctgatgctctgttttttaagcccgtcggaaaagcacagtattcgggtgggagtgacccgattttccaggtgccgtctgtcacccctttctttgactcggaaagggaactccctgaccccttgcgcttcccgagtgaggcaatgcctcgccctgcttcggcttgcatgtggtgcgggcacccactgacctgcgcccactgtttggcactccctagtgagatgaacccggtacctcagatggaaatgcagaaatcacccatcttctgcgtcgctcatgctgggagctgtagaccagagctgttcctattcggccatcttggctcctccct

SEQ ID NO: 10306 - DNA, 5402 bp, Homo sapiens
catgcgcagctaacttttttttttttttatatactttaagttttagggtacacgtgcacattgtgcagattagttacatatgtatacatgtgccatgctggtgcgctgcacccactaactcgtcatctagcattaggtatatctcccgatgctatccctcccccctcccccgaccccacaacaatccccagagtgtgatattcccctccctgtgtccatgtgatctcattgttcaattcccacctatgagtgagaatatgcggagtttggctttttgttcttgcgatagtttactgagaatgatgatttccaatttcatccatgtccctacaaaggacatgaactcatcattttttatggctgcatagtattccatggtgtatatgtgccacattttcttaatccagtctatcattgttggacatttgggttggttccaagtctttgctgtcgtgaataatgccgcaataaacatacgtgtgcctgtgtctttatagcagcatgatttatagtcctttgggtatatacccagtaatgggatggctgggtcaaatggtatttctagttctagatccctgaggaattgccacactgacttccacaatggttgaactagtttactgtcccaccaacagtgtaaaagtgttcctgtttctccacatcctctccagcacctgttgtttcctgactttttaatgattgccattctaactggtgtgagatggtatctcattgtggttttgatttgcatttctctgatggccagtgatgatgagcattttttcatgtgttttttggctgcaaaaaatgtcttcttttgagaagtgtctgttcatgtccttcgcccactttttgatggggttgtttgtttttttcttgtaaatttgtttgagttcattgtagattctggatattagccctttgtcagatgagtaggttgtgaaaattttctcccattttgtaggttgcctgttcactctgatggtagtttcttttgctgtgcagaagctctttagtttaattagatcccatttgtcaattttgtcttttgttgccattgcttttggtgttttagacatgaagtccttgcccatgcctatgtcctgaatggtaatgcctaggttttcttctaggtttttatggttttaggtctaacgtttaagtctttaatccatcttgaattgatttttgtataaggtgtaaggaagggatccagtttcagctttctacatatggctagccagttttcccagcaccatttattaaatagggaatcctttccccattgcttgtttttctcaggtttgtcaaagatcagatagttgtagatatgtggcgttatttctgagggctctcttctgttccattgatctatatctctgttttggtaccagtaccatgctgttttggttactgtagccttgtagtatagtttgaagtcaggtagtgtgatgcctccagctttgttcttttggcttaggattgacttggcgatgcgggctctttttcagttccatatgaactttaaagtagttttttccaattctgtgaagaaaggcattggtagcttgatggggatggcattgaatctgtaaattaccttgggcagtatggccattttcacgatattgattcttcctacccatgagcatggaatgttcttccatttgtttgtatcctcttttatttccttgagcagtggtttgtagttctccttgaagaggtccttcacatcccttgtaaggtggattcctaggtattttattctctttgaagcaattgtgaatgggagttcactcatgatttggctgtctgtctgttgttggtgtataagaatgcttgtgatttttgtacattaattttttttatcctgagactttgctgaagttccttatcagcttaaggagatttggggctgagacaatggggttttctagatatacaatcatgtcatctgcaaacagggacaatttgacttcctcttttcctaatggaatacccctttatttccttctcctgcctaattgccctggccagaaattccaacactatgttgaatacgagtggtgatagagggcatccctgtcttgtgccagttttcaaaaggaatgcttccagtttttgcccattcagtatgatattggctgtgggtttgtcatagatagctcttattattttgagatacgtcccatcaatacctaatttattgagagtttttagcatgaagggttgttgaattttgtcaaaggctttttctgcatctattgagataatcatatggtttttgtctttggctctgtttatatgctggattacatttattgatttgcgtatattgaaccagccttgcattccagggatgaagcccacttgatcatggtggataagctttttgatgtgttgctggattcgttttgccagttttttattgaggatttttgcatcaatgttcatcaaggatattggtctaaaattctctttttttgttgtgtctcttcctggctttggtatcagaatgatgctggcctcataaaatgagttagggaggattccctctttttctattgattggaatagtttcagaaggaatggtaccagttcctccttgtacctctggtagaatttggctgtgaatccatctggtcctggactctttttggttggtaagctattgattattgccacaatttcagctcctgttattggtctattcagagattcaacttcttcctggtttagtcttgggagagtgtatgtgtccaggaatttatccatttcttctagattttctagtttatttgcatagaggtgtttgcagtattctctgatggtagtttgtatttctgtgggatcggtggtgatatctcctttatcattttttattgcatctatttgattcttctctctttttttctttattagtcttgctagcagtctatcaattttgttgatcctttcaaaaaaccagctcctggattcattaattttttgaagggttttttgtgtctctatttccttcagttctgctctgattttagttatttcttgccttctgctagcttttgaatgtgtttgctcttgcttttctagttcttttaattgtgatgttagggtgtcaattttggatctttcctgctttctcttgtgggcatttagtggtataaatttccctctacacactgctttgaatgtgtcccagagattatggtatgttgtgtctttgttctcattggtttcaaagaacatctttatttctgccttcatttcgttatgtacccagtagtcattcaggagcaggttgttcagttcccatgtagttgagtggttttgagtgagattcttaatccagagttctagtttgattgcactgtggtctgagagatagtttgttataatttctgttcttttacatttgctgaggagagctttacttcccagtatgtggtcaattttggaatagatgtggtgtggtgctgaaaaaaatgtatattctgttgatttgtggtggagagttctgtagatgtctgttaggtccgcttggtgcagagctgacttcaattcctgggtatccttgttaactttctgtctcgttgatctgtctaatgttgacagtggggtgttaaagtctcccattattattgtgtgggagtctaagtctctttgtaggtcactcaggacttgctttatgagtcttggtgctcctgtatgggctgcatatgtatttaggatagttagctcttcttgttgaattgatccctttaccattatgtaatggccttctttgtctcttttgatctttgttggtttaaggtctgttttatcagagactagaattgcaacccctgccttttttttgttttccattggcttggtagatcttcctccatccttttattttgagcctatgtgtgtctctgcacgtgagatgggtttcctgaatacagcacactgatggttcttgactttttatccaatttgccagtctgtgtcttttaattggagcatttagtccatttacatttaaagttaatattgttatgtgtgaatttgatcctgtcattatgatgttagctggtgattttgctcgttagttgatgcagtttcttcctcgtctcaatggtctttacattttggcatgattttgcagtggctggtaccggttgttcctttccatgtttagtgcttccttcaggagctcttgtaaggcaggcctggtagtgacaaaatctctcagcatttgcttgtctgtaaaggattttatttctccttcacttatgaagcttagtttggctggatatgaaattctgggttgaaaattcttttctttaagaatgttgaatatcggcccccactctcttctggcttgtagggtttctgccaagagatctgctgttagtctgatgggcttccctttgagggtaacctgacctttctctctggctgcccttaacattttttccttcatttcaactttggtgaatctgacaattatgtgtcttggagttgctcttctcgagtagtatctttgtggagttctctgtatttcctgaatctgaatgttggcctgccttgctagattggggaagttctcctggataatatcctgcagcgtgttttccaacttggctcccttctccccgtcactttcaggtacaccagtcagacgtagatttggtcttttcacatagtcccatatttcttggaggctttgctcatttctttttattcttttttctctaaacttcccttctcgcttcatttcattcatttcatcttccattgctgataccttttcttccagctgatcgcatcggctcctgaggcttctgcattcttcccatagttctcgagccttggttttcagctccattagctcctttaagcacttctctgtattggttattctagttatacattcttctaaatttttttcaaagttttcaacttctttgcctttggtttgaatgtcctgccatagctcagagtaatttgatcgtctgaagccttcttctctcagctcgtcaaagtcattctccatccagctttgttccgttgctggtgaggaactgcattcctttggaggaggagaggcgctctgctttgtagagtttccagtttttctgttctgttttttccccatctttgtggttttatctacttttggtctttgatgatggtgatgtacagatgggtttttggtgtggatgtcctttgtgtttgttagttttccttctaacagacaggaccctcagctgcagttctgttggaataccctgccgtgtgaggtgtcagtgtgcccctggttgggggtgcctcccagttaggctgcctgggggtcaggggtcagggacccacttgaggaggcagtctgcccgttctcagatctccagttgcgtgctggg

SEQ ID NO: 10307 - DNA, 9109 bp, Homo sapiens
tttcccaattctttttttttttttaatttttttttaattatactttaagttttagggtacatgtgcacattgtgcaggttagttacatatgtatacatgtgccatgctgtgcgctgcacccactaactcgtcatctagcattaggtatatctcctaatgctatccctcccccctccccccaccacacaacagtccccagagtgtgatattccccttcctgtgtccatgtgatctcattgttcaattcccacctatgagtgagaatatgcggtgtttggttttttgtccttgcgacagtttactgagaatgatgatttccaatttcatccatgtccctacaaaggacatgaactcatcattttttatggctgcatagtattccatggtgtatatgtgccacattttcttaatccagtctatcattgttggacatttgggttgcttccaagtctttgctattgtgaataatgccgcaataaacatacgtgtgcatgtgtctttatagcagcaagatttatagtcctttgggtatatacccagtaatgggatggctgggtcaaatggtatttctagttctggatccctgaggaatcgccacactgacttccacaatggttgaactagtttacagtcccaccaacagtgtaaaagtgttcctatttctccacatcctctccagcacctgttgtttcctgactttttaatgatcgccattctaactggtgtgagatggtatctcattgtggttttgatttgcatttctctgatggccagtgatgatgagcattttttcatgtgttttttggctgcataaatgtcttcttttgagaagtgtctgttcatgtccttcgcccactttttgatggggttgtttgtttttttcttgtaaatttgtttgagttcattgtagattctggatattagccctttgtcagatgagtaggttgcgaaaattttctcccattttgtaggttgcctgttcactctgatggtagtttcttttgctgtgcagaagctctttagtttaattagatcccatttgtcaattttggcttttgttgccattgctgttgatgttttggacatgaagtccttgcccatgcctatgtcccgaatggtgatgcctaggttttcttctagggtttttatggttttaggtctaacgtttaagtctttaatccatcttgaattgatttttgtataaggtgtaaggaagggatccagtttcagctttctacatagggctagccagttttcccagcaccatttattaaatagggaatcctttccccattgcttgtttttctcaggtttgtcaaagattggatagttgtagatatgcggcgttatttctgaggtctctgttctgttccattgatctatatctctgttttggtaccagtaccatgctgttttggttactgtagccttgtagtatagtttgaagtcaggtagtgtgatgcctccagctttgttcttttggcttaggattgccttggcgatgcaggctcttttttggttccatatgaactttaaagtagttttttccaattctgtgaagaaagtcattggtagcttgatggggatggcactgaatctgtaaattaccttgggcagtatggccattttcacgatattgattcttcctacccatgagcatggaatgttcttccatttgtttgtatcctcttttatttccttgagcagtggtttgtagttctccttgaagaagtccttcacatcctttgtaagttggattcctaggtattttattctctttgaagcaattgtgaatgggagttcactcatgatttggctctctgtttatctgttattggtgtgtaagaatgcttgtgatttttgtacattgattttgtatcctgagactttgctgaagttgcttatcagcttaaggagattttgggctgagacaatggggttttctagatatacaatcatgtcgtctgcaaacagggacaatttgacttcctcttttcctaattgaataccctttatttccttctcctgcctaattgccctggccagaacttccaacactatgttgaataggagtggtgagagagggcatccctgtcttgtgccagttttcaaagggaatgcttccagtttttgcccattcagtatgacattggctgtggctttgtcatagatagctcttattattttgaaatacatcccatcaatacctaatttcttgagagtttttagcatgaagggttgttgaattttgtcaaaggctttttctgcatctattgagataatcatgtggtttttgtctttggctctgtttatatgctggattacatttattgatttgcgtatattgaaccagccttgcatcccagggatgaagcccacctgatcatggtggataagctttttgatgtgctgctggattcggtttgccagtattttattgaggatttttgcatcaatgttcatcaaggatattggtctaaaattctcttttttggttgtgtctctgcccggctttggtatcagaatgatgctggcctcataaaatgagttagggaggattccctctttttctattgattggaatagtttcagaaggaatggtaccagttcctccttgtacctctgatagaattcggctgtgaatccatctggtcctggactctttttggttggtaaactattgattattgccacaatttcagctcctgttattggtctattcagagattcaacttcttcctggtttagtcttggaagagtgtatgtgtcgaggaatttatccatttcttctagattttctagtttatttgcgtagaggtgtttgtagtattctctgatggtagtttgtatttctgtgggatcggtggtgatatcccctttatcattttttattgcgtctatttgattcttctctctctttttctttattagtcttgctagcggtctatcaattttgttgatcctttcaaaaaaccagctcctggattcattaattttttgaagggttttttgtgtctctatttccttcagttctgctctgattttagttatttcttgccttctgctagcttttgaaagtgtttgctcttgcttctctagttcttttaattgtgatgttagggtgtcaattttggatctttcctgctttctcttgtgggcatttagtgctataaatttccctctacacactgcttttaatgcgtcccagagattctggtatgtggtgtctttgttctccttggtttcaaagagcatctttatttctgccttcatttcgttatgtatccagtagtcattcaggagcaggttgttcagtttccatgtagttgagtggttttaagtgagattcttaatcctgagttctagtttgattgcactgtggtctgagagatagttcattataatttctgttcttttacatttgctgaggagagctttacttccaagtatgtggtcaattttggaataggtgtggtgtggtgctgaaaaaaatgtatattctgttgatttggggtggagagttctgaagatgtctattaggtccgcttggtgcagagctgagttcaattcctgggtatccttgttgactttctgtcttgttgatctgtctaatgttaacagtggggtgttaaagtctcccattattaatgtgtgggagtctaagtctctttgtaggtcactcaggacttgctttatgaatctgggtgctcctgtattgggtgcataaatatttaggatagttagctcttctcgttgaattgatccctttaccattatgtaatggccttctttgtctcttttgatctttgttggtttaaagtctgttttatcagagactaggattgcaacccctgcctttttttgttttccattcgcttggtagatcttcctccatccttttattttgagcctatgtgtgtctctgcatgtgagatgggtttcctgaatacagcacactgatgggtcttgactctttatccaatttgccagtctgtgtcttttaatgggagcatttagtccatttacatttaaagttaatattgttatgtgtgaatttgatcctgtcattatgatgttagctggtgattttgctcgttagttgatgcagtttcttcctagtctcgatggtctttacattttggcatgattttgcagcagctggtaccggttgttcctttccatgtttagcacttccttcaggagctcttttagggcaggcctggtggtgacaaaatctctcagcatttgcttgtctgtaaagtattttatttctccttcacttatgaagcttagtttggctggatatgaaattctgggttgaaaattcttgtctttaagaatgttgaatattggcccccactctcttctggcttgtagggtttctgccgagagatccgctgttagtccgatgggcttccctttgagggtaacccgacctttctctctggctgcccttaacattttttccttcatttcaactttggtgaatctgacaattatgtgtcttggagttgctcttctcgaggagtatctttgtggcgttctctgtatttcctgaatctgaatgttggcctgccttgctagattggggaagttctcctggataatatcctgcagagtgttttccaacttggttccattctccccatcactttcaggtacaccagtcagacgtagatttggtcttttcacatagtcccatatttcttggaggctttgctcatttctttttattcttttttctctaaacttcccttctcgcttcatttcattcatttcatcttccattgctgataccctttcttccagttgatcgcatcagctcctgaggcttctgcattcttcacgtagttctcgagccttggttttcagctccatcagctcctttaagcacttctctgtattggttattctagttatacattcttctaaatttttttcaaagttttcaacttctttgcctttggtttgaatgtcctcccatagctcagagtagtttgatcttctgaagcctccttctctcagctcgtcaaagtcattctccatccagctttgttccgttgctggtgaggaactgcgttcctttggaggaggagaggcgctttgcgttttagagtttccagtttttctgttctgttttttccccatctttgtggttttatgtacttttggtctttgatgatggtgatgtacagatgggtttttggtgtggatgtcccttctgtttgttagttttccttctaacatacaggaccctcagctgcaggtctgttggaataccctgccatgtgaggtgtcagtgtgccgctgctggggggtgcctcccagttaggctgctcgggggtcaggggtcagggacccacttgaggaggcagtctgcccgttctcagatctccagctgcgtgctgggagaaccactgctctcttcaaagctgtcagacagggacatttaagtgtgcagaggttgctgctgtctttttgtttgtctgtgccctgcccccagaggtggagcctacagaggcagggaggcctccttgagctgtggtgggctccacccagttcgagcttcccggctgctttgtttacctaagcaagcctgggcaatggcgggcgcccctcccccagcctcactgccaccttgcagtttgatctcagactgctgtgctagcaatcagcgagactccgtgggcataggaccctccgagccaggtgcgggatataatctcatggtgcgccgttttttaagccggttggaaaagcgcaatattcgggtgggagtgacccaattttccaggtgcgtccatcacccctttctttgactcggaaagggaactccctgaccccttgcgcttcccaagtgaggcaatgcctcgccctgctttggctcacgcatggtgcgcgcacccactgacctgcgcccactgtctggcactccctagtgagatgaacccagtacctcagatggaaatgcagaaatcaccggtcttctgcgtcgctcacgctgggagctgtagaccggagctgttcctatttggccatcttgatcaagaagcttactttcccaattctttaaccagtctgatcctaagtacctgctgtgacctcagatttaatttcttctgatgttcagtggcattttttgggagatatatttttgatttcactcaaagatacctccttcagctcatatttttgagacgtttggatgacttgagaaaagtattcaagttgggcaccctggatttccctggagaaagcctactttctctgttccttagggtcaatcagggatccaagtcaacggaggctgtgtcattttcaacttgtagcttccaaggtcactctagtcatgcccattccagctagcaggaaggggaaagactggaagtcatgtctataaaattcatcttaagcatgagatgcggaaattgcacacatcagttctgctcgcatcgcatttgtgagggcttagttacatatgacctctactcattgcaggagaggctgcaaaatatagtccctaactggcccagacaccactttgtcactatggaagaagaggagaacagattttgttggatacccagcagtctctgccatagataagttgacacaattccttgaatctgccatattccataatatatgctatattatatattatggaactatgtattagaccataagctccctattccccttgactttgagaaagcttaaagctaaatttagtgctctcttatagtacatcattttcattttttgatgtttattcattattctgatctggtttttgatctccctttttacttacaatggtcttgtctatcacacattttagtatcttacgccattccaaattctttcaaaaagtgggtgggatataaataataatagaattacacaatgcagtaaggtacctgcacaaacagcagctaatgtaaggagactgaaaaaggaactatatttgttaaaatcaaattggctggcctgcaagaagtgtgggtagtagaatctctttggaggacatcgcaacacttcttatatccatgaggtgggcatgcagtggtggcatacagttcaagtagtataatgataaagaatggggtgaccctgtgtctgacaggcaaagttgcctatcaatatattggcatcttatcccataatctgtaagaattagtattttggtgctacataataaagtattttagagtataaaaattagttgttcatatgccagcaaccaccattagtattttcaaaaaagtgcagtgaattctgagcatctaatatgtgcttagcactctgctaatctccatgagagatggacaacatggtctcttccttaaggatcttacacatttataatcctgagagccataatatactaaacagcaaagtgtttttcattcacccttctaaaccctagcccctacatcagtgctaggcacagagtggactctcaacaactaatgccaattgaatgaaaaatattaaaatgtcacttaatgctgaactgaaatttgaaatagatatgggaaggctcagaaatacgcaggatttccgctgatgtttctaaagaataccaaggttttgcttgtgttgactcagaaagactaaaacttggtcactcatttgacagggaaattcatagtaaaactgtttaatagctccttctagatttatttgtcagtgagcctggatatttactctgcttcttataactgtgagaaaaaatgtatgtcttttctctaggcattttatgacaatgtgtagctacctaagatgtgtgggtaccctgggggctggatagtaaaggattaagcttttaaaatatctacccacaggcatttattagaaggtatgcttcacattttattaagttataagctctccaaaaatgctcatgttttaaatgtttttcatctttgttggtgtttatctttgttttttatgcctagcttctgccaaaaaactcccacaaacttttaaattctttaaaaaggcacttcagtagtatgtaagatctgatgtctgtttatatagttctgtgcttctaactaatgtgtttaaaaatgtgtccatgtattttttatatgtatacacacagattataatgctacctggacaatgatagagcatttcaactttaaatctctgtcatctttactgaatggctttcagctggtaattctttaccttttggtgacatcagagatatttttcattccagtgaactctatatggcattgttgcatttgatgatctttttttttttcttttttttactttattattattatactttaagttttagggtacatgtgcacaatgtgcgggttagttacgtatgtatacatgtgccatgctggtgtgctgcacccattaactcatcatttagcattaggtatatctcctaatgctatccctcccccctccccccaccacacaacagtccccagagtgtgatgttccccttcctgtgtccatgtgttctcattgttcaattcccacctatgagtgagaatatgcagtgtttgtttttttgttcttgcgatagtttactgagaatgatgatttccaatttcatccatgtccctacaaaggacatgaactcatgattttttatggctgcatagtattccatggtgtatatgtgccacattttcttaatccaatctatcattgttggacatttgggttgcttccaagtctttgctattgtgaatagtgccgcaataaacatacatgtgcatgtgtctttatagcagcatgatttatagtcctttgggtatatacccagtaatgggatggctgggtcaaatggtatttctagttctagatccctgaggaatcgccacactgacttccacaatggttgaactagtttacagtcccaccaacagtgtaaaagtgttgctatttctccacatcctctcccgcacctgttgtttcctgactttttaatgattgccattctaactggtgtgagatggtatctcattgtggttttgatttgcatttctctgatggccagtgatgatgagcattttttcatgtgttttttggctgcataaatgtcttcttttgagaagtgtctgtttatgtc

SEQ ID NO: 10308 - DNA, 5958 bp, Homo sapiens
ttaaattttattattattatactttgagatttagggtacatgtgcacaatgtgcaggtttgttacatatgtatacatgtgccatgttgatgtgctgcacccacaacctcgtcatttagcattaggtatatctcctaatgctatccctcccccctccccccaccccacaacaggccccggtgtgtgatgttccccttcctgtgtccatgcgttctcattgttcaattcccacctatgagtgagaacatgcagtgtttggttttttgtccttgcgatagtttgctgagaatgatggtttccagcttcatccatgttcctagaaaggaaatgaactcatcattttttatggctgcatagtattccatggtgtatatgtgccacattttctttttttttttcctttttttttacttcaagaaatattttatttatgaacttttttttcttttttttaattatactttaagttttagggtacatgtgcacattgtgcaggttagttacatatgtatacatgtgccatgctggtgcactgcacccactaactcgtcatctagcattaggtatatctcccaatgctatcccttccccctccccccaccccaccacagtccccagagtgtgatattccccttcctgtgtccatgtgatctcattgttcaattcccacctatgagtgagaatatgcggtgtttggttttttgttcttgtgatagtttactgaaaatgatgatttccaatttcatccatgtccctacaaaggacatgaattcatcattttttatggctgcatagtattccatggtgtatatgtgccacattttcttaatccagtctatcattgttggacatttgggttggttccaagtctttgctattgtgaataatgccgcaataaacatacgtgtgcatgtgtctttatagcagcatgatttatagtcctttgggtatatacccagtaatgggatggctgggtcaaatggtatttctaggtctagatccctgaggaatctccacactgaattccacaacggttgaactagtttacagtcccaccaacagtgtaaaagtgttcctatttctccacatcccctccagcacctgttgtttcctgactttttaatgattgccattctaactggtgtgaaatggtatgtcattgtggttttgatttgcatttctctgatggccagtgatgatgagcattttttcatgtgttttttggctgcataaatgtcttcttttgagaagtgtctgttcatatccttcacccactttttgatgcaattgtttgtttttttcttgtaaatttgtttgagttcattgtagattctggatattagccctttgtcagatgagtaggttgcaaaaattttctcccattctgtaggttgcttgttcactctgatggcagtttcttttgctgtgcagaagctctttagtttaattagatcccatttgtcaattttggcttttgttgccattgcttttggtgttttagacatgaagtccttgcccatgcctatgtcctgaatggtattgcctaggttttcttctagggtttttgtggttttaggtctaacatgtaagtctttaatccatcttgaattaatttttgtataaggtgtaaggaagggatccagtttcagctttctacatatggctagtcagttttcccagcaccatttattaaatagggaatcctttccccatttcttgtttttgtcaggtttgtcaaagatcagatagttgtagatatgcagcattatttctgacggctctgttctattccattggtctatatctctgttttggtaccagtaccatgctgttttggttactgcagccttgtagtatactttgaagtcaggtagcgtgatgccttcagttttgttcttttggtttagatttgacttggcaatgtgggctcttttttggtgccataggaactttaaagtagttttttccaattctgtgaagaaaggcattggtagcttgatggggatggcattgaatctataaattacgttgggcagtatggccattttcacaatattgattcttcctgcccatgagcacggaatgttcttccatttgcttgtatcctcttttatttccttgagcggtggtttgtagttctccttgaagaggtccttcacatcccttgtaagttggattcctaggtattttattctctttgaagtaattgtgaatgggagttcactcatgatttggctctctgtttgtctgttattgatttataagaatgcttgtgatttttgcacattgattttgtatcctgagactgctgaagttgcttatcagcttaaggagattttgggctgagacgacggggttttctaggtatacaatcatgtcatctgcaaacagggacaatttgacttcctcttttcctaattgaatgccctttatttctttctcctgcctgattgccctggccagaacttccaacactatgttgaatagtagtggtaagagagggcatccctgtcttgtgccagttttcaaagggaatgcttccagtttttgtccattcagtatgatattggctgtgggttttgtcatagatagctcttattattttgagatatgcccatcaatacctaatttattgagagtttttagcatgaagcattgttgaattttgtcaaaggccttttctgcatctattgagataatcatgtggtttttgtctttggttctgtttatatgctggattatgtttattgatttgtgtatgttgaaccagccttgcatcccagggatgaagcccacttgttcatggtggataagctttttgatgtgctgctggatttggtttgccagtattttattgaggatttttgcatcaatattcatcaaggatattagtctaaaattctctttttttgttgtgtctctgccaggctttggtatcaggatgatgctggcctcataaaatgagttagggaggattccctctttttctgttgattggaatagtttcagaaggattggtaccagctcctccttgtacctctggtagaattcggctgtgaatccatctggtgctggactttttttggttggtaagctattaattattgcctcaatttcagagcctgttattggtctattcagagattcaacttcttcctggtttagtcttgggagggtgtatgtgccaaggaatttatccatttcttctagattttccagtttatttgtgtagaggtgtttatagtattctttgatggtaggttgtatttctgtgggattggtggtgatatcccctttatcattttttattgcatctttttgattcttctctcttttcttctttattagtcttgctagcagtctatcaattttgttgatcttttcaaaaaaccagctcctggattcactgattttttgaagggatttttgtgtctctatttccttcagttctgctctgatcttagttatttcttgccttctgctagcttttgaatgtgtttgctcttgcttctctagttcttttaattgtgatgttagggtgtcaattttagatcattcctgctttctcttgtgggcatttagtgctataaatttccctctgcacactgctttgaatgtgtcccagagattctggtatgttgtgtctttgttctcgttggtttcaaagaacatctttatttctgccttctttttgttatgtacccagtagtcactcaggagcaggttgttcagtttccatgtagttgagtggttttgagtgagtttcttaatcctgagttctagtttgattgcactgtcgtctgagagacagtttgttataatttttattcttttacatttgctgaggagagctttacttccaactatgtggtcaattttggaataggtgtagtgtggtgctgaaaagaatttatattctgttgatttggggtggagagttctgtagatgtctattaggtccgcttggtgcagagctgagttcaattcctggatatccttgttaactttctgtctcattgatctgtctaatgttgacagtggggtgttaaagtctcctattattattgtatgggagtctaagtctctttgtaggtcactaaggacttgctttatgaatctgggtgcgcctgtattgggtgcatatatatttaggatagttagttcttcttgttgaattgatccctttaccattatgtaatggccttctttgtctcttttgatcttttttggtttaaagtctgttttatcagagactaggattgcaacccctgcctttttttgtttctcatttgcttggtagatcttcctccatccctttattttgagcttatgtgtgtctctgcacatgagatgggtttcctgaatacagcacactgatgggtcttcagtctttatccaatttgccagtctgtgtcttttaactggagcatttagcccatttacatttaaggttaatatttttatgtgtggatttgatcctgtcattatgatgttagctggttattttgctcgttagttggtgcagtttattcctggccttgatggtcttcacgatttggcatgtttttgcagtggctggtactggttgttcctttccacatttagtgcttccttcaggagctcttgtatggcaggcctggtggtgacaaaatctctcagcacttccttgtctgtgaaggattttatttctccttcacttatgaagcttagtttggctggatatgaaattctgggttgaaaattcttttccttaagaatgttgaatattggcccccactcttttctggcttgtagagtttctgccaaggcatcagcagttagtctgatgggcttccctttgtgggtaacccgacctttctctctggctgcccttaacattttttcctttgtttcaactttggtgaatctgacaattatgcgtcttggagttgctcttctcgaggagtatctttgtggcattctctgtatttcctgaatttgaatgttggcctgccttgctagattggggaagttctcctggataatatcctgcagagtgttttccaacttggttccattctctccgtcactttcaggtacaccaatcagatgtagatttggtcttttcacatagtcccatatttctggaaagctttgttcattactttttattcctttttctctaaacttctcttctcacttcatttcattcatttcatcttccatcgctgatacccttgcttccagttgattacattggctactgaggcttgtgcattcgtcatgtatttctcgtgccacagttttcagctccatcaggtcttttaaggacttctctgcattggttattctagttagccattcgtctaatttttttcaaggtttttaacttctttgccattggttcaaatttcctcctttagctcggagtagtttgatcttctgaagccttcttctctcaactcatcaaagtcattctccatccagctttgttctgttgcgggtgaggaggtgcattcctttggaggagtagaggcactctgatttttagagtttctggtttttcggcactgtttattccccatctttgtggttttatctacctttggtctttgatgatggtgacatacagatgggtttttggtgtggatgtcctgtttgttagttttccttctaacagtcaggaccctcagctgcgggctgttggagtttgctggaggtccactccagaccctgtttgcctgggtatcagcagcggtggctgcagaacagtggatgttggtgaactgcaaattctgctgcctgattgttcctctggaagttttgtctcagaggagtacccggctgtgtgaggtgtcagaccgcccctactagggggtgcctcccagttaggctcctcgggggtcagggacccacttgaggaggcagtctgcctgttctcagatctcaagctgcatgctgggagaaccactactctctt

SEQ ID NO: 10309 - DNA, 6050 bp, Homo sapiens
tgtattattattattattatactttaagttttagggtacatgtgcacaacatgcaggtgtgttacatatatatacatgtgccatgttggtgtgctgcacccattaactcgtcatttaacattaggtatatctcctaatgctatccctccctcctcctcccaccccacaacagacccctgtgtgtgatgttccccttcctgtgtccatgtgttctcattgttctgttcccacctatgagtgagaacctgcagtgtttagttttttgtccttgcaatagtttgctgagaatgatggtttccagctttatccatgtccctacaaaggacatgaactcatccttttttatggctgcatagtattccatgctgtatatgtgccacattttcttaatccagtctatcattgttggacgtttgggttggttccaagtctttgctattgtgaatagtgctgcaataaacatacgtgtgcatgtgtctttatagcagcatgatttataatcctttaggtatatacccagtaatgcgatggctgggtcaaatggtatttctagttctagatccctgaggaatcgccacactgacttccacaatgtttgaactagtttacagtcccaccaacagtgtaaaggtgttcctatttctccacatcctctccagcacctgtagtttcctgactttttaatgatcgccattctaactggtgtgagatggtatctcattgtggttttgatttgcatttctctgatggccagtgatgatgagcattttttcatgtgtcttttggctgcataaatgtcttcttttgagaagtgtctgttcatatccttcacccactttttgatggggttgtttgtttttttcttgtaaatttgtttgagttcattgtagattctggatattagccctttgtcagttgagtagattgcaaaaattttctcccattctgtaggttgcctgttcactctgatggtagtttcttttgctgtgcagaagctctttagtttaattagatcccatttatcaattttggcttttgttgccattgcttttggtgttttagacatgaagtccttgcccatgcctatgtcctgaatggtattgcctaggttttcttctagggtttttatggttttaggtctaacatttaagtctttaatccatcttgaattaattttagtataaggtgtaaggaagggatccagtttcagctttctccatatggctagccagttttcccagcaccatttattaaagagggaatcctttccccatttcttatttttgtcaggtttgtcaaagatcagatagttgtagacatgtggcattatttctgagggctctgttctgttccaatggtctatatctctgttttggtaccagtaccatgctgttttggttactgtagccttgtagtatagtttgaagtcaggtagcatgatgcctccagctttgttctttttgcttaggattgacttggcaatgagggctcttttttggtaccatatgaactttaaagtagttttttccaattctgtgaagaaagtcattggtagcttgatggggatggcattgaatctataaattaccttgggcagtatggccattttcaccatattgattcttcctacccatgagcatggaatgttcttccatttgtttgtatcctcttttatttccttgagcagtggtttgtagttctccttgaagaggtccttcacatcccttgtaagttggattcctagctattttattctctttgaagcaattgtgaatgggagttcactcatgatttggctctctgtttgtctgttattggtgtataagaatgcttgtgatttttgcacattgattttgtatcctgagactttgctgaagttgcttatcagcttaaggagattttgggctgagacgatggggttttctagatatacaatcatgtcatctgcaaacagggacaatttgacttgctcttttcctaattgaataccctttatttctttctcttgcctgattgccctggccagaacttccaacactatgttgaataggagtggtgagagagggcatccctgtcttgtgccagttttcaaagggaatgcttccaatttttgcccattcagtatgatattggctgtgagtttgtcataaatagctcttactattttgagatacgtcccatcaatacctaatttattgagagtttttagcatgaagggctgttgaattttgtcaaaggccttttctgcatctattgagataatcatgtggtttttctcgttggttctgtttatatgctggattacgtttattgatttgcgtatgttgaaccagccttgcatcccagggatgaagcccacttgatcatggtggataagcttttcgatgtgctgctggatttggtttgccagtattttattgaggatttttgcattgatgttcatcagggatattggtctaaaattctctttttttgttgtgtctctgccaggctttggtatcaggatgatgctggcctcataaaatgagttagggaggattctctctttttctgttgattggaatagtttcagaaggaatggtaccagctccttcttgtacctctggtagaattcggctgtgaatccatctggtcctggactttttttggttggtaagctattaattattgccccaatttcagatcctgttattggtctcttcagagattcaacttcttcctggtttagtcttgggagactgtatgtgtccaggaatttatccatttcttccagattttctagtttatttgtgtagaggtgtttatagtattctctgatggtagtttgtatttctgtgggatcggtggtgatatcccctttatcattttttattgtgtctatttgattcttctctcttttcctgtttattagtcttgctagtggtctatcaattttgttgatcttttcaaaaaaccaactcctggattcattgattttttgaagggttttttgtgtctctatttccttcagttctgctctgatcttagttattttcttgccttctgctagcttttgaatgtgtttgctcttgcttctctagttcttttaattgtgatgttagggtgtcaattttagatctttcctgctttcttttgtgagcatttagtgctataaatttccctctacacactgctttgaatgtgtctcagagattctggtatgttgtgtctttgttctcgttggtttcaaagaacatctttatttctgccttcatttcgttatgtacccagtagtcattcaggagcatgttgttcagttgccatgtggttgagtggttttgagtgggtttcttaatcctgagttctagtttgattgcactgtggtctgagagacagtttgttatactttctgttcttttaatttgctgaggagtgctttacttccaactatgtggtcaattttggaataggtgtggtgtggtgctgaaaagaatgtatattctgttgatttggggtggagagttctgtagatgtctattaggtccacttggtgcagagctgagttcaattcctggatatccttgttaactttttgtctcattgatctgtctaatgttaacagtggggtgttaaagtctcccattattattgtgtgggagtctaagtcactttgtaggtctctaaggacttgctttatgaatctgggtgctcctgtattgggtgcatatatatttaggatagttagctcttcttgttgaatggatccctttaccattatgtagtggccttctttgtctcttttgatctttgttggtttaaagtctgttttatcagagactaggattgcaacccctgcctttttttgttttccatttgcttggtagatcttcctccatccttttattttgaacctatgtgtgtctctgcacgtgagatgggtttcctgaatacagcacactgatgggtcttgactctttatccaatttgccagtctgtgtcttttgattggaacatttagcccatttacatttaaggttaatattgttatgtgtgaatttgatcctgtcattatgatgttagctggttattttgctcgtgagttgatgcagtttcttcctagccttgatggtctttacaatttggcatgtttttgctgcggctggtaccggttgttcctttccatgtttagtgcttccttcaggagctcttgtagggcaggcctggtggtgacaaaatctctgagcatttgcttgtctgtaaagtattttatttctccttcacttatgaagcttagtttggctggatatgaaattctgggttgaaaattcttttctttaagtatgttgaagggccgggtgcagtggttcacgcctgtaatctcagcactttgggaggctgtggtgggtggatcacgaggtcaggagattgagaccatcctggctaacatggtgaaaccccgtctctactaaaaatacaaaaaaatttagccgggcttggtagcgggtgcctgtagtcccagctactcggaaggctgaggcaggagaatggtgtgaacccaggaggcagagcttgctgtgagccgagatcgcgccactgcactccagcctgggcgagagcgagagtccgtctcaaaaaaaaaaaaaaaaaaaaaaaaaaaaaagaatgttgactattggcccccactctcttctggcttgtagagtttctgctgagagatccgctgttagtctgatgggcttccctttgtgggtaacccgacctttctctctagctgcccttaacattttttccttcatttcaactttggtgaatctgacaattatgtgtcttggagttgctcttctcgaggagtatctttgtggcattctctgtatttcctgaatttgaatgttggcctgccttgctagattggggaagttctcttggataatatcctgcagagtgttttccaacttggttccattctccctgtcactttcaggtacaccaatcagatgtagatttggtcttttcacatagtcccatatttcttggaggctttgttcatttctttttattcttttttctctaaccttctcttcttgcttcatttcattaatttcatcttccatcactgataccttttcttccagttgatcgaatcggctactgaggcttgtgcattcgtcacgtagttcttgtgccatggttttcagctccatcaggtcctttaaggacttctctgcattggttattctagttagtcattcgtctaatcttttttcaagatttttaacttctttgccatgggttcgaacttcctcctttagctcagagtagtttgatcgtctgaagcattcttctctcaactcgtcaaagtcattctgcgtccagctttgttctgttgctggtgacgagctgtgttcctttggaggaggagaggcactctgatttttagaattttcagtttttctgctctgttttttccccatctttatggttttatctacctttggtctttgatgatggtgacgtacagatggggttttggtgtggatgtcctttctgtttgttagttttccttctaacagtcaggaccctcagctgcaggtctgttggagtttgctggaggaccactccagaccctgtttgcctggatatcagcagcggaggctgcagaacagcggatattggtgaacagccaatgttgctgcctcatcattcctctggaagttttgtctcagaggagtacccggccctgtgaggtgtcagtctgcccctactggggggtgcctcccagttaggctactcaggggtcagggacccacttgaggaggcagtctgtctgttctcagatctcaagctgcatgctgggagaaccactactctcttctaagctgtcagacagggacatttaagtctgcagaggtttctgctgccttttgtttggctatgccctgcccccagaggtggagtctacacaggcaggcaggcctccttgagctgcagtgggctccacccagttcgagcttcccagctgctttgtttacctactcaagcctcggcaatggcaggcacccctcccccagcct

SEQ ID NO: 10310 - DNA, 5661 bp, Homo sapiens
tgtcatttttttaaaattatactttaagttttacggtacatatacacaatgtgcaggtttgttacatatgtatacatatggcatgttggtgtgctgcacccattaacttgtcatttaacattaggcatatctcctaatgttatccctcccctctcccgccaacccacaacaggccccggtgtgtgatgttccccttcctgtgcccatgtgttctcattgttcaattccaatctatgagtgagaacatgcagtgtttggttttttgtccttgcgacagtttgctgaaaatgatggtttccagcttcatccatgtccctacaaaggacatgaactcatcattttttatggctgcatagtattccatagtgtatatgtgccacattttcttaatccagtctatcatttatggacatttgggttggttccaagtctttgctattttgagtagtgccacaataaacttacatgtgcatgtgtctttatagcagcatgttttataatcctttgagtatatatccagtaataggatggctgggtcaaatggtatttctagttctagatccctgaggaatcgccacactgacttccacaatggttgaactagtttacagtcccaccaacagtgtaaaagtgttcctatgtctccacatcctctccagtacctgttgtttcctgactttttaatgattgccattctaactggtgtgagatgatatctcattgtggttttgatttgcatttctctgatggccagtgatgatgagcattttttcatgtgtcttttcgctgctaaatgtcttcttctgagaagtgtctgttcatatcctttgcccacattttgatggggttgtttgtttttttcttgtaaatttgtttcagttcattgtagattctggatattagcccttttctcagatgagtatattgcaaaaattttctgccattctgtaggttgcctgttcactctgatggtagtttcttttgctgtgcagaagctctttagtttaattagatcccatttgtcaatttgggcttttgttgccattgctttttgtgttttagacatgaagtccttgcccatgcctatgtcctgaatggtaatgcctaggttttcttctagggtttttatggttttaggtttaacatttaagtctttaatccatgttgaattaatttttgtataaggtgtaaggaagggatccagtttcagctttctacatatggctagcaagtcttcccagcaccatttattaaatagggaaaccttcccccatttcttgtttttgtcagatttgtcaaagatcagatagttgtagatatgcggcattatttctgagggctctgttctgttccattggtctatatttctgttttggtaccagtaccatgctgttttggttactgtagccttgtagtatagtttgaagtcaggtagcatgatgcctccagctttgttcttttggcttaggattgacttggcgatgcgggctcttttttggttccatatgaactttaaagttgttttctccaattctctgaagaaagtcattggtagcttgatgcggatggcattgaatctataaattaccttgggcagtatggccattttcacaatattgcttattcctacccatgagcatggaatgttcttccatttgtttgtatcctcttttatttcattgagcagtggtttgtagttctccttgaagaggtccttcacatcccctgtaagttggattcctaggtattttattctctttgaagcaattgtgaatgggagttcactcatgatttggctctctgtttgtctgttattggtgtataagaatgcttgtgatttttgcacattgattttgtatcctgagaatttgctgaagttgcctttcaccttatggagattttgggctgagacgatggggttttctagataaacaatcatgtcatctacaaacagggaccatttgactttctcttttcctaattgaataccctttatttccttctcctgcctgattgccctggccaggacttccaacactatgttgaataggagtggtgagagagggcatccctgtcttgtgccagttttcaaagggaatgcttccagtttttgcccattcagtatattggctgtgggtttgtcatagatagctcttattattttgagatacgtcccatcaatacctaatttattgagagtttttagcatgaagggctgttgaatttcgtcaaaggccttttctgcatctattgagataaacatgtggtttctgtctttggttctgtttgtatgctggattatgtttattgatttacgtatattgaaccagcgttgcatcacagggataaaacccacttgatcatggtggataagctttttgatgtgctgctggattcggtttgccagtattttattgaggatttttgcatcgatgttcatcggggatattggtctaaaattctctttttttgttgtgtctctgccaggctttggtatcaggatgatgctgacctcataaaatgagttagggaggatttcctctttttctattgatcagaatagttttagaaggaatggtaccagctcctccttgtacctctggtagaattcggctgtgaatccatctggtcctggacttttttttggttcgtaagctattaattattgcctcaatttcagagcttgttattggtctattcagagattcaacttcttcctggtttagtcttgggagggtttatgcatcgaggaatttatccatttcttctagattttctagtttatttgcgtagaggtgtttatagtattctctgatggtagtttgtatttctgtgagattggtggtgatatcccctttatcattttttattgtgtctatttgattcttctctcttttcttctttatcagtcttgctagtggtctatcaattttgttgatcttttcaaaaaaccggctcctggattcattgatttttgaagcgttttttgtgtctctgtttccttcagttctgctctgatcttagttatttcttgccttctgctagctgttgaatatgtttgcttttgcttctctagttcttttaattgtgatgttagggtgtcgattttagatctttcctgctttctcttgtgggcatttagtgctatacatttccctctacacactgctttgaatgtgtcccagagattcttgtatgttgtgtctttgttctcgttggtttcaaagtacatctttatttctgccttcatttcgttatgtacccggtagtcattcaggagcaggttgttcagtttccatgtagttgagcagttttgagtgagtttcttaatcctgagttctagtttgattgcactgtggtctgcgagacagtttgttataatttctgttcttttacatttgctgaggagagctttacttccaactatgtggtcaattttggaatcagtgcagtgtggtgctgagaagaatgtatattgtgttgatttggggtggagagttctgtagatgtctattaggtccgcttggtgcagagctgagttaagttcctggatatccttgttaactttctgtctcattgatctgtctgatgttgacagtggggtgttaaagtctcccattattattgtgtgggagtctaagtctctttgtaggtctctaaggacttgctttatgaatctgggtcctcctgtattaggtgcctatatatttaggatagttagctcttcttgttgaattgatccctttaccattatgtaatggccttctttgtctcttttgatctttgttggtttaaagtctgttttatcagagactaggattgcaacccctgcctttttttgttttccatttgcttggtagatcttcctccatccctttattttgagcctatgtgtgtctctgcacatgagatgtgttttctgaatacagcacactgatgggccttgactctttatccaatttgccagtctgtgtcttttaattggagcatttatcccatttacctttaaggttaatattgttatgtgtgaatttgatcctgtcattatgatgttagctggttattttgctcattagttgatgcagtttcttcttagcctcgatggtctttacaatttggcatgattttgcagtggctggtaccggatgttcctttccacgtctagtgctttcttcaggagcccttttagggcaggcctggcggtgagaaaatctctcagcatttgcttgtctgtaaagtattttatttctccttcacttatgaagcttagtttggctggatatggaattctgggttgaaaattcttttgtttaaaaatgttgaatattggcccccactctcttctggcttgtagagtatctgccgagagatcagctgttagtctgattggcttccctttgtgggtaagccgacctttctctctggctgcccttaacattttttccttcatttcaactttagtgaatctgacaattatgtgtcttggagttgctcttctcgaggagtatctttgtggcattctctgtatttactgaatttgaatgttggtctgcctcgctagattggggaagttctcctggataatatcctgcagaggttttccaacttggttccattctccccgtcatttttaggtacaccattcagacgtagatttgaccttttcacatagtcccatatttcttggaggctttattcgtttcttttttattcttttttctctaaacttgtcttctcgcttcatttcatcttccatcactgataccctttcttccagttgatcgaatcggctactgaggcttgtgcattggtcccgtagttctcgtgccatggttttcatctccatcacgtcctttaaggacttctctgcattggttattctagttagccattcgtctaattttttttcaaggtttttaacttctttgccatgggttcgaacttcctcctttagctcagagtagtttgatcgtctgaagccttcttctttcaactcgtcaaaatcattctccgtccagctttgttccattgctggtgaggagctgcattcccttggaggaggagaggtgctctgatttttagagtttccagtttttctgctctgttttttccgcatctttgtggttttatctacctttggtctttgatgatggtgacgtacagatggggttttggtgtgggtgtcctttctgtttattagctttccttctaactgtcaggacccccagctgcaagtctgttggagtttgctggaggtccactccagatcctgtttgcctgggtatcagcagcagaggctgcagaacagaggatattggtgaacagcaaatgttgctgcctgatcgttcctctggaagttttgtctcagaggagtacccggccgtgtgaggtgtcagtctgcccctactagggggtgcctcccagttaggctactcgggggtcagggacccacttgaggaggcagtctgtttgttctcagatctccagctgcgtgctgggagaaccactactctcttcaaagctgtcagacagggacatttaagtctgcagagatttctgctgccttttgtttggctatgccctgcccccagaggtgaagtctacagaggcaggcaggcctccttgaactgtggtgggcttcacccagttcaatcttcctgg

SEQ ID NO: 10311 - DNA, 6046 bp, Homo sapiens
attttcttttttctttttttttttttattatactttaagttttagggtacatgtgcacattgtgcaggttagttacatatgtatacatgtgccatgctggtgtgctgcacccactaactcgtcatctagcattaggtatatctcccaatgctacacctcccccctccccccaccccaccacagtccccagagtgtgatattccccttcctgtgtccatgtgatctcattgttcaattcccacctatgagtgagaatatgcagtgtttggttttttgttcttgcgatagtttactgagaatgatggtttccaatttcatccatgtccctacaaaggacatgaactcatcattttttatggctgcatagtattccatggtgtatatgtgccacattttcttaatccagtctatcattgttggacatttgggttggttccaagtctttgctattgtgaataatgctgcaataaacatacgtgtgcatgtgtctttatagcagcatgatttatagtcatttgggtatatacccagtaatgggatggctgggtcaaatggtatttctagttctagatccctgaggaatcgccacactgacttccacaatggttgaactagtttacagtcccaccaacagtgtaaaagtgttcctatttctccacatcctctccagcacctgttgtttcctgactttttaatgattgccattctaactggtgtgagatgatatctcatagtggttttgatttgcatttctctgatggccagtgatgatgagcattttttcatgtattttttggctgcataaacgtcttcttttgagaagtgtctgttcatgtccttcgcccactatttgatggggttgtttgtttttttcttgtaaatttgtttgagttcattgtagattctggatattagccctttgtcagatgagtaggttgtgaaaattttctcccatgttgtaggttgcctgttcactctgatggtagtttcttttgctgtgcagaagctctttagtttaattagatcccattggtcaattttggcttttgttgccattgcttttggtgttttggacatgaagtccttgcccacgcctatgtcctgaatggtaatgcctaggttttcttctagggtttttatggttttaggtctaacgtttaaatctttaatccatcttgaattgatttttgtataaggtgtaaggaagggatccagtttcagctttctacatatggctagccagttttcccagcaccatttattaaatagggaatcctttccccattgcttgtttttctcaggtttgtcaaagatcagatagttgtaggtatgcggcgttatttctgagggctctgttctgttccattgatctatatctctgttttggtaccagtaccatgctgttttggttactgtagccttgtagtatagtttgaagtcaggtagtgtgatgcctccagctttgttcttttggcttaggattgacttggcgatgcgggctcttttttggttccatatgaactttaaagtagttttttccaattctgtgaagaaagtcattggtagcttgatggggatggcattgaatctgtaaattaccttgggcagtatggccattttcacgatattgattcttcctacccatgagcatggaatgttcttccatttgtttgtatcctcttttatttccttgagcagtggtttgtagttctccttgaagaggtccttcacatcccttgtaagttggattcctaggtattttattctctttgaagcaattgtgaatgggagttcactcatgatttggctctctgtttgtctgttgttggtgtataagaatgcttgtgatttttgtacattgattttgtatcctgagactttgccgaagttgcttatcagcttaaggagattttgggctgagacgatggggttttctagataaacaatcatgtcgtctgcaaacagggacaatttgacttcctcttttcctaattgaataccctttatttccttctcctgcctgattcccctggccagaacttccaacactatgttgaataggagcggtgagagagggcatccctgtcttgtgccagttttcaaagggaatgcttccagtttttgcccattcagtatgatattggctgtgggtttgtcatagatagctcttattattttgaaatacatcccatcaatacctaatttattgagagtttttagcatgaagggttgttgaattttgtcaaaggctttttctgcatctattgagataatcatgtggcttttgtctttggctctgtttatatgctggattacatttattgatttgcgtatattgaaccagccttgcatcccagggatgaaggccacttgatcatggtggataagctttttgatgtgctgctggattcggtttgccagtattttattgaggatttttgcatcaatgttcatcaaggatattggtctaaaattctcttatttggttgtgtctctgcccggctttggtatcagaatgatgctggcctcataaaatgagttagggaggattccctctttttctattgattggaatagtttcagaaggaatggtaccagttcctccttgtacctctggtagaattcggctgtgaatccatctggtcctggactctttttggttggtaaactattgattattgccacaatttcagctcctgttattggtctattcagagattcaacttcttcctggtttagtcttgggagagtgtatgtgtcgaggaatgtatccatttcttctagattttctagtttatttgcgtagaggtgtttgtagtattctctgatggtagtttgtatttctgtgggatcggtggtgatatcccctttatcattttttattgtgtctatttgattcttctctctttttttctttattagtcttgctagtggtctatcaattttgttgatcctttcaaaaaaccagctcctggattcattgattttttgaagggttttttgtgtctctatttccttcagttctgctctgattttagttatttcttgccttctgctagcttttgaatgtgtttgctcttgcttttctagttcttttaattgtgatgttagggtgtcaattttggatctttcctgctttctcttgtgggcatttagtgctataaatttcccgctacacactgctttgaatgtgtcccagagattctggtatgttgtgtctttgttctcgttggtttcaaagaacatctttatttctgccttcatttcgttatgtacccagtagtcattcaggagcaggttgttcagtttccatgtagttgagcagctttgagtgagattcttaatcctgagttctagtttgattgcactgtggtctgagagatagtttgttataatttctgttcttttacatttgctgaggagagctttacttccaagtatgtggtcaattttggaataggtgtggtgtggtgctgaaaaaaatgtatattctgttgatttggggcggagagttctgtagatgtctattaggtccgcttggtgcagagctgagttcaattcctgggtatctttgttgactttctgtctcgttgatctgtctaatgttgacagtggggtgttaaagtctcccattattaatgtgtgggagtctaagtctctttgtaggtcactcaggacttgctttatgaatctgggtgctcctgtattgggtgcatatatatttaggatagttagctcctcttgttgaattgatccctttaccattatgtaatgggcttctttgtctcttttgatcgttgttggtttaaagtctgttttatcagagactaggattgcaacccctgcttttttttgttttccatttgcttggtagatcttcctccatccttttattttgagcctatgtgtgtctctgcacgtgagatgagtttcctgaatacagcacactgatgggtcttgactctttatccaacttgccagtctgtgtcttttaattggagaatttagtccatttacatttaaagttaatattgttatgtgtgaatttgatcctgtcattatgatgttagctggtgattttgctcgttagttgatgcagtttcttcctagtctcgatggtctttacattttggcatgattttgcagcggctggtaccggttgttcctttccatgtttagcacttccttcaggagctcttttagggcaggcctggtggtgacaaaatctcttagcatttgcttgtctgtaaaggattttatttctccttcacttatgaagcttagtttggctggatatgaaattctgggttgaaaattcttttctttaagaatgttgaatattggcccccactctcttctggcttgtagggtttctgccaagagatccactgttagtctgatgggcttccctttgagggtaacccgacctttctctctggctgcccttaacattttttccttcattgcaactttggtgaacctgaaaattatgtgtcttggagttgctcttctcgaggagtgtctttgtggcattctctgtatttcctgaatttgaacgttggcctgccttgctagattggggaagttctcctggataatatcctgcagagtgttttccaacttggttccattctccgcatcactttcaggtacaccaatcagacgtagatttggtcttttcacatagtcccatatttcttggaggctttgctcatttctttttattcttttttctctaaacttcccttctcacttcatttcattcatttcatcttccattgctgataccctttcttccagttgatcgcatcggctcctgaggcttctgcattcttcacgtagttctcgagccttggttttcagctccatcagctcctttaagcacttctctctattggttattgtagttatacattcttctaaatttttttcaaagttttcaacttctttgcctttggtttgaatgtcctcccatagctcagagtaatttgatcgtctgaaaccttcttctgtcagctcgtcaaagtcattctccatccagctttgttccgttgctggtgaggaactgtgttcctttggaggaggagaggcactctgcgttttagagtttccagtttttctgttctgttttttccccatctttgtggttttatctacttttggtctttgatgatggtgatgtacagatgggttttcggtgtggatgtcctttctgtttgttagttttccttctaacagacaggaccctcagctgcaggtctgttggaataccctgccgtgtgaggtgtcagtgtgcccctgctggggggtgtctcccagttaggctgctcgggggtcaggggtcagggacccacttgaggaggtagtctgcccgttctcagatctccagctgcgtgctgggagaaccactgctctcttcaaagctgtcagacagggacatttaagtctgcagaggttactgctgtctttttgtttgtctgtgccctgcccccagaggtggagcctacagaggcaggcaggcctccttgagctgtggtgggctccacccagttcgagcttcccggctgctttgtttacctaagcaagcctgggcaatggcgggcgcccctcccccagcctcgctgccgccttgcagtttgatctcagactgctgtgctagcaatcagcgagattccgtgggcgtaggaccctctgagccaggtgtgggatatagtctcgtggtgcgccgttttttaagccggtctgaaaagcgcagtattcgggtgggagtgacccgattttccaggtgcgtccctcacccctttctttgactaggaaagggaactccctgaccccttgcacttcccaggtgaggcaatgcctcgccctgcttcccctcgcgcacggtgcgcacacccactggcctgcacccactgtctggcactccctagtgagatgaacccggtacctcagatggaaatgcagaaatcacccgtcttctgcgtcgctcacgctgggagctgtagaccggagctgttcctattcggccatcttggctcctcccccc

SEQ ID NO: 10312 - DNA, 6100 bp, Homo sapiens
tttttttaaatatattttttaaattttattattattatactttaagttttagggtacatgtgcacaacgtgtaggtttgttacatatgtatacatgtgccatgttggtgtgctgcacccattaactcgtcatttagcattaggtatatctcctaatgctattcttcccccctccccccaccccacaacagtccccggagtgtgatgttccccttcctgtgtccatgtgttctcactgttcaattcccacctatgagtgagaacatgcggtatttggttttttgtccttgcaatggtttgctgagaatgatggtttccaatttcatccatgtccctacaaaggacatgaactcttcattttttatggccgcatagtattccatggtgtatatgtgccaaattttcttaatcagtctatcgttgttggacatttgggttggttccaagtctttggtattgtgaatagtgctgcaataaacatacgtgtgcatgtgtctttatagcagcatgatttataatcctttgggtatatacccagtaatgggatggctgggtcaaatggtatttctggttctagatccctgaggaatcgccacactgacttccacaatggttgaactagtttacagtcccaccaacagtgtaaaagtgttgctatttctccacatcctctccagcacctgttgtttcctgactttttaatgattgccattctaactggtgtgagatggtatctcattatggttttgatttgcatttctctgatggccagtgatgatgagcatgttttcatgtgttttttggctgcataaatgtcttcttttgagaagtgtctgttcatatcctttgcccactttttgatggggttgttttttcttgtaaatttgtttgagttcattgtagattctggatattagccctttgtcagatgagtaggttgcgaaaattttctcccattttgtaggttgcctgttcactctgatggtagtttctttttctgtgcagaagctctttagtttaattagatcccatttgtcaattttggcttttgttgccattgcttttggtgttttagacatgaagtccttgcccatgcctatgtactgaatggtaatgcctaggttttcttctagggtttttatggttttaggtctaacatttaagtctttaatccatcttgaattaatttttgtataaggtgtaaggaagggatccagtttcagctttcagctttctacatatggctagccaggtttcccagcaccatttattaaatagggaatcctttccccagttcttgtttttgtcaggtttgtcaaagatcagatggctgtagatatgcggcattatttctgagggctctgttctgttccattgatctatatctctgttttggtaccagtaccatgctgttttggttactgtagccgtgtagtatagtttgaagttaggtagcgtgatgcctctggctttgttcttttggcttaggattgacttggcaatgcgggctcttttttggttccatatgaactttaaagtagttttttccaattctgtgaagaaagtcattggtagcttgatggggatggcattgaatctataaattaccttgggcagtatggccattttcacgatattgattcttcctacccatgagcatggaatgttcttccatttgtttgtatcctcttttattacattgagcagtggtttgtagttctccttgaagaggtccttcacatcccttgtaagttggattcctaggtattctattctctttgaagcaaaagtgaatgggagttcactcatgatttggctctctgtttgtctgttattggtgtataagaaagcttgtgatttttgtacattgattttgtatcctgagactttgctgaagctgcttatcagcttaaggagattttgggctgagacaatggggttttctagatatacaatcatgtcatctgcaaacagggacaatttgacttcctcttttcctaattgaataccctttatttccttctcctgcctaattgccctggccagaacttccaacactatgttgaataggagtagtgagagagggcatccctgtcttgtgccagttttcaaagggaatgcttccagtttttgcccattcagtatgatattgggtgtgggtttgtcatagatagctcttattattttgagatatgtcccatcaatacctaatttattgagagtttttagcatgaagggctgttgaattttgtcaaaggccttttctgcatgtattgagataatcatgtggtttttgtctttggttctgtttatatgctggattacatttattgatttgcgtatgttgaaccagccttgcatcccagggatgaagcccacttgatcatggtgcataagctttttgatgtgctgctggattcggtttgccagtattttattgaggatttttgcatcaatgttcatcaaggatattggtctaaaattctattttttggttgtgtctctgccaggctttggtatcaggatgatgctggcctcataaaatgagttagggaggattccctctttttctattgattggaatagtttcagaaggaatggtaccacctcctccttgtacctctggtagagttcggctgtgaatccatctggtcctggactttttttggttggtaagctattgattattgccacaatttcagagcttgtcattggtctattcagagattcaacttcttcctggtttagtcttgggagggtgtatgtgtcgaggaatttatccatttcttctagattttctagtttatttgtgtagaggtgtttgtagtattctctgatggtagtttgtatttctgtgggatcggtggtgatatcccctttatcattttttattgcgtctatttgattcttctctcttttcttctttattagtcttggtagtggtctatcgattttgttgatcttttcaaaaaaccagctcctggactcattaattttttgaagggctttttgtgtctctatttccttcagttctgctctgattttagttatttcttgtcttctgctagcttttgaatgtgtttgctcttgcttttctagttcttttaattgtgatgttagggtgtcaattttggatctttcctgctttctcttgtgggcatttagtgctataaatttccctctacacactgctttgaatgtgtcccagagattctggtatgttttgtctttgttctcattggtttcaaagaacatctttatttctgccttcatttcgttatgtacccagtagtcattcaggagcagatttttcagtttccatgtagttgagcggttttgagtgagtttcttaatcctgagttctagtttgattgcactgtggtctgagagacagtttgttataatttcttttgttttacatttgctgaggagagctttacttccaagtatgtggtcaattttggaataggtgtggtgtggtgctgaaaaaaatgtatattctgttgatttggggtggagagttctgtagatgtctattaggtctgcttggtgcagagctgagttcaattcctgggtatccttgttaactttctgtcttgttgatctgtgtaatgttgacagtggggtgttaaagtctcccattattattgtgtgggagtctaagtctttctgtaggtcactaaggacttgctttatgaatttgggtgctcctgtattgggtgcatatatatttaggatagttagctcttgttgaattgatccctttaccattatgtaatggccgtctttgtctcttttgatctttgttggtttgaagtctgttttatcagagactaggattgcaacccctgcctttttttgttttccatttgcttggtagatcttcctccatccctttattttgagcctatgtatgtctctgcacgtgagatgggttccctgaatacagcacactgatgggtcttgactctttatccaatttgccagtctgtgtcttttaattggagcatttagcccatttacatttaaagttaatatttttatgtgtatttgttcctgtcattatgatattagctggttattttgcttgtcagttgatgcagtttcttcctagccttgacggtctttacattttggcatgtttttgcagcggctggtaccggttgttcctttccatgtttactgcttccttcaggagctcttttagggcaggcctggtggtgacaaaatctctcagcatttgcttgtctttaaaatattttatttctctttcacttatgaagcttagtttggctggatacgaaattctgggtagaaaattcttttctttaagaatgttgaatattggcccccactctcttctggcttgtagagtttctgccgaaagatccgctgttagtctgatgggcttccctttgtgggtaacccgacctttctctctggctgcccttaacattttttccttcatttcaactttggtgaatctgacaattatgtgtcttggagttgctcttctcaaggagtatctttgtggcgttctctgtgtttcctgaatctgaatgttggcctgcctttctagattggggaagttctcctggataatatcctgtagagtgttttccaacttggttccattctccccgtcactttcaggtacaccaatgagacgtagatttggtcttttcacatagtcccatatttcttggaggctttgttcgtttctttttattcttttttctctaaacttctcttctcgcttcttttcattcatttcatcttccgtcactgataccctttcttccagttgatcgcatcggctcctgaggcttcggcattcttcatgtagttctcgacccttggctttcagctccatcagctcctttatggacttctctgcattggttattctagttatccattagtctaattttttttcacagtttttaacttctttgccattggtttgaatttcctcctgtagcttggagtaggttgatcatctgaagccttcttctctcagctcgtcaaagtcattctccatccagctttgttccgttgctggtgaggagctgcgttcctttggaggaggagaggcattctgctttttagagtttccagtttttctgctctgttttttccccatctttgtggttttatctacttttggtctttgatgatggtgacgtacagaagggtttttggtatggatgtcccttctgtttgttagttttccttctaacagacaggaccctcagctgcaggtctgttggagtttgctagaggtccactccagaccctgtttgcctgcgtatcagcagtgatggctgtagaacagtggatcttggtgaaccgcaaatgctgctgcctgatcgttcctctggaagttttgtctcagaggagtaccgggccgtgtgaggtgtcagtctgcccctaccggggggtgcctcccagttaggctgcttgggggtcaaggacccacttgaggaggcagtctgcccgttctcagatctccagccacgtgctgggagaaaaccactactctcttcaaagctgtcagacagggacatttaagtctgcagaggttactgctgtctttttgtttgtctgtgccctgcccccagaggtggagcctacagaggcaggcaggcctccttgagctgtggtgggctccacccagttggagcttcccggctgctttgtttacctaatcaagcctgggcaatggcaggtgcccctcccccagcctcactgccgccttgcagtttgatctcagactgctgtactagcaatcagcgcgactccgtgggcctaggatcctccgagccaggtgcggggtataatctccttgtgtgtcgttttttaagcccgttggaaaagcgcagtattagcgtgggagtgacccgattttccaggtgcggtctgtcacccctttctttgactaggaaagggaactccctgaccccttgcacttcccgagcgaggcgatgcctcgccttgcttcggctcgcgcaaggtgcgctgcacccactgtcctgcgcccactgtctggcaccccctagtgagatgaacctggtacctcagatggaaatgcagaaatcacc

SEQ ID NO: 10313 - DNA, 5452 bp, Homo sapiens
ttttattttattttattttattttattttattttatttatttatttatttattattattatactttaagttttagggtacatgtgcacaatgtgcaggttagttacatatgtatgcatgtgccatggtggtgcgctgcacccactaactcgtcatctagcattaggtatatctcccaatgctatccctcccccctccccccaccctacaacagtccccagagtgtgatgttccccttcctgtgtccatgtgttctcattgttcaactcccacccatgagtgagaatatgcggtttttggttttttgttcttgcgatagtttactgagaatgatgatttccaatttcatgcatgtccctacaaaggacatgaactcatcattttgtatggctgaatagtattccatggtgtatatgtgccacattttcttaatccagtctatcattgttggacgtgtgggttggttccaagtctttgctattgtgaataatgccgcaataaacatacatgtgcatgtgtctttatagcagcatgatttatagtcctttgggtatatacccagtaatgggatggctgggtcaaatggtatttctagttctagatccctgaggaatcgccacactgacttccacaatggttgaactagtttacagtcccaccaacagtgtaaaagtgttcctatttctccatatcctctccagcacctgttatttcctgactttttaatgattgccattctaactggtgtgaaatggtatctcattgtggttttgatttgcatttctctgatggccagtgatggtgagcattttttcatgtgttttttggctgcataaatgtcttcttttgagaagtgtctgttcatgtcctttgcccactttttgatggggttgtttgtttttttcttgtaaatttgtttgagttcattgtagattctggatattagccctttgtcagatgagtaggttgtgaaaattttctcccattttgtaggttgcctgttcactctgatggtagtttcttttgctgtgcagaagctctttagtttaattagatcccatttgtcaattttggcttttgttgccattgcttttggtgttttagacatgaagtccttgcccatgcctatgtcctgaatggtaatgcctaggttttcttctagggtttttatggttttaggtctaacgtttaagtctttaacccatcttgaattaatttttgtataaggtgtaaggaaaggatccagtttcagctttctacatatggctagccagttttcccagcaccatttattaaatagggaatcctttccccattgcttgtttttgtcaggtttgtcacagatcagatagttgtagatatgcggcgttatttctgagggctctgttctgttccattgatctatatctctgttttggtaccagtaccatgcttttttggttattgtagccttgtagtatagtttgaagtcaagtagtgtgacgcctccagctttgttcttttggcttaggattgacttggcgatgcgggctcttttttggttccatatgaactttaaagtagttttttccaattctgtgaagaaagtcattggtagcttgatggggatggcactgaatctgtaaattaccttgggcagtatggccattttcacgatattgattcttcctacccatgagcatggaatgttcttccatttgtttgtatcctcttttatttccttgagcagtggtttttagttctccttgaagaggtccttcacatcccttgtaagttggatttctaggtattttattctctttgaagcaattgtgaatgggagttcactcatgatttggctctctgtttgtctgttggtgtataagaatgcttgtgatttttgtacattgattttgtatcctgagactttgctgaagttgcttatcagcttaaggagattttgggctgagacaatggggttttctagatatacaatcatgtcgtctgcaaacaggtacaatttgacttcctcttttcctaattgaatgccctttatttccttctcctgcctcattgccctggccagaacttccaacactatgttgaataggagtggtgagagagggcatccctgtcttgtgccagttttcaaagggaatgcttccagtttttgcccattcagtatgatattggctgtgggtttgtcatagatagctcttattattttgagatatgtcccatcaatacctaatttattgagagtttttagcatgaagggttgttgaattttgtcaaaggccttttctgcatctgttgagataatcatgtggtttttatctttggttctgtttatatgctggattacatttattgatttgcgtatattgaaccaggcttgcatcccagggatgaagcccacttgatcatggtggataagctttttgatgtgctgctggattcagtttgccagtattttattgaggatttttgcatcaatgttcatcaaggatattggtctaaaattctcttttttggttgtgtctctgcccggctttggtatcaggatgatgctggcctcataaaatgagttagggaggatttactctttttctattgagtggaatagtttcaaaaggaatggtaccagttcctccttgtacctgtggtagaatttggctgtgaatccatctggtcctggactctttttggttggtaagctattgattattgccacaatttcagctcctattattggtctattcagagattcaacttcttcctggtttagtcctgggagagtgtatatgtcaaggaatttatccatttcttctagattttctagtttatttgcatagaggtgtttgtagtattctcttatggtagtttgtatttctgtggaattggtggtgatatcccctttatcattttttattgctcctatttgattcttctctctttttttctttattagtcttgctagcggtctatcaattttgttgatcctttcaaaaaaccagctcctggattcgttaattttttgaagggttttttgtgtctctatttccttcagttctgctctgatcttagttatttcttgccttctgctagcttttgaatatgtttgctcttgcttttctagttcttttaattgtgatgttagggtgtcaattttggatctttcctgctttctcttgtgggcatttagtgctataaatttccctctacacactgctttgaatgtgtcccagagattctggtatgttgtgtctttgttctcgttggtttcaaagaacatctttatttctgccttcatttcgttatgtacccagtagtcattcaggagcaggttgttcagtttccatgtagttgagtggttttgagtgagattcttaatcctgagttccagtttgattgcactgtggtctgagagatagtttgttataatttctgttcttttacatttgctgaggagagctttacttccaactatgtggtcaattttggaataggtgtggtgtggtgctgaaaaaaatgtatattctgttgatttggggtggagagttctgtagatgtctattaggtctgcttggtgcagagctgagttcaattcctgggtatccttgttgactttctgtctcgttgatctgtctaatgttgacagtggggtgttaaagtctcccattattaatgtgtgggagtctaagtctccttataggtcactcaggacttgctttatgaatctgggtgctcctgtattgggtgcatatatatttaggatagttagctcttcttgttgaattgatccctttaccattaagtaatggccttctttgtctcttttgatctttgttggtttaaagtctgttttatcagagactaggattgcaaccccttcctttttttgttttccattttcttggtagatcttcctccatccttttattttgagcctatgtgtgtctctgcccatgagatgggtttcctgaatacagcacactgatgggtcttgactctttatccaatttgacagtctgtgtcttttaattggagcatttagtccattgacacttaaagttaatattgttatgtgtgaatttgatcctgtcattatgatgttagctggttgttttgcttgttagttgatgcagtttcttcctagtctcgatggtctttacattttggcatgattttgcagcggctggtaccggttgttcctttccatgtttagtgcttccttcaggagctcttttagggcaggcctggtggtgacaaaatctctcagtatttgcttgtctgtaaagtattttatttctcctttacttatgaagtttagtttggctggatatgaaattctgggttgaaaattcttttctttaagaatgttgaatattggcccccactctcttctggcttgtagagtttctgccgagagatctgctgttagtctgatgggcttccctttgagggtaacccgacctttctctctggctgcccttaacattttttccttcatttcaactttggtgaatctgacaattatgtgtcttggtgttgctcttctcgaggagtatctttgtggcgttctctgtatttcctgaatctgaatgttggcctgccttgctagattggggaagttctcctggataataccctgcagagtgttttccaacttggttccattctccccgtcactttcaggtacaccaatcagacgtagatttggtcttttcacatagtcccatatttcttggacgctttgctcgtttctttttattcttttttctctaaacttcccttctcccttcattttattcatttcatcttccatcacttataccctttcttccagttgatcacatcagctcctgaggcttctgcattcttcatgtagttctcgagccttggttttcagctccatcagctcctttaagcacttctctgtattggtgattctagttatatattcttctaaatttttttcaaagttttcaacttctttgcctttggtttgaatgtcttcccatagctcggagtaatttgattgtctgaagccttcttctctcagcttgtcaaagtcattctctgtccagctttgttccgttgctggtgaggaactgcattcctttggaggaggagaggcactctgctttttagagtttccagtttttctgctctggtttttctccatctttgtggttttatctacttttggtctttgatgatggtgatgtacagatgggtttttggtgtggatgtcctttctgtttgctagttttctttctaacagacaagaccctcagctgcaggtctgctggagtacccggccgtgtgaggtgtcagtctgcccctgctggggggtgcctcccagttaggctgctcgggggtcaggggtcagggacccacttgaggaggcagtctgcccgttctcagatctccagctgcgtgctgggagaaccactgctctcttcaaagct

SEQ ID NO: 10314 - DNA, 6122 bp, Homo sapiens
tttttctcattttttttttttttttttattatactctaagttttagggtacatgtgcacattgtgcaggttagttacatatgtatacatgtgccatgctggtgcgctgcacccactaatgtgtcatctagcattaggtatatctcccaatgctatccctcccccctcccccgaccccaccacagtccccagagtgtgatattccccttcctgtgtccatgtgatctcattgttcaattcccacctatgagtgagaatatgcggtgtttggttttttgttcttgcgatagtttactgagaatgatggtttccaatttcatccatgtccctacaaaggatatgaactcatcattttttatggctgcatagtattccatggtgtatatgtgccacattttcttaatccagtctatcattgttggacatttgggttggttccaagtctttgctattgtgaatagtgccgcaataaacatacgtgtgcatgtgtctttatagcagcatgatttatagtcctttgggtatatacccaataatgggatggctgggtcaaatggtatttctagttctagatccctgaggaatcgccacactgacttccacaatggttgaactagtttacagtcccaccaacagtgtaaaagtgttcctatttctccacatcctctccagcacctgttgtttcctgactttttaatgattgccattctaactggtgtgagatgatatctcatagtggttttgatttgcatttctctgatggccagtgatgatgagcatttcttcatgtgttttttggctgcataaatgtcttcttttgagaagtgtctgttcatgtccttcgcccactttttgatggggttgtttgtttttttcttgtaaatttgtttgagttcattgtagattctggatattagccctttgtcagatgagtaggttgcaaaaattttctcccatgttgtaggttgcctgttcactctgatggtagtttcttttgctgtgcagaagctctttagtttaattagatcccatttgtcaattttggcttttgttgccattgcttttggtgttttggacatgaagtccttgcccacgcctatgtcctgaatggtaatgcctaggttttcttctagggtttttatggttttaggtctaacgtttaaatctttaatccatcttgaattgatttttgtataaggtgtaaggaagggatccagtttcagctttctacatatggctagccagttttcccagcaccatttattaaatagggaatcctttccccattgcttgtttttctcaggtttgtcaaagatcagatagttgtagatatgcggcattatttctgagggctctgttctgttccattgatctatatctctgttttggtaccagtaccatgctgttttggttactgtagccttgtagtatagtttgaagtcaggtagtgtgatgcctccagctttgttcttttggcttaggattgacttggcgatgcgggctcttttttggttccatatgaactttaaagtagttttttccaattctgtgaagaaagtcattggtagcttgatggggatggcattgaatctgtaaattaccttgggcagtatggccattttcacgatattgattcttcctacccatgagcatggaatgttcttccatttgtttgtgtcctcttttatttccttgagcagtggtttgtagttctccttgaagaggtccttcacatcccttgtaagttggattcctaggtattttattctctttgaagcaattgtgaatgggagttcactcatgatttggctctctgtttgtctgttgttggtgtataagaatgcttgtgatttttgtacattgattttgtatcctgagactttgctgaagttgcttatcagcttaaggagattttgggctgagacgatggggttttctagataaacaatcatgtcgtctgcaaacagggacaatttgacttcctcttttcctaattgaataccctttatttccttctcctgcctgattgccctggccagaacttccaacactatgttgaataggagcggtgagagagggcatccctgtcttgtgccagttttcaaaaggaatgcttccagtttttgcccattcagtatgatattggctgtgggtttgtcatagatagctcttattattttgaaatacgtcccatcaatacctaatttattgagagtttttagcatgaagggttgttgaattttgtcaaaggctttttctgcatctattgagataatcatgtggtttttgtctttggctctgtttatatgctggattacatttattgatttgcgtatattgaaccagccttgcatcccagggatgaagcccacttgatcatggtggataagctttttgatgtgctgctggattcagtttgccagtattttattgaggatttttgcatcaatgttcatcaaggatattggtctaaaattctcttttttggttgtgtctctgcccggctttggtatcagaatgatgctggcctcataaaatgagttagggaggattccctctttttctattgattggaatagtttcagaaggaatggtaccagttcctccttgtacctctggtagaattcggctgtgaatccatctggtcctggactctttttggttggtaaactattgattattgccacaatttcagatcctgttattggtctattcagagattcaacttcttcctggtttagtcttgggagagtgtatgtgtcgaggaatgtatccatttcttctagattttctagtttatttgcgtagaggtgtttgtagtattctctgatggtagtttgtatttctgtgggatcggtggtgatatcccctttatcattttttattgtgtctatttgattcttctctctttatttctttattagtcttgctagtggtctatcaattttgttgatcctttcaaaaaaccagctcctggattcattgattttttgaagggttttttgtgtctctatttccttcagttctgctctgattttagttatttcttgccttctgctagcttttgaatgtgtttgctcttgcttttctagttcttttaattgtgatgttagggtgtcaattttggatccttcctgctttctcttgtaggcatttagtgctataaatttccctctacacactgctttgaatgcgtcccagagattctggtatgtggtgtctttgttctcgttggtttcaaagaacatctttatttctgccttcatttcgttatgtacccagtagtcattcaggagcaggttgttcagtttccatgtagttgagcggctttgagtgagattcttaatcctgagttctagtttgattgcactgtggtctgagagatagtttgttataatttctgttcttttacatttgctgaggagagctttacttccaactatgtggtcaattttggaataggtgtggtgtggtgctgaaaaaaaatgtatattctgttgatttggggtggagagttctgtagatgtctattaggtctgcttggtgcagagctgagttcaattcctgggtatccttgttgactttctgtctcgttgatctgtctaatgttgacagtggggtgttaaagtctcccattattaatgtgtgggagtctaagtctctttgtaggtcactgaggacttgctttatgaatctgggtgctcctgtattgggtgcataaatatttaggatagttagctcctcttgttgaattgatccctttaccattatgtaatggccttctttgtctcttttgatctttgttggtttaaagtctgttttatcagagactaggattgcaacccctgcctttttttgttttccattggcttggtagatcttcctccatccttttattttgagcctatgtgtgtctctgcacgtgagatgggtttcctgaatacagcacactgatgggtcttgactctttatccaacttgccagtctgtgtcttttaattgcagaatttagtccatttatatttaaagttaatattgttatgtgtgaatttgatcctgtcattatgatgttagctggtgattttgctcattagttgatgcagtttcttcctagtctcgatggtctttacattttggcatgattttgcagcagctggtactggttgttcctttccatgtttagcgcttccttcaggagctcttttagggcaggcctggtggtgacaaaatctctcagcatttgcttgtctataaagtattttatttctccttcacttatgaagcttagtttggctggatatgaaattctgggttgaaaattcttttctttaagaatgttgaatattggcccccactctcttctggcttgtagggtttctgccgagagatccgctgttagtctgatgggctttcctttgagggtaacccgacctttctctctggctgcccttaacattttttccttcatttcaactttggtgaatctgacaattatgtgtcttggagttgctcttctcgaggagtatctttgtggcgttctctgtatttcctgaatctgaacgttggcctgccttgctagattggggaagttctcctggataatatcctgcagagtgttttccaacttggttccattctccacatcactttcaggtacaccaatcagacgtagatttggtcttttcacatagtcccatatttcttggaggctttgctcatttctttttattcttttttctctaaacttcccttctcgcttcatttcattcatttcatcttccattgctgataccctttcttccagttgatcgcatcggctcctgaggcttctgcattcttcacgtagttctcgagccttggttttcagctccatcagctcctttaagcacttctctgtattggttattctagttatacattcttctaaatttttttcaaagttttcaacttctttgcctttggtttgaatgtcctcccgtagctcagagtaatttgatcgtctgacgccttcttctctcagctcgtcaaaatcattctccatccagctttgttctgttgctggtgaggaactgcgttcctttggaggaggagaggcgctctgcgttttagagtttccagtttttctgttctgttttttccccatctttgtggttttatctacttttggtctttgatgatggtgatgtacagatgggttttcggtgtagatgtcctttctggttgttagttttccttctaacagacaggaccctcagctgcaggtctgttggaataccctgccgtgtgaggtgtcagtgtgcccctgctggggggtgcctcccagttaggctgctcgggggtcaggggtcagggacccacttgaggaggcagtctgcccgttctcagatctccagctgcgtgctgggagaaccactgctctcttcaaagctgtcagacagggacacttaagtctgcagaggttactgctgtctttttgtttgtctgtgccctgcccccagaggtggagcctacagaggcaggcaggcctccttgagctgtggtgggctccacccagttcgagcttcccggctgctttgtttacctaagcaagcctgggcaatggcgggcgcccctcccccagcctcgttgccgccttgcagtttgatctcagactgctgtgctagcaatcagcgagattccgtgggcgtaggaccctctgagccaggtgtgggatatagtctcgtggtgcgccgtttcttaagccggtctgaaaagcgcaatattcgggtgggagtgacccgattttccaggtgcgtccgtcacccctttctttgactcggaaagggaactccctgaccccttgtgcttcccaggtgaggcaatgcctcgccctgcttcggctcgcgcacggtgcgcacacacactggcctgcgcccactgtctggcactccctagtgagatgaacccggtacctcagatggaaatgcagaaatcacccgtcttctgcgtcgctcacgctgggagctgtagaccggagctgttcctattcggccatcttggctcctcccctgattgtgcattttagcctgggcaacagagcgacaccctgtctcaaaaaaaaaaaaaaaaaaaaaaaaaagaagaa

SEQ ID NO: 10315 - DNA, 6045 bp, Homo sapiens
ttttttttcctttcttttttttttttttattatactttaagttttagggtacatgtgcacattgtgcaggttagttacatacgtatacaagtgccatgctggtgcgctgcacccactaactcatcatctagcattaggtatatctcccagtgctatccctccaccctcccccaaccccacaacagtccccagagtgtgatattccccttcctgtgtccatgtgatctcattgttcaattcccacctatgagtgagaatatgcggtgtttggttttttgttcttgtgatagtttactgagaatgatgatttccaatttcatccatgtccctacaaaggacatgaactcatcattttttatggctgcatagtattccatggtgtatatgtgccacattttcttaatccagtctatcattgatggacatttgggttggttccaagtctttgctattgtgaataatgccgcaataaacatacgtgtgcatgtgtctttatagcagcatgatttatagtcctttgggtatatacccagtaatgggatggctgggtcaaatggtatttctagttctagatccctgaggaatcgccacactgacttccacaatggttgaactagtttacagtcccaccaacagtgtaaaagtgttcctatttctccacatcctctccagcacctgttgtttcctgactttttaatgattgccattctaactggtgtgagatggtatctcattgtggttttgatttgcatttctctgatggccagtgatgatgagcatttttcatgtgttttttggctgcataaatgtcttcttttgagaagtgtctgttcatgtctttgcccactttttgatggggttgcttgtttttttcttctaaatttgtttgagttcattgtagattctggatattagccctttgtcatatgagtatgttgcgaaaattttctcccattttgtaggttgcctgttcactctgatggtagtttcttttgctgtgcagaaactctttagtttaattagatcccatttgtcaattttgtcttttgttgccattgcttttggtgttttagacatgaagtccttgcccatgcctatgtcctgaatggtaatgcctaggttttcttctaaggtttttatggttttaggtctaacgtttaagtctttaatccatcttgaattgatttttgtataagttgcaaggaagggatccagtttcagctttctacatatggctagcctgttttcccagcaccatttattaaatagggaatcctttccccactgcttgtttttctcaggtttgtcaaagatcagatagttgtagatatgcggcattatttctgagggctctgttatgttccattgatctatatctctgttttggtaccagtaccatgctgttttggtgactgtagccttgtagtatagtttgaagtcaggtagtgtgatgcctccagctttgttcttttggcttaggattgacttggcgatgcgggctcttttttggttccatatgaactttaaagtagttttttccaattctgtgaagaaaggcattggtagcttgatggggatggcattgaatctgtaaattaccttgggcagtatggccattttcacgatattgattcttcctacccataagcatggaatgttattccatttgtttgtatcctcttttatttccttgagcagtggtttgtagttctccttgaagaggtccttcacgtcccttgtaagttggattcctaggtattttattctctttgaagcaattgtaaatgggagttcactcatgatttggctctctgtttgtctgttgttggtgtataagaatgcttgtgatttttgtacattgattttgtatcctgagactttgctgaagttgcttatcagcttaagcagattttgggttgagacagtggggttttctagatatacaatcatgtcatctgcaaacagggacaatttgatttcctcttttcctaattgaataccctttatttccttctcctgcctaattgccctggccagaacttccaacactatgttgaataggagtggtgagagagggcatccctgtcttgtgctagttttcaaagggaatgcttccagttcttgcccattcagtatgatattggctgtgggtttgtcatagatagctcttattattttgaaatacgtcccatcaatacctaatttattgagagtttttagcatgaagggttgttgaattttgtcaaaggctttttctgcatctattgagataatcatgtggtttttgtctttggctctgtttatatgctggattacatttattgatttgcgtatattgaaccagccttgcatcccagggatgaagcccacttgatcatggtggataagctttttgatgtgctgctggattcggtttgccagtattttattgaggatttttgcatcaatgttcatcaaggatattggtctaaaattctcttttttggttgtgtctctgcccagctttggtatcagaatgatgctggcctcataaaatgagttagggaggattccctctttttctattgattggaatagtttcagaaggaatggtaccagttcctccttgtacctctggtagaattcagctgtgaatccatctggtcctggactctttttggttggtaagctattgattattgccacaatttcagctcctgttattggtctattcagagattcaatttcttcctggtttagtcttgggacagtgtatgtgtcgaggaatttatccatttcttctagattttctagtttatttgcgtagaggtgtttgtagtattctctgatggtagtttgtatttctgtgggatcggtggtgatatcccctttatcattttttattgtgtctatttgattcttcactctttttttctttattagtcttgctagcggtttatcaattttgttgatcctttcaaaaaaccagctcctggattcattaattttttgaagagttttttgtgtctctatttccttcagttctgctctgattttagttatttcttgccttctgctagcttttgaatgtgtttgctcttggttttctagttcttttaattgtgatgttagggtgtcaattttggatctttcctgctttctcttgtgggcatttagtgctataaatttccctctacacaatgttttgaatgtgtcccagagattctggtatgttgtgtctttgctctcgttggtttcaaagaacatctttatttctgccttcatttcgttatgtacccagtagtcattcaggagcaggttgttcagtttccatgtagttgagcggttttgagtgagattcttaatcctgagttctagtttgattgcactgtggcctgagagacagtttgttataatctctgttcttttacatttgctgaggagagctttacttccaagtatgtggtcaattttggaataggtgtggtgtggtgctgaaaaaaatgtatattctattgatttggggtggagagttctgtagatgtctattaggtccgcttggtgcagagctgagttcaattcctgggtatccttgttgactttctgtctcgttgatctgtctaatgttgacagtggggtgttaaactctcccactattaatgtgttggagtctaagtctctttgtaggtcactcaggacttgctttatgaatctgggtgctcctgtattgggtgcatatatatttaggatagttagctcttcttgttgtattgatccctttaccattatgtaatggccttctttgtctcttttgatctttgttggtttaaagtctgttttatcagagactaggattgcaacccctgcctttttttgttttccatttgcttggtagatcttcctccatccttttattttgagcctatatgtgtctctgcacgtgagatgggtttcctgaatacagcacactgatgggtcttgactctttatccaatttgccagtctgtgtcttttaattggagcatttagtccatttacatttaaagttaatattgttatgtgtgaatttgatcctgtcattatgatgttagctggtgattttgctcgttagttgatgcagtttcttcctagtctcgatggtctttacattttggcatgattttgcagcggctggtacccgttgctcctttccatgtttagcgcttccttcaggagctcttttagggcaggcctggtggtgacaaaatctctcagcatttgcttgtctgtaaagtattttatttctccttcacttatgaagcttagtttggctggatatgaaattctgggttgaaaattcttttctttaagaatattgaatattggcccccactctcttctggcttgtagggtttctgccgagagatccgctgttagtctgatgggcttccctttgagggtaacccgacctttctctctggctgctcttaacattttttccttcatttcaactttggtgaatctgacaattatgtatcttggagttgctcttctcgaggagtatctctgtggcattctctgtatttcctgaatctgaatgttggcctgccttgctagattggggaagttctcctggataatatcctgcagagtgttttccaacttggttccattctccccatcactttcaggtacaccaatcagacgtagatttggtcttttcacatagtcccatatttcttggaggctttcctcatttctttttattcttttttctctaaacttcccatctcgcttcatttcattcatttcatcttccatcgctgataccctttcttccagttgatcgcatcggctcctgaggcttctgcattcttcacgtagttctcgagccttggttttcagctccatcagctcctttaagcacttctctgtattggttattctagttatacattcttctaaatttttttcaaagttttcaacttctttgcctttggtttgaatgtcctcctgtagctcagagtaatttgatcgtctaaagccttcttctctcagctcgtcaaagtcattctccatccagctttgttccgttgctggtgaggaactgcgttcctttggaggaggagaggcgctctgctttttagagtttccagtttttctgttctgttttttccccatctttgtggttttatctacttttggtctttgatgatggtgatgtacagatgggtttttggtgtggatgtcctttctgtttgttagttttccttctaacagacgggaccctcagctgctggtctgttggaataccctgccgcgtgagatgccagtgtgcccctgctgtggggtgcctcccagttaggctgctcgggggtcaggggtcagggacccacttgaggaggcagtctgcccattctcagatctccagctgcgtgctgggagaaccactgctctcttcaaagctgtcagacagggacatttaagtctgcagaggttactgctgtctttttgtttgtctgtgccctgcccccagaggtggagcctacagaggcaggcaggcctccttgagctgtggtgggctccacccagttcgagcttcctggctgctttgtttacctaagcaagcctgggcaatggcgggcgcccctcccccagcctcgctgccgccttgcagtttgatctcagactgctgtgctagtaatcagcgagactccgtgggcgtaggaccgtacaagccaggtgcgggatataatcttgtggcgcgccccttttttaagccggtcggaaaagcgcagtattccggtgggagtgacccgattttccaggtgcgtccgtcacccctttctttgactcggaaacggaactccctgaccccttgcgcttcccaagtgaggcaatgcctcgccctgcttcggctcgcgcacggtgcgcgcacccactgacctgcgcccactgtctggcactccctagtgagatgaacccggtacctcagatggaaatgcagaaatcacctgtcttccacgtcgctcacgctgggagctgtagaccggagctgttcctattcggccatcttggctcctccct

SEQ ID NO: 10316 - DNA, 4942 bp, Homo sapiens
ttattattatactttaagttctagggtacatgtgcacaatgtgcaggtttgatacataggtatacatgtgccatgttggtttgctgcacccatcaactcatcatttacattaggtatttgtcctaatgctatccctcccccagccccccaacccctgacaggccccagtgtgtgatgttccccgccctgtgtccaagtgatctcattgttcaattcccacctgtgagtgagaacatgcggtgtttggttttctgtccttgtgatagtttggtcagaatgacggtttccagcttcaaccacgtccctgcaaaggacatgaactcatccctttttatggctgcatagtattccatggtgtatatgtgccacattttcttaatccagtctatcattgatggacatttgggttggttccaagtctttgctattgtgaatagtgctgcaataaacatatgtgtgcatgtgtctttatagtagcatgatttataatcctttaggtatatacccagtaacaagatggctgggtcaaatggtaattctagttctagatccttgaggaatcgccactgtcttccacaatggttgaactaatttacactcccaccaacagtgtaaaagcgttcctatttctccacatcctttccagcatctcttgtttcctgactttttaatgattgccattctaactggtgtgagatggtatctcactgtggttttgatttgcatttctctgatgaccagtgatgatgagcattttttcatgtatctgttggctgcataaatgtcttcttctgagaagtgtctaattcatatcctttgcccactttttcatgaggttgtttttttcttgtaaatttgtttgagttctttgtagattctggatattagccctttgtcggatgggttgattgcaaaaattttctcccattctgtaggttgcctgttctctctgatggtagtttcttttgccatgcagaagctctttagtttaattagatcccatttgtcagttttggcttttcttgccattgcttttggtgttttcgtcatgcagtccttgcccatgcctgtgtcctgaatggtactgcctaggttttcttctagggtttttatggttttagttctaacatgtaagtctttaatccatcttgaattaatttttgcataaggtataaggaagggatccagtttcagctttctacatatggctagcctgttttcccagcgcaccatttattaaatagggaatcctttccccatttcttgtttttgtcaggtttgtcaaagatcagatggttgtagatgtgtggtgttatttctgaggcctctgttctgttccattggtctatatctctgttttggtaccagtaccatgctgtttgggttactgtagccttgtagtatagtttgaagtcaggtagcgtgatgtctccagctttattcttttggcttaggattgtcttggcaatgcaggctctttttcggttccatatgaattttaaagtagttttttccaattgtgtgaagaaagtcatcggtagcttgatggggatggcattgaatctataaattactttgggcagtatggccattttcacgatattgattcttcctatccatgagcatggaatatgcttccatttgtttgtgtcctcttttatttccttgggcagtggtttgtagttctccttgaagaggtccttcacattccttgtaagtttgattcctaggtattttattctctttgtagcaattgcaaatgggagttctctcatgatttggctctctgtctgttaatggagtataggaatgcttgtgatttttgcacattgattttgtatcctgagactttcctgaatttgcttatcagtttaaggagattttgggctgagacgatggggttttctaaatatacaatcatgtcatctgcaaacagagacaatttgacttcctcattttctaattgaataccctttatttctttctcttgcctgactgccctggtcagaacttccaacactatgttgaacaggagtggtgacagagggcatccttgtcttgtgccggttttcaaagggaatgcttccagtttttgcccattcagtatgatattggctgtgggtttgtcataaatagttcttattattttgagatacattccatcaatacctagtttattgagagtgtttagcatgaagggctgttgaattctgtcgaaggccttttctgcatctattgagataatcatgtggtttttgtcattagttctgtttatgtgatggattatgtttattgatttgcatatgttgaaccagccttgcatcctagggatgaagctgacttgatcatggtggataaactttttgatgtgctgctggattcggtttgccagtattttattgaggatttttgcatcaatgttcatcagggatactggtctgaaattctctttttttgttgtgtctctgccaggctttggtatcaggatgatgctggcctcataaaatgcgttagggaggattccctctttttctattgattggaatagtttcagaaggaatggtaccagctcctctttgtacctctggtagaattcagctgtgaatccatctggtcctggactttttttggttggtaggctattacttactgcctcaatttcagagcctattattggtctattcagagattcaaattcttcctggtttagtcttgggagggtgtatgtgtccaggaatttatccatttcttctagattttctagtttatttgcgtagaggtgtttatagtattctctgatggtagtttgtatttctgtgggatcggtgctgatatcccctttatcattttttattgcatctatttgattcttctctcttttcttctttattagtcttgctagccgtacatctattttgttgatcttttcaaaaaacgagctcctggattcattggttttttgaagggtttttttgtatctctatctccttcagttctgctccgattgtagttatttcttgccttttgctagctttcgaatgtgtttgctcttcattctctcgttcttttaattgtgatgttagggtgtcgattttagatctttcctgctttctcttgtgggcatttagtgctataaatttccctgtacacaccgctttaaatgtgtcccagagattctggtatgttgtgtctttgttctcattggtttcaaagaacatctttatttctgccttcatttcgttatttacctagtagtcactcaggagcaagttgttcagtttccatgtacttgtgcagttttgagtgagtttcttaatcctgagttctaatttgattgcactgtggtctgagagacagtttgttgtgatttttgttcctttacatttgctgaggagtgctttacttccaactatgtggtcaactacagaataagtgtgatgtggtgctgagaagaatgtatattctgttgatttaggatggagagttctatagatgtctattaagtctgcttgttgcagagctgagttcaggtcctggatatgcttgttaaccttctgtctcgttgatctgtctaatattgacagtggggtgttaaagtctcccattattattttgtgggagtctaagtctctttgtaggtctctaaggacttgctttatgaatctgggtgctcctgtattgggtgcacatatacttaggatacttagctcttcttgttgaattgatccctttaccattatgtaatggccttctttgtctcttttgatctttgttggttcaaagtctgttttatctgagactaggattgcaagccctactttttttttttgctttccatttgcttggtagatcttcctccatccctttattttgagcctatgtgcatctttgcatgtgagatgggtctcctgaatacagcacactgatggatcttgactctttatccaatttgccagtctgtgtcttttaattagagcatttagtccatttacatttaaggttaatattgttatatgtgaatttgatcctatcattatgatgttagctggctactttgcccgttaattgatgcagtttcttcatagcatcaatggtctttacaatttggcatgtttttgcagtggctggtaccggttgtttctttccacgtttagtgcttccttcaggagctcttgtaaggcaggcctggtggtgacaaaatctcttggcatttgcttgtctgtaaagtattttatttctccttcagttatgaagcttagtttggctggatatgaaattctgggttgaaaactcctttctttaagaatgttgaatattggctcccactctcttctggcttgtaggtttctgccaagaaatctgctgttaatatgatgggcttccttttctgggtaacctgacctttctctctggctgcccttaacaccttttccttcatttcaaccttggtgaatctgacaattatgtgtcttggggttgctcttcttgaggagtatttttgtggtgttctctgtatttcctgaatttgaatgttggcctgccttgctaggttggggaagttctcctgaataatatcgtgaagagtgttttccaacttggttccattcttcccatcactttcaggtacaccaatcaaacgtaaatttggtcttttcacatagtcccatatttcttggaggctttcttcttttctttttactctttttttctctaacctggtcttctcacttaatttcattaatttgatcttcagtcactgataccctttcttccacttgatcgaattggctattgaagcttgtgcatgcatcatgaagttctcgtgccatggttttcagctgcatcaggtcatttaaggtcttctctacactgtttattctagttagccattcgtctaatcttttttcaaggtttttagcttccttgcgatgggttcgaatat

SEQ ID NO: 10317 - DNA, 5415 bp, Homo sapiens
tttttttttttttttaatactttaagttttagggtacatgtgcacattgtgcaggttagttacatatgtatacatgtgccatgctggtgcgctgcacccactaactcgtcatctagcattaggtatatctcccaatgctatccctcccccctccccccaccccaccacagtccccagagtgtgatattccccttcctgtgtccatgtgatctcattgttcagttcccacctatgagtgagaatatgcggtgtttggttttttgttcttgcgatagtttactgagaatgatggtttccaatttcatccatgtccctacaaaggacatgaactcatcattttttatggctgcatagtattccatggtgtatatgtgccacattttcttaatccagtctatcattgttggacatttgggttggttccaagtctttgctattgtgaataatgccgcaataaacatacgtgtgcatgtgtctttatagcagcaggatttatagtcatttgggtatatacccagtaatgggatggctgggtcaaatggtatttctagttctagatccctgaggaatcgccacactgacttccacaatggttgaactagtttacagtcccaccaacagtgtaaaagtgtttgtatttctccacatcctctccagcacctgttgtttcctgactttttaatgattgccattctaactggtgtgagatgatatctcaatagtggttttgatttgcatttctctgatggccagtgatgatgagcattttttcatgtgttttttggctgcataaatgtcttcttttgagaagtgtctgttcatgtccttcacccactttttgatggggttgtttgttttttttcttgtaaatttgtttgagttcattgtagattctggatattagccctttgtcagatgagtaggttgcaaaaattttctcccatgttgtagtttgcctgttcactctgatggtagtttcttttgctgtgcagaagctctttagttttatgagatcccatttgtcaattttggcttttgttgccattgcttttggtgttttggacatgaagtccttgcccacgcctatgtcctgaatggtaatgcctaggttttcttctagggtttttatggttttaggtctaacgtttaaatctttaatccatcttgaattgatttttgtataaggtgtaaggaagggatccagtttcagctttctacatatggctagccagttttcccagcaccatttattaaatagggaatcctttccccattgcttgtttttctcaggtttgtcaaagatcagatagttgtaggtatgtggcattatttctgagggctctgttctgttccattgatctatatctctgttttggtaccagtaccatgctgttttggttactgtagccttgtagtatagtttgaagtcaggtagtgtgatgcctccagctttgttcttttgccttaggattgacttggcgatgcgggctcttttttggttccatatgaactttaaagtagttttttccaattctgtgaagaaagtcattggtagcttgatggggatggcattgaatctgtaaattaccttgggcagtatggccattttcacgatattgattcttcctacccatgagcatggaatgttcttccatttgtttgtatcctcttttatttccttgagcagtggtttgtagttctccttgaagaggtccttcacatcccttgtaagttggattcctaggtattttattctctttgaagcaattgtgaatgggagttcactcatgatttggctctctgtttgtctgttgttggtgtataagaatgcttgtgatttttgtacattgattttatatcctgagactttgctgaagttgcttatcagcttaaggagattttgggctgagacgatggggttttctagataaacaatcatgtcatctgcaaacagggacaatttgacttcctcttttcctaattgaataccctttatttccttctcctgcctgattgctctggccagaacttccaacactatgttgaataggagtggtgagagagggcatccctgtcttgtgccagttttcaaagggaatgcttccagtttttgcccattcagtatgatattggctgtgggtttgtcatagatagctcttattattttgagatacgtcccatcaatacctaatttattgagagtttttagcatgaagggttgttgaattttgtcaaaggctttttctgcatctattgagataatcatgtggtttttgtctttggctctgtttatatgctggattacatttattgatttgcgtatattgaaccagccttgcatcccagggatgaagcccacttgatcatggtggataagctttttgatgtgctgctggattcggtttgccagtattttattgaggatttttgcatcaatgttcatcaaggatattggtctaaaattctcttttttggttgtgtctctgcccggctttggtatcagaatgatgctggcctcataaaatgagttagggaggattccctctttttctattgattggaatagtttcagaaggaatggtaccagttcctccttgtacctctggtagaattcggctgtgaatccatctggtcctggactctttttggttggtaaactattgattattgccacaatttcagctcctgttattggtctattcagagattcaacttcttcctggtttagtcttgggagagtgtatgtgtcgaggaatgtatccatttcttctagattttctagtttatttgtgtagaggtgtttgtagtattctctgatggtagtttgtatttctgtgggattggtggtgatatcccctttatcattttttattgtgtctatttgattcttctctctttttttctttattagtcttgctagcggtctatcaattttgttgatcctttcaaaaaaccagctcctggattcattgattttttgaagggttttttgtgtctctatttccttcagttctgctctgattttagttatttcttgccttctgctagcttttgaatgtgtttgctcttgcttttctagttcttttaattttgatgttagggtgtcaattttggatctttcctgctttctcttgtggggatttagtgctataaatttccctctacacactgctttgaatgcgtcccagagattctggtatgttgtgtctttgttctcgttggtttcaaagaacatctttatttctgccttcatttcgttatgtacccagtagtcattcaggagcaggttgttcagtttccatgtagttgagcggctttgagtgagattcttaatcctgagttctagtttgattgcactgtggtctgagagatagtttgttataatttctgttcttttacatttgctgaggagagctttacttccaactacgtggtcaattttggaataggtgtggtgtggtgctgaaaaaaatgtatattctgttgatttggggtggagagttctgtagatgtctattaggtccgcttggtgcagagctgagttcaattcctgggtatccttgttgactttctgtctcgttgatctgtctaatgttgacagtggggtgttaaagtctcccattattaatgtgtgggagtctaagtctctttgtaggtcactcaggacttgctttatgaatctgggtgctcctgtattgggtgcatatatatttaggatagttagctcctcttgttgaattgatccctttaccattatgtaatggccttctttgtctcttttgatctttgtgggtttaaagtctgttttatcagagactaggattgcaaccccttcctttttttgttttccatttgcttggtagatcttcctccatccttttattttcagcctatgtgtgtctctgcacgtgagaagggtttcttgaatacagcacactgatgggtcttgactctttatccatttgccagtctgtgtcttttaattggagcatttagcccatttacatttaaggttaatattgttatgtgtgaatttgatcctgtcattatgatgttagctggctattttgttcattagttgatgcagtttcttcctagcatcgatggtgtttacaattgggcatgtttttgcagtggctggtactggttgttcctttccacgtttagcacttccttcaggagctcttttagggcaggcctggtggtgacaaaatcggtcagcatttgcttgtctgtaaagtattttatttctccttcacttatgaagcttagtttggctggatatgaaattctgggttgaaaattcttttctttaagaatgttgaatattggcccccactctcttctggcttgtagggtttctgccgagagatttgctgttagtctgatgggcttccctttgagggtaacccgacctttctctctggctgcccttaacattttttccttcatttcaactttggtgaatctgacaattatgtgtcttggagttgctcttctcgaggagtgtctttgtggcgttctctgtatttcctgaatctgaacgttggcctgccttgctagattggggaagttctcctggataatatcctgcagagtgttttccaacttggttccattctccgcctcactttcaggtacaccaatcagacgtagatttggtcttttcacatagtcccatatttattggaggctttgctcatttctttttattctttttttctctaaacttcccttctcgcttcatttcattcatttcatcttccattgctgataccctttcttccagttgatcgcatcggctcctgaggcttctgcattcttcacgtagttctcgagccttggttttcagctccatcagctcctttaagcacttctctgtattcgttattctagttatacattcttctaaatttttttcaaagttttcaacttctttgcctttggtttgaatgtgctcccgtagctcagagtaatttgatcgtctgaagccttcttctctcagctcgtcaaaatcattctccatccagctttgttccgttgctggtgaggaactgcgttcctttggaggaggagaggcgctctgcgttttagagtttccagtttttctgttctgttttttccccatctttgaggttttctctacttttggtctttgatgatggtgatgtacagatgggttttcggtgtggatgtcctttctgtttgttagttttccttctaacagacaggaccctcagctgcaggtctgttggaataccctgccgtgtgaggtgtcagtgtgcccctgctggggggtgcctcccagttaggctgctcgggggtcaggggtcagggacccacttgaggaggcagtctgcccgttctcagatctccagctgcgtgctgggagaaccactgctctcttcaaagctc

SEQ ID NO: 10318 - DNA, 10554 bp, Homo sapiens
tttttttatgtgttttttttaaattttattattattatactttaagttttagggtacatgtgcacaatgtgcaggttagttacatatgtatacatgtgccttgctggtgtgctgcacccattaactcgtcatttagcattaggtatatctcctaaagctatccctacccccctccccccaacccacaacagtccccagagtgtgatgttccccttcctgtgtccatgtgttctcattgttcaatttccatctatgagtgagaatatgcagtgtttggttttttgttcttgcgatagtttactgagaatgatgatttccatggatgatttcatccatgtccctacaaaggacatgaactcatcattttttatggctgcatagtattccatggtgtatatgtgccacattttcttaatccagtctatcattgttggacatttgggttggttccaagtctttgctattgtgaatagtgccgcaataaacatacgtgtgcatgtgtctttatagcagcatgatttgtagtcctttgggtatatacccagtaatgggatggctgggtcaaatggtatttctagttctagatccctgaggaatcgccacacttacttccacaatggttgaactagtttacagtcccaccaacagtgtaaaagtgttcctatttctccacatcctctccagcacctgttgtttcctgactttttaatgattgccattctaactggtgtgagatggtatctcattgtggttttgatttgcatttctctgatggccagtgatggtgagcattttttcatgtgttttttggctgcataaatgtcttcttttgagaagtgtctgttcatgtcctttgcccactttttgatggggttgtttgtttttttcttgtaaatttgtttgagttcattgtagattctggatattagccctttgtcagatgagtaggttgcgaaaattttctcccattttgtaggttgcctgttcactctgatggtagtttcttttgctgtgcagaagctctttagtttaattagatcccatttgtcaattttggcttttgtcgccattgcttttggtgttttagacatgaagtccttgcccatgcctatgtcctgaatggtaatgcctacgttttcttctagggtttttatgtttttaagtctaacgtttaagtctttaatccatcttgaattaatttttgtataaggtgtaaggaagggatccagtttcagctttctacatatggctagccagttttcccagcaccatttattaaatagggaatgctttccccatttcttctttttgtcaggtttgtcaaagatcagatagttgtagatacacggcgttatttctgagggctctgttctgttccatagatctatatctctgttttggtaccagtaccatgctgttttggttactgtagccttgtagtatagtttgaagtcaggtagtgtgacgcctccagctttgttcttttggcttgggattgacttggtgatgcgggctcttttttggttccatatgaactttgaagtagttttttccaattatgtgaagaaagtcattggtagcttgatggggatggcattgaatctataaattaccttgagcagtatggccattttcacaataatgattcttcctacccatgagcatggaatgtacaccaataatgttcaagctgagagtcaaattgagaatgttattacatttacaaaaactgaaaaaaaattaaaatacctagaaatatatctaactaaggaaatgaaaaaatctttacaaagagaactataaaacgctgttgaaaaaaaccagagatgacgcaaacaagtggaaaaacattccatgttcgtggacttgaagaatcaatactgtaaaaaaaggccattctgcccaatgcaatctacagattcactgctatccctatcaaactaccaatgtcatttttcacagaattagaaaaaaatgattctaaaagtcatatggaaccaaaaaagagcccaattcaccaaaacaatcctaaaccaaaagaataaagctggggacatcacattacccaattttacaatattataaggctacagtaaccaaaataacgtattactggtacaaagacagactcacagaccaatgaaacaggatagagaatccaaaattaagccacacacctatacagtcaccagatcttcgacaaaaccaacaaaaataagcaatggggaaagaaatccttattcaataaatggcgggatagctgactagccacaggctgaagagtgaaactggacctttacctttcaccatatacaagatggattaaagatttaaatgtagacctaaagctataagaatcctagcagagtctctaataaaaatacaaaaaattagctgggtgtggtggtgggatcctgtggttccagctacttgggaggctgaggcaggaggatgcctcaggttcatgcgaacctgggaggcagagcttgcagtgagatcgtgccactgcactccagcctgggcgacagagtgagactctgtctcaaaaaagaaaaaaaatcctggaagaaaacttaggaaacaccattgtggacattggcggcctgagaaagaatttacgactaagtccgcaaaagcaatctcaattaaaacaaaaattgacaaatgggacctaattaaactgaagagcttctgcacaataaaataaacttatcaacagaataaacagacaacctacagaatgggagaaaatatttgcatactatacatttgacaaaggtgtaatatccagaatctgtgaggaactaaaacaattcaataaagacaaataaccctattaaaaagtaggcaaaagacatgaacagatacttttcaaaagaaggcatacaagtggctaacaaacatatgaaaagatgctcaatatcattaatcatcatagaaaggcaaatcagaagcaccatgagataccattttacaccaattggaatggctgttagtcaaaacaaacaaacaaacaaacatggtggtgggactgcagagaaaaaggaatgcttatacactgccggtggggatgtaaattagttcggccattcagtttagagatttctcaaagaatttaaaacaactaccatctgactcagcaatcctatcacaggctatatatccaaaagaaaacaaataattctgccaaagagacacgggcatgcacatattcattgcagcattatttacaatagcaaagatatggaatcaacctaggtgcccatcaatggtggattggataaagaaaatgtagtacatatgcaccgtggaatactacacagccataaaaatgaaatcatatcctttgcaacaacatggatgcaactaggagccattatcctaggcaaattatgcaggaacagaaattcaaatactgtaagttcacacttataagtgagagctaaatattgggtactcatggatataaagatggcaacagtagacactgggggctagtagatgagggaggaaaggagaagggaaagaattgaaaaactgttaggtatcatgctcagtacctgggttatgggattatttgtatcacaaacttcagcatcaagcaatatgcccacgtaacaaaccagcacatgtacctcctcaatctaaagtaaaaattgaaattataaaaaacaataaataaaaactatcaattgttttacacataaaatattttccatctttaccacttttaagtgtatagctcattggaaataaatacctttatataaacataaaattttcccttattcctctcccctacattttctgacctctggtaatgatcattctactctctgtttttatgagatccacttctttagctcctacatatgagtgagaagatgggatatttgtctctctgttcttggcttatttcacttaacataatggttccatccgtgatactgcagatgacaggatttcattatttctcatgtctaaacaacattccattgtgtatatatacaccacattttctttatcgatttgtatgttgatgggcacttaggttgacttcatattttgggtattgtgaataatgctgcaacaaatatgggagtgcacatatccctttgatatattgatttcctttcttttggatatgttccaagtagtagaattgttggatcatatagtagttctatttttagtcttttgaggaacctccataatgttctccataatggatgtactaatttacattcctaccaacagttggacgagggttcctctttctccacattgttgccagcatctgttattgcctgtctttttgatataagccattttaaccggggtaagatgatatctcattgtggttttgatttgcatttctctgatgattagtgatattgggcacttttttcatatacctgttggccatttgcatgtcttcttttgagaattgtctattcagatcttttgcccatttttggttggattatttgttttttttaattgctgttgagttgtttgagatccttatatattctggttattaatcttttgccagacagatagtttgcaaattttttttccattctatgtgtcgtctcttcaccttgttcttacccttgtggcatggaagctttgtaacttttatttatttatttatttatttttttattattatactttaagttttagggtacatgtgcacattgtgcaggttagtaacatacgtatacatgtgccatgctggtgtgctgcacccactaactcgtcatctagcattaggtatatctcccaatgctatccctcccccctccccccaccccacaacagtccccagagtgtgatgttccccttcctgtgtccatgtgatctcattgttcaattcccaccaatgagtgagaatatgcggtgtttggttttttgtttttgcgatagtttactgagaatgatgatttccaatttcatccatgtccctacaaaggacatgaactcatcattttttatggctgcatagtattccatggtgtatatgtgccacattttcttaatccagtctattattgttggacatttgggttggttccaagtctttgctattgtgaataatgccgcaataaacatacgtgtgcatgtgtctttatagcagcatgatttatagtcctttgggtatatacccagtaatgggatggctgggtcaaatggtatttctagttctagatccctgaggaatcgccacacttacttccacaatggttgaactagtttacagtcccaccaacagtgtaaaagtgttcctatttctccacatcctctccagcacctgttgtttcctgactttttaatgattgccattctaactggtgtgagatggtatctcattgtggttttgatttgcgtttctctgatggccagtgatggtgagcattttttcatgtgttttttggctgcataaatgtcttcttttgagaagtgtctgttcatgtcctttgcccactttttgatggggttgtttgtttttttcttgtaaatttgtttgagttcattgtagattctggatattagccctttgtcagatgagtaggttgcaaaaattttctcccattttgtaggttgcctgttcactctgatggtagtttcttttgctgtgcagaagctctttagtttaattagatcccgtttgtcaattttgtcttttgttgccattgcttttggtgttttagacatgacgtcctttcccatgcctatgtcctgaatggtaatgcctaggttttcttctagggtttttatggttttaggtctaacgtttaagtctttaatccatcttgaattgatttttgcataaggtgtaaggaagggatccagtttcagctttctacatatggctagccagttttcccagcaccatttattaaatagggaatcctttccccattgcttgcttttctcaggtttgtcaaagatcagatagttgtagatacacggtgttatttctgagggctctgttctgttccattgatctatatctctgttttggtaccagtaccatgctcttttggttactgtagccttgtagtatagtttgaagtcaggtagtgtgatgcctccagctttgttcttttggcttaggattgacttggtgatgcgggctcttttttagttccatatgaactttaaagtagttttttccaattctgtgaagaaagtcattggtagcttgatggggatggcattgaatctgcaagttaccttgggcagtatggccattttcacgatattgattcttcccacccatgagcatggaatgttcttccatttgtttgtatcctcttttatttccttgagcagcagtttgtagttctccttgaagaggaccttcacatcccttgtaagttggattcctaggtgttttattctctttgaagcaattgtgaatgggagttcactcatgatttggctctctgtttgtctcttgttggtgtataggaatgcttgtgaattttgcacattgattttgtatcctgagactttgctgaagttgcttatcagcttaaggagattttgggctgagacagtggggttttctagatatacaatcatgtcatctgcaaacagggacaatttgacttcctcttttcctaatttaataccctttatttccttctcctgcctaattgccctggccagaacttccaacactatgaataggagtggtgagagagggcatccctgtcttgtgccagttttcaaagggaatccttccagtttttgcccattcagtatgatattggctgtgggtttgtcatagatagctcttattattttgaaatatgtcccatcaatacctaatttattgagagtttttagcatgaaggttgttgaattttgtcagaggccttttctgcatgtattgagataatcatgtggtttttgtctttggctctgtttatatgctggattacatttattgatttgcgtatattgaacctgccttgcatcccagggatgaagcccacttgatcatggtggataagctttttgatgtgctgctggattctgttttccagtattttattgaggatttttgcatcaatgttcatcaaggatattggtctaaaattctcttttttggttgtgaccctgcccggctttggtatcagaatgatgctggcctcataaaatgagttagggaggattccctctttttctattgattggaatagtttcagaaggaatggtaccagttcctccttgtatctctggtagaattcggctgtgaatccatttggtcctggactctttttggctggtaagctattgattattgccacaatttcagctcctgttattggtctattcagcgattcaacttctttctggtttagtcttgggagagtgtatgtgtcaaggaatttatccatttcttctagattttctagtttatttgcacagaggtgtttgtagtattctctgatggtagtttgtatttctgtgggatcagtggtgatatcccctttatcattttttattgcgtctatttgattcttctctcttttttttttattagtcttgctagcggtctatcaattttgttgatcctttcaaaaaaccagctcctggattcattaattttttgaagggtttttttgtgtctctatttccttgagttctgctctgattttagttatttcttgccttctgctagcttttgaatatgtttgctcttgcttttctagttcttttaattgtgatgttagggtgtcaattttggatctttcctgctttctcttgtgggcatttagtgctataaatttccctctacacactgctttgaatgcgtcccagagattctggtatgttgtgtctttgttctcgttggtttcaaagaacatctttatttctgccttcatttcgttatgtacccagtagtcattcaggagcaggttgttcaatttccatgtagttgagcggttttgagtgagattgttaatcctgagttctagtttgattgcactgtggtctgagagatagtttgttataatttctgtttttttacatttgctgaggagagctttacttccaagtatgtggtcaattttagaataggtgtggtgtggtgctgaaaaaaatgtatattctgttgatttggggtggagagttctgtagatgtgtattaggtccgcttggtgcagagctgagttcaattcctgggtatccttgttgactttttgtctcgttgatctgtctaatgttgacagtggggtgttaaagtctcccattattaatgtgtgggagtctaagtctctttgtaggtcactcaggacttgctttatgaatctgggtgctcctgtattgggtgcatatatatttaggatagttagctcttcttgttgaattgatccctttaccattatgtaatggccttctttgtctcttttgatctttgttggtttaaagtctgttttatcagagacgaggattgcaaaccctgccttttttttgttttccatttgcttggtagatcttcctccatccttttattttgagcctatatgtgtctctgcacgtgagatgggtttcctgaatacagcacactgatgggtcttgactctttatccaatttgccagtctgtgtcttttaattggagcatttagtccatttacatttaaagttaatagtgttatgtgtgagtttgatcctgtcattatgatgttagctggttattttgctcgttagttgatgcagtttcttcctagtctcgatggtcgttacattttggcatgattttgcagcggctggtactggttgttcctttccatgtttactgcttccttcaggagctcttttcgggcaggcctggtggtgacaaatctctcagcatttgcttgtctgtaaagtgttttatttctccttcacttatgaagcttagtttggctggatatgaaattctgggttgataattcttttctttaagaaggttgaatattggcccccactctcttctggcttgtagggtttctgccgagagatctgctgttagtctgatgggcttccctttgagggtaacccgacctttctctctggctgcccttaacattttttccttcatttcaactttggtgaatctgacaattatgtgtcttggagttgctcttctcgaggagtatcttcgtggcgttctctgtatttcctgaatctgaactttggcctgccttgctagattggggaaattctcctggataatatcctgcagagtgttttccaacttggttccattctccacatcactttcaggtacaccaatcagacgtagatttggtcttttcacatagtcccatatttcttggaggctttgttcgtttctttttattcttttttctctaaactttccttctcgcttcatttcattcatttcatcttccattgctgataccctttcttccagttgattgcattggctcctgaggcttctgcattcttcacgtagttctcgagccttggttttcagctccatcagctcctttaagcacttctctgtattggttattctagttatacattcttctaaatttttttcaaagttttcaacttctttgcctttgatttgaatgtcctcccgtagctcagagtagtttgatcggctgaagccttcttctctcagctcgtcaaagtcattctccgtccagcttttttccgttgctggtgaggagctgcattcctttggaggaggagaggtgctctgatttttagagtttccagtttttctgttctgttttttccccatctttgtggttttatctgcttctggtctttgatgatggtgatatacagatgggtttttggtgtggatgtcctttctctttgttagttttccttctaacagacaggaccctcagctgcaggtctgttggagtacgctgcagtgtgaggtgtcagtgtgcccctgctgcagagtgcctcccagttaggcttctcgggggtcaggggtcagggacccacttgaggaggcagtctgcccgttctcagatctccagctgcgtgctgggagaaccactgctctcttcaaagctgtcagacagggacatttaagtctgcagaggttactgctgtctttttgtttgtctgtgccctgcccccagaggtggagcctacagattgatctcagactgctgtgctagcaatcagcgagactctgtggggtagaaccctctgagcgaggtgcgggatataatctcatggtgcgccgttttttaagcctgtcggaaaagtgcagtattcaggtgggagtgacccgattctccaggtgccgtccgtcacccctttctttgattaggaaagggaactccctgaccccttgtgcttcccgagtaaggcaatgcctcaccctgcttcggctcacgcatggtgcgcgcacccactgacctgcgcccactgtctggcactcccgagtgaggtgaacctggtacctcagatggaaatgcagaaatcacccgtcttctgtgtcactcaggctgggagctgtagaccggagctgttcctattcggccatcttggctcct

SEQ ID NO: 10319 - DNA, 4915 bp, Homo sapiens
ttttttattgtacttcaagttctaaggtacatgtgcacaacatgcagttttgttacacaggtatacatgtgccatgttggtttgctgcacccatcaactcgtcatttacattaggtatttctcctaatgctatccctccccgagtcccacacccccaagtaggccctggtgtgtgatgttcccgccctgtgtccatgtgttctcattgttcaactcccacctatgagtgggaacatgtgatgtttggttttctgtccttgtgatagtttgcttagaatgatggtttccagcttcatccaggtccctgcaaaggacattaactaatcctctttatggctgcatagtattccatggtgtatgtgtgccacatttccttaatccagtctatcattgatagacatttgggttggtcccaagtctttgctattgtgaatactgccacaataaacatatgtgtgcatgtgtctttatagtagcatgatttataatcctttgggtatatacccaataatgggattggtgggtcaaatggtatttctagttctagatccttgaggaattgccacactgtcttccacaatggttgaactaatttacaccctcaccaacagtgtaaaagcattcctatttcttctccacatcctctctagcatctattgtttcctgactttttaatgatcaccattctaactggtgtgagatggtatctcatcacggatttgatttgcatttctctgatgaccagtgatgatgagcatttttttcaccgatctgttggctgcataaatgtcttcttttgagaagtgtctattcattacctttgcccactttttgatggggttgtttttttcttgtaaatttgtttaagttctttgtagattctggatattagccctttgtcagatgggtagattgcaaagatttcctcccattctgtaggttgcctgttcactctgatgatcatttcttttgctgtgcagaagccctttagtttaattagatcccatttgtcaattttggcttttgttgccattgcttttggtgttttagtcatgaagtctttgcccatgcctatgtcctaaatggtattgcctaggttttcttctatggtttttatggagttaggtcttacatttaagtctttaatccatcttgagttaatatttgtataaggtgtacagaagagatccaggttcagctttctatatatggctagccagttttcccagcaccatttattaaatagggaatcctttccccattgcttgtgtttgtcaggtttgtcaaagatcagatggttgtagatatgcggcattatttctgaggcctctgttctgttccattggtctatatctctgttttggtaccagtaccatgctgttttggttactgtagccttgtagtatagtttgaagtcaggtagtgtgatgcctccagctttgttcttttggcttaggattgacttggcaatgtgggctcttttttggttccatatgaactttaaagtagttttttccaatcctgtgaagaaagtcattggtagcttgatggggatagcattgactctgtgaattactttgggcagtatggccattttcatgatattgattcttcctatccatgagcatggaatgttcttccatttgtttgtgtcctcctttatttcattgagcagtggtttgtagttctccttgaagaggtccttcacatcctttgtaagttggatccctaggtgttttattttctttgtagtaattgtgaatgggagttcactcatgatttggctctctgtttgtctattattggtgtataggatgcttgtgatttttgccattgattttgtatcctgagactttgctgaagttacttatcaacctaaggagattttgggctgagacaatggggttttctaaatatacagtcatgccatctgcaaacagagacaatttgacttcctgttttcctaattgaataccctttatttctttctcttgcctgatttctctaggcagaacttccaacactatgttgaataggagttgtgagagagggcatccttgtcttgtgctgattttcaaagggaatgcttccagtttttgcccattcagtatgatattggctgtaggtttgtcaaaaatagctcttattattttgagatctgttccatcaatacctggtatattgagagtttttagtatgaaaggctgtcgaattttgtcgaaggctttttctgcgtctatggagataatcatgtggtttttgtcattggttctctttatgtgatggattacgtttattgatttgtgtatgttgaaccaaccttgcattccagggatgaagccgacttgattgtggtggataagctttttgatatgctgctggatttggtttgccagtgttttattgaagatttttgcgttgatattcatcaggaatattggcctaaaattctctttttttgttgtgtctctgccaagctttggtatcaggatgaggctagcctcgtaaaatgagttagggaggattccctccttttcttttgattgaaatagtttcagaaggaatggtatcagctcctttttgtacctctggtagaattcggctgtgaatctgtctggtcctggatgttttttggttggtagggcattaattattgcctccatttcagaacctgttattggtctattcagagattcaacttcttcctggtttagtcttaggagggtgtatgtgtccaagaatttatccatttcttctagattttctagtttatttgcgtagaggtgtttatagtattctctgatggtagtttgtatttctgtgggattggtggtgatatcctctttatcattttttgttgtgtctatttgattcttctctcttttcttctttattagtcttgctaggggtctatctattttgttgatcttttcaaaaaaccagctcctggattcactgatttgttgaagggttttttgtgtttctagcccttcagttctgctctgatcttagttatttcttgctttctgctagcttttaagtttgtttgctcttgcttctctagttcttttaattgtgatgttagggtgtcgattttagatctttcctgctttctcttctgggcatttagtgctataaatttccctctacacattgctttaaatgtgtcccagagattctggtatgttgtgtctttgttctcattggtttcaaataacgtctttatttctgccttcattttgttatgtacccagtagtcattcaggagcaggttattcagtttccgtgtagttgtgggggtttgagtgagtttcttaatcctgagctctaatttgattggactgtggcctgagagacagtttgttctgatttctgttcctttacatttgctgaggagtgttttactaccaattgtgtggtcaattttagaataagtgcgatgtggtgatgagaagaatgtatattctcttgatttggggtgtagacttctgtagatgtctattaggtctgcttggtctagagctgagtttgagtcctagataaccttgttaaccttctgtctcgtttatctgtctaataatgatggtggggtgttaaagtctcccattattattgtgtgggagtctaagtctctttgtaagtctctaaggacctgcttcatgaatctgggtgctcctgtattggatgcatatatatttaagatagttagctcttcttgttgaattgatgcctttaccattatgtaatggccttctttgtctcttttgatttttgttggtttaaagtctgttttatcagagactaggattgcaacccttgcttttttttttctttccatttgcttggtagatcttcctccatccctttattttgagcctatgtgcatctttgcacatgagatgggtctctgaatacaacacaccaataggtcttaattctttatccagtttgccagtctgtgtcttttaattggggcatttagcccatttgtatttaaggttaatattgttatgtttgaatttgatcgtgtcattatgatgttagctggttattttgcccgttaattgatgcagtttcttcatagcgttgatggtctttacaattcagcatgtttttgcggtggctggtaccagttgttccttttcatgtttagtgcttccttcaggagctcttgtaagacaggcctgatggtgacaaaatctctcagcatttgcttgtctgcaaaggattttatttctccttcacttatgaagcttagtttggctggatatgagattctgggttcaaaattcttttctttaagaatgttgaatattggcccccactctcttctggcttgcagggtttctgctgagagatctgctgttagtctgataggcttccctttgtgggtaacccaagctttctctctggctgcctgtaatattttttccttcatttcaaccttggtgaatctgacaattatgtgccttgaggttgctcttttcgaggagtatctttgtggtgttctctgtatttcctgaatttgaatgttggcctgccttgctaggctagggaagttctcctggataatatcctgaagggtgttttccaacttggttccattctccccatcactttcaggtataccaatcaaacgtagatttggtcttttcacatagtcccatatttcctggacactttattcatttctttttactcttttttctctaactttgtcttcttgctttatttcattaatttgatcttcgatcactgatatcctttcttccacttgattgaatcggctattgaagcttgtgcatgcgtcacgaagttcttttgccatggttttcagctccatcaggtcatttaaggtcttctctacactgtttattctagttagccattcatctatccttttttcaaggttttt

SEQ ID NO: 10320 - DNA, 18491 bp, Homo sapiens
ttgtatttatttatttatttattattattatactttaagttttagggtacatgtgcacaatgtgcaggttagttacatatgtatacatgtgccatgctggtgcgctgcacccactaactggtcatctagcattaggtatatctcccaatgccatccctcccccgaccccacgaccccacaacagttcccagagtgtgatgttccctttcctgtgtccatgtgttctcattgttcaattcccacctatgagtgagaacatgtggtgtttggttttctgtccttgagatagtttgctcagaatgatggtttccagcttcatccatgttcccacaaaggacataaactcatccttttttatggctgcatagtattgcatggtgtgtatgtgccacattttcttaatccagtctatcattgatggacatttgggttggttccaagtctttgctattgtgaataatgccgcaataaacatacgtgtgcatgtgtctttatagcagcatgatttatagtcctttgggtatatacccagtaatgggatggctgggtcaaatggtatttctagttctagatccctgaggaatcgccacactgactttcacaatggttgaactagtttacagtcccaccaacagtgtaaaagtgttcctatttctccacatcctctccagcacctgttgtttcctgactttttaatgatcgccattctaactggtgtgagatggtatctcattgtggttttgatttgcatatctctgatggccagtgatggtgagcagtttttcatgtgttttttggctgcataaatgtcttcttttgagaagtgtctgttcatgtcctttgcccactttttaatggggttgtttgtttttttcttgtaaatttgtttgagttcgttgtagattctggatattagccctttgtcagatgagtaggttgtgaaaattttctcccattttttaggttgcctgttcactctgatggtagtttcttttgctgtgcagaagctctttagtttaattagatcccatttgtcaattttggcttttgttgccattgcttttggtgttttagacatgaagtccttgcccatgcctatgtcctgaatggtaatgcctaggttttcttctagggtttttatggttttaggtctaacgtttaagtctttaatccatcctgaactgattttcgtataaggtgtaaggaagggatccagtttcagctttctacatatggctagccagttttcccagcaccatttattaaatagggaatcctttccccattgcttgttttcctcaggtttgtcaaagatcagatagttgtagatatgcggcgttatttctgaggcctctgttctgttccattgatctatatctctgttttggtaccagtaccatgctgtttttgttactgtagccttgtagtatagtatgaagtcaggtagtgtgatgcctccagctttgttcttttggcttaggattgacttggcgatgcaggctcttttttggttccatatgaactttaaagtagttttttccagttctgtgaagaaagtcattggtagcttgatggggatggcattgaatctgtaaattaccttgggcagtatggccattttcacaatattgattcttcctacccatgagcatggaatgttcttccacttgtttgtatcctcttttatttccttgagcagtggtttgtagttctccttgaagaggtccttcacatcccttgtaagttggattcctaggtattttattctctttgaagcaattgtgaatgggagttcactcatgatttggctctctgtttgtctgttgttggtgtataagaatgcttgtgatttttgtacattgattttgtatccagagactttgctgaagttgcttatcagcttaaggagattttgggctgagacaatggggttttctagatatacaatcatgtcatctgcaaacagggacagtttgacttcctcttttcctaactgaataccctttatttccttctcctgcccaattgccctggccagaacttccaacactgtgttgaataggagtggtgagagagggcatccctgtcttgtgccagttttcaaagggaatgcttccagtttttgcccattcagtatgatattggctgtgggtttgtcatagatagctcttattattttgaaatacgtcccatcaatacctaatttattgagagtttttagtatgaaaggttgttgaattttgtcaaaggccttttctgcatctattgagataatcatgtgttttttgtctttggttctgtttatatgctggattacctttattgatttgcgtatattgaaccagccttgcatcccagggatgaagcccacttgatcatggtggataagctttttgatgtgctgctggattcggtttgccagtattttattgaggatttttgtatcaatgttcatcaaggatattggtctaaaattctcttttttggttgtatctctgtccggctttggtatcaggatgatgctggcctcataaaatgagttagggaggattccctctttttctatggattggaatagtttcagaaggaatggtaccagttcctccttgtacctctggtagaattcggctgtgaatccatctggtcctggactctttggttggtaagctattgattattgccacaatttcagatcctgttattggtctattcagagattcaacttttcctggtttagtcttgggagggtgtatgtgtccaggaatttatccatttcttctagattttctagtttatttgcatagaggtgtttgtagtattctctgatggtagtttgtatttctgtgggatcggtggtgatatcccctttatcattttttattgcatctatttgattcttctctctttttttgtttattagtcttgctagcagtctatcaattttgttgatcctttcaaaaaaccagctcctggattaattaattttttgaagggttttttgtgtctctatttccttcagttctgctctgattttagttatttcttgccttctgctagcttttgaatgtgtttgctcttgcttttctagttcttttaattgtgatgttagggtgtcagttttggatctttcctgctttctcttgtgggcatttagtgctataaatttccctctacacactgctttggatgcgtcccagagattctggtatgtggtgtctttgttctcgttggtttcaaagaacatctttatttctgccttcgttttgttatgtacccagtagtcattcaggagcaggttgttcagtttccatgtagttgagcggttttgagtgagattcttaatcctgagttctagtttgattgcactgtggtctgagagatagtttgttataatttctgttcttttacatttgttgaggagagctttacttccaagtatgtggtcaattttggaataggtgtggtgtggtgctgaaaaaaatgtacattctgttgatttggggtgaagagttctgtagatgtctattatgtctgcttggtgcagagctgagttcaattcctgggtatccttgttgactttctgtctcgttgatgtgtctaatgttgacagtggggtgttaaagtctcccattattaatgtgtgggagtctaagtctctttgtaggtcactcaggacttgctttatgaatctgggtgctcctgtattgggtgcatatatatttaggatagttagctcttcttgttgaattgatccctttaccattatgtaatggccttctttgtctcttttgatgtttgttggtttaaagtctgttttatcagagactaggattgcaacccctgcctttttttgttttccatttgcttggtagatcttcctccatccttttattttgagcctatgtgtgtctctgcacgtgagatgggtttcctgaatacagcacactgatgggtcttgactctttatccaatttgccagtctgtatattttaattggagcatttagtccatttacatttaaagttaatattgtaatgtgtgaatttgatcctgtcattatgatgttagctggttattttgctcattagttgatgtagtttcttcgtagtctcgatggtctttacattttggcatgattttgcagcggctggtaccggttgttcctttccatgtttagcgcttccttcaggagctcttttagggcaggcctggtggtgacaaaatctctcagcatttgcttgtctgtaaaggattttatttctccttcacttctgaagcttagtttggctggatatgaaattctgggttgaaaattcttttctttaagaatgtcgaatattggcccccactctcttctggcttgtagagtttctgccgagagatccgctgttagtctgatgggtttccctttgagggtaacccgacctttctctctggctgcccttaacattttttccttcatttcaactttggtgaatctgacaattatgtgtcttggagttgctcttctcgaggagtatctttgtggcgttctctgtatttcctgaatctgaacgttggcctgctttgctagattggggaagttctcctggataatatcttgcagagtgttttccaacttggttccattctccccgtcactttcaggtacaccaatcagacgtagatttggtcttttcacatagtcccatatttcttggaggctttgctcgtttctttttattcttttttctctaaacttcccttcccgcttcatttcattcatttcatcttccatcgctgataccctttcttccagttgatcgcattggctcctgaggcttctgcattcttcacatagttctcgagccttggttttcagctccatcagctcctttaagtacttctctgtattggttattctagttatacattcttctaaacttttttcaaagttttcaacttctttgcctttggtttgaatgtcctcccgtagctcggagtaatttgatcgtctgaagccttcttctctcagctcgtcaaagtcattctccgtccagctttgttccgttgctggtgaggaactgcgttcctttggaggaggagaggcgctctgctttttagagtttccagtttttctgctctgttttttccccatctttgtggttttatctacttttggtctttgatgatggtgatgtacagatgtgtttttggtgtggatgtcttttctgtttgttagttttccttctaacagtcaggaccctcagctgcaggtctgttggagtacccagccgtgtgaggtgtcagtctgcccctgcttgggggtgcctcccagttaggctgctcgggggtcaggggtcagggacctacttgaggaggcagtctgcccgttctcagatctccagctgcgtgctgggagaaccactgctctcttcaaagctgtcagactgggacatttttttgtcctgcttatttctaattgagtttctttggatcttctctccttttcttcgttaatctcactaatggtctatcaatttcatttctcttttcaaagaaccagctctttgtttatcttttatattgtgttttttttgtttgtttcaatttcatttaattctgccctgatcttagttatttctttacttctgctgggtttgggtttggttgattcttgtttctctaactccttgaggtgtgaccttagattgtctatttgtactctttcagacttcatgatgtaggcatttaatactatgaactttcctcttagctctgtctttgctgtattccagaggttcagatattttgatagtttgtgtcactactatcattcagttcaaagaattttttaatttccatcttgatttcattgttgacccagtgatcattcaggagcaggttattgtacttccatttatttggcatggttttgagggttccttttgcagttggtttctaattttattctactgtggtctgtgagagtacttgataagatttttattttttaaaatgtgttgagacttgttttgtggcctatcatatatggtctatcttggagaatgtttcatgtgctgattaatgaatatatactctgcagtttttggctagaatgttctgtgaatatctgtttagtttatttgttctagggtacagtttaagtccatagtttctttgttgactttctgtcttgatgacctgtctactgctgtcagtggagtattgaagtcccccactattactgtattaacatctatctcatttttttggtctagtagtaattgttttgtaaatttgggagctccagtgttaggtgcatagatacatttaggattgtgatattttcctgctggactagtccttttatcatcatataatacccctctttgtcatttttaactgctgttgctttgaagtttgtgtgatacaagaatagctactcctgcttgcttttgttgtccatttgcatggaaagatattccattggtaacaaatatcccactggtattttgttggtaactttttaattaccatttcaatcttgctgcttgttattggcctgttcagagtttctgtttcttcctgggttaatgtaggagggttgtatatttccaggaatttatccatctcctctaggttttctagttattccattcaagatattccatccaaatggacatcaaaagcaagcaggagtagctattccacccctttacctaagtttatgtgagtctttatgtgtcaggtgggtctcttgaagatagaatatacttggttgatgaattcttatccattctgccatttcatatcttttaggtggagcatttaggccatttacattaaacattagtattgagatgtgaggtactattctattcatcgtactatttgttgcctgaataccttaggtttttttttcattgtgttaaaatgaaaaattataggtcctgtgagatttatgctttaaggatattctattttgatgattttgaggatttaagatttagagctccttttagcagttcttttagtgctggcttggtagtggcaaattcagcatttgtttgtctgaagaagactgtatctttccttcatttatgaagcttaattttgttggatacaaaattcttggctgataattgctttgtttaaggaagctaaagataggaccccaatcccttttagcttgtagggtttcggctgagaaatctgctattaatctgataggttatcttttataggttacctgatgcttttgccgcatagctcttaagagtctttcctttttcttgactttagataacctgatgactatgtgcctaggcaatgatctttttgtgatgaatttcccaggtgttctttgaacttcttgtatgtggatgtctagatctctagcagagctgaggaagttttcttcaattattccctcaaatatgttttccaaacttttagatttatcttcttcctcaggaacaccaattattcttaggtttggtcatttaacataatcccaaacttcttggaggctttgatcattttaaaaaattctttcttctttgtctttgtcagattgggctaatttgaaagccttgtctttgagctgggaagtttctttcttccatttgttcaattctattgctgagaccttccaatgcattttgcattttgcatttctctaagtgtgttcttcatttctagaagttgtgctttttgttttgtttttgtttcgttttgagatggagattcactcttgtcgcccaggctggactggaatggcgcaatcttggctacctgcaacctctgcctcctgggttcaagcgaatctcctatctcagcctcccgagtagctgggattacaggcgtctgccaccacagctggttaatttttctatttttagtagagacagggttcaccacgttgggcaggctggttttgaactcctgacctcaggtgatccacctgcctgagcctcccaaactgctgggattgcaggcgtgagccactgctcccggccgtgattgttttttacttatgctatttcactggagatttttccattcatatcctatatcttttttttttttttctttgaaaaggagtcttgctctgtcacccaggctggagtgcagtgccacaatctcggctcactgcaacctctgcctccctaggttcaagcaattctgcttcagcctccccagtagctgggattataggcgcccaccaccatgcctagctaatttttgtatttttagtagagacagggttttgccacgttggccaggctggtctcgaactcctgacctcaagtgatccacctgcttcggcctcccaaagtgttggggttataggtgtgagccgctacacctggccctatatcattttttttatttctttaagttagactttacctttctctggtgcctccttgattgacttaatagttgaccttctgaattcttttttcctgcagtttagagattttgtcttggtttggatccactgttggtgagctagtgtgatcttttggggtgttaaagaaccttgttttgtcatattaccagaattgcttttctggttccttctcatttgggtagagaatgtgagggaagatctgggactcaagggctgctgttcagattcttttgtcccacaggatgctcctttgatgtggtgctctccccttttccctagggatggcatgtcttgagagccaaactgcagtgattgttatttctcttctggatctagtcacccagcagggctaccaagctctgggctggtactggggagtgtctgcaaagagtcctgagatgtgattcatcttcaggtctttcagccatggataccagcacctgctcaagtggaggtagcaggagagtgaagtggaccctgtgagggtccttggttgtatttttgttaagtgtactactggttttgtgttcgttggcctccagccaggaggtggcgctttcaagagtgcatcagctgtggtattatagggaaaatcacactgtgggcggggccatagagctcccaagagattatgtccttttttttggagttcttctgctgtcccgcagagcctacagcagcaatccatctccttctgtctgctcaattctcttggctttcctggtatattcctgcagtagttcttggagcaaaagttcacaatgtgggtttccacacgctgctctgtccatctgagtgggaactgcaaattagtcctgcctcctatctaccatcttccctccagtataccccctgctgctagtatttttaaacaaaccatgccactctcttctttaaaacacctgtgagagtttgcacttgctaacacaataaagtccaggacctttggcattttctatgttatattttccttcccagttcatgtcctgccatcctctccgaagcaccctgtgtcaatcacacctactcgcttgttcttcacacatagaggtcctctctctctccatgtatctgctcagggtatcatttcctctctttggcaccctggagtcttcatttaaatcccagactgaatataacacctcctgtgaaaccttgagggattgccctaacatttgtccctcctaccccaactctgtgatctgaaatctgtcttactacatgagttttataatactgtttacccaatttgtctctagactgtaagattctcaagaggaaggacctgtttctctttggatacccagcttgacaatgaatgcatttgttcacggaggaagatagtttgagcttaatgggaggtttagcttcagataaggttatagggaaaacaggatatttcctcttctctttatactcagaaagttcaggttccccgtgtagaaagaagaatgtagcagattgctaagctacatgaaaatgtgtttgctcacattttaaatggtgtaaaatataaattaacatcatcattagaaggctggccttaaaaagtcacatggtctctaggaagtcaataagtaaagaacagagcagcttttgtgggcaagactatactttgccaagtgaactaattagctgtatggtcaccagtgaattactttatcccagaccttgtgtgtttttgatttctcagacctcacggggatgaagggccttggttttaaagagctcggactaaatgatccaaagatttctttttgttactaaaattagttctactttaattcttaaggtctgtagaaattaaaatggaaataatttatatttgaagtagaaatacctattcactcttcatgtgctggtgtagtattggaaatcagtctgctaaaccgattcatacttcagtgatagaagatgccaccctgagttactttccccagtagccagatggaaccagtaaggaatatcatatcctaaaagaacaaatccatgtttaaagactgggaggaagatctttttgggttggagtaaggaaagttttgcaccaaggctaagcttgttgccttgtgcattctgctttgtgctcatattcgagttttgaggcaaaaacacacacctagcagtttgggacatgaggcctccatatcacctagtttttccaacccaacaaaccctcaagtttctcccgagagaaagaatataccattgtataagtttcctattgctgctgtaacaagttaccacaaacattaaaaaacatatcttacagttctggaactcaagtcctaaaatcaagctattgctggagccacattcctcttggaggctgtaggggagaatctgtttccttgcatttaccagcttgcagaggctgcctgcgttccgtcacttgtggcatcttcctccattttctagccaattgtggaggatctttaaatctctttactaaagaccctggtgattactttgtgtccacctggataatccaggataatcccccaactcaaaaatgcttcatttagtcacatctgcacagtcccttttgccatgtaaaatttataacttcaggggattaggatatggacatatctggggagctgctattcagcctaccatgactataaatatcattaacctaattaaaatggcctaaattagctggctgtggtggctcacctataatcccaggactttgggaggccaagatgggaggatcgcttgagctcaagagttcaagaccgaccagcctggtcaacagagtgagaccccatctacacacacacacacaaaaattagctgggtgtggtggcccacagctgtagtcctagctaattgggaggctaaggcaagagaatcacctgagttcaggagatggaagctgcagtgagttgtgatcaggccacttcactccaccctgggtgacagagcaagaccctatctcaaaaagaaaaaaaaagaaagcctagatagactttagtttgtattaattatagcttggctatacaatgagtcccaaattaggacatatattaaacgtccattgatttttaattactaaagcagtggttctcaaactttaatgtgtatcaaaatcacctggaaaactaaagtgatttctgggccccatccccatagcttctgactcaaaatatttagatctgggtcaaggctcaagaatttgcatttctaacagattccagatgctgctactactggtccgaaaacaaccccactggaagatgaataaagtggacacaacaaatagcatatgttctactatagaggtggccacatgaagagctctgcaagcccactgtgaaattgatagcaaatctttattcaagtgtattaattgacccacaaatatcctgattaatgaagctggctagtttggcaagatgcattctaactcttaaagtgattgattactgtggagatgtgtgatgacagattggcacctactaaggaaacctctcttgcctggtacattattaaaaataatccagtggggaaataggactaatttaattacatgcctttatgcagtaagatccacagttgaaaaatagaggcagtagctttaattgcactgtaatgttcacacacaaatcatatcttgcttgaaacagttttatggcaaaaatagaccatatattgatttcacatatataacatttaacccttcaagcctttttgcccattaaatatacacacctttacaaaccaataacagtttagaagaattaagctcttctgattataaacttttacattattgatcagacagtagcacataaaattgcttttttttttagtattttacatgaataattttatttgtgcttcatgaaaactccatttatcccattttttattatactttaagttttagggtacatgtgcacaatgtgcaggtttgttacatatgtatacacgtgccgtgttggtgtgctgcacccattaactcatcatttacattaggtatatctcctaatgctatccctccccctccccccaccccacaacaggccctggtgtgtgatgttccccttcctgtgtccatgtgttctcattgttcagttcccacctatgagtgagaacatgcagtgtttggttttttgtccttgcgatagtttgctgagaatgatggtttccagcttcatccatgtccctacaaaggacatgaactcatcattttttatggctgcatagtattccatggtgtatatgtgccacatttccttaatctagtctatcattgatggacatttgggttggttccaagtctttgctattatgaatagtgctgcaataaacatgtgtgcatgtgtctttatagcagcatgttttataatcctttgggtatatacccagtaatggggtggctgggtcaaatgatatttctagttctagatccctgaggaatcgccacactgacttccacaatggttgaactagtttacagtcccaccaacagtgtaaaagtgttcctatttctccacatcctctccagcacctgttgtttcctgactttttaatgactgccattctaactggtgtgagatggtatctcattgtggttttgatttgcatttctctgatggccagtgatgatgagcattttttcatgtgtcttttggctgcataaatgtcttcttttgagaagtgtctgttcatatccttcgcccacttgttgatggggttgtttgtttttttcttgtaaatttgttagagttctttgtagattctggatattagccctttgtcagatgagtagattgcaaaaattttctcccattctgtaggttgtctgttcactctgatggtagtttcttttgctgtgcagaagctctttagtttaattagatcccatttgtcaattttggcttttgttgccattgcttttggtgttttagacatgaagtccttgcccatacctatgtcctgaaaggtattgcctaggttttcttctagggtttttacggttttaggtctaacatttaagtctttagtccatcttgaattaatttttatataaggtgtaaggaagggatccagtttcagctttctacatatggctagcaaggtttcccagcaccatttattaaatagggaatgctttccccatttgttgtttttgtcaggtttgtcaaagatcagatggttgtagatgtgtggtattatttctgagggctctgttctgttccattggtctatatctctgttttggtaccagtaccatgctgttttggttactatagccttgtagtataatttgaagtcaggtaacatgatgcctccagctttgttcttttggcttaggattgtcttggcaatgcgggcccttttttggttccatatgaactttaaagtagttttttccagttctgtgaagaaagtcattggtagcttgatgagggtggcattgaatctataaattaccttgggcactatggccattttcatgatattgattcttcctatccatgggcatggaatgttcttgcatttgtttgtgtcttcttttatttcattgagcagtggtttgtagttctccttgaagaggttcttcacatcccttgtaagttggattcctaggtattttattctctttgaagcaactgtgaatgggagttcactcatgatgtggctctctgttcgtctgtgatttgtgtataagaatgcttgtgattttttgcacattgattttgtatccagagactttgctgaagttgcttatcagcttaaggagattttgggctgagacgatggggttttttaaatatacaatcatgtcatctgcacacagggacaatttgacttcctcttttcctaattgaataccctttatttctttctcctgcctaattgccctggccagaacttccaacactgtgttgaataggagtggtgagagagggcatctttgtcttgtgccagttttcaaagggaatgcttccaggttttgcccattcagtatgatattggctgtgggtttgtcataaatagctcttattattttgagatacatcccatcaatacctaatttattgagagtttttagcatgaagggctgttgaattttctcaaaggccttttctgcatctattgagataatcatgtggtttttgtctttggttctctttatatgctggattacatttattgatttgcatatgttgaaccagccttgcatcccagggatgaagcccacttgatcatggtggataagctttttgatgtgctgctggattcggtttgccagtattttattgaggatttttgcatcaatgttcatcagggatattggtctaaaattctctttttttgttgtgtctttgtcaggctttggtatcaggatgatgctggcctcataaaatgagttagggaggattccctctttttctatggattggaatagtttcagaaggaatggtaccagcttcttgtacctctagtagaattcggctgtgaatccatctggtcctggactttttttggttggtaggctattaattattgcctcaatttcagatcctgttattggtctattcagagattcaacttcttcctggtttagtcttgggagagtgtatgtgtcgaggaatttatccatttcttctagattttctagtttatttgcttagagatgtttatagtattctctgatggtagcttgtatttctgtgagatcagtggtgatatccccttcatcatttttttattgcctctatttgattctcccctcttttcttctttattagtcttgctagcagtctatcaattttgttgatcttttcaaaaaacgagcccctggattcattgattttttgaagggttttttgtgtatctccttcagttgtgctctgatcttagttatttcttgccttctgctagcttttgaatgtgtttgctcttgcttctctagttcttttaattgtgatgttagggtgtcaattttacatctttcctgctttctcttatgggcatttagtgctataaatttccctctacacactgctttaaatgtgtcccagagattctggtatgttgtgtctttgttctcactggtttcaaagaacatctttatttctgccttaattttgttatatacccattagtcattcaggagaaggttgttcagtttccatgtagttgagcggttttgagtgagtttcttaatcctgagttctactttgattgcactgtggtctgagagacagtttgttataatttctgttcttttacatttgctgaggagtgctttacttccagctatgtggtcaattttggaataagggcaatgtggtgctgagaagaatgtatattctgttgatttgtggtggagagttctgtagatgtctattaggtctgcttggtgcagagctgagttcaattcctggatatccttgttaactttctgtctcgtttatctgtctaaggttgacagtggggtgttaaagtctcccattattattgtgtgggagtctaagtctctttgtaagtctctaaggacttgctttatgaatctaggtgctcctgtattgggtgcatatatgtttaggataattagctcttcttgttgaattgatccctttaccattatgtaatggccttgtctcttttgatctttgttggtttaaagtctgttttatcagagactaggattgcaacccctgccttttttttccatttgcttggtagatcttcctccatccctttgttttgagcctatgtgagtctctgcatgtgagatgggtctcctgaatacagcacactgatgggtcttgactctttatccgttttgccagtctgtgtattttaattgaagcatttagcccatttacatttaaggttaatattgttatgtgtgaacttgatcctgtcattatgatgttagctggttattttgctcattagttgatgcagtttcttcctagcattgatggtctttacattttggcatgtttttgcagtggctggtaccagtcgttcctttccatgtttactgcttctttcaggagctcttgtagagcaggcctggtggtgacaaaatctctcagcatttgcttgtctgtaaaggattttatttctccttcacttatgaagcttaatttggctggatatgaaattctgggttgaaaattcgtttaagaatgttgaatattggcccccactctcttctggcttgtagagtttctgctgagattcgccgttagtctgatggtcttccctttgtgggtaacccgacctttctctctggctgcccttaacattttttccttcatttcaactttggtgaatctgacaattatgtgtcttggagttgctcttctcgaggattatctttatggcattctctgtatttcctgaatctgaatgttggcctgccttgctaggttggggaagttctcctggataatatcctgcagagtgttttccaacttggttccattctccccatcactttcaggtacaccaatcagacataaatttggtcttttcacatagtcccatatttcttggaggctttgttcatttccttttactcttttttctctaaacttctcttcttgcttcatttcattcatttgatcttcaatcactgataccctttcttccagttgatcgaatcggctactgaagcttgtgcattcatcacgtagttctcttgccatgtttttcagctccatcaggtcatttaaggacttctctacactgtttattctagttcgccattcatctaatcttttttcaaggtttttagcttctttgcagtgggttcaaacttcctcctttagctcagagaagtttgatcgtctgaagccttcttctctcaacttgtcaaagtcattctccatccagctttgttccgttgctggtaaggagctgcgttcctttggagggggagaggcgctctgatttttagaattttcagcttttctgctctcttttttccccatctttgtggttttatctatctctgctctttgatgatggtgacgtacagatggggttttgatgtggatgtcctttctgtttgttagttttccttctaacagtcaggaccctcagctgcaggtctgttggagcttgctggaggtccactccagaccctgtttgcctgggtatcagcagcagaggctgcagaacagcacatattgctgaacagcaaatgttgctgcctgatcgttcctctggaagcttcatctcagaggggcacctggccatgtgaggtgtcagtctgcccctactgggaggtgcctcccagttaggctactcgggggtcagggacccacttgagggggcagtctgtccgttctcagatctcaaactcctttctgggagaaccactattcacttcaaagctgtcagacagggacatttaagtctgcagaggtttctgctgccttttgttcggctatgacctgcccccagaggtggagtctacagaggcaggcaggcctccttgagctgtggtgggctccacccagttcgagcttcctggctgctttgtttacctactcaagcctcagcaatggtggatgcccctcccccagcctcgctgccatcttgcagatagatctcagaccgctgtgctagcagtgagtgagtatctgtgggcgtgggaccctccgagccaggtgtgggatataatctcctggtgtgccgtttgctaagaccattggaaaagctcagtatttgggtgggaattacctgattttccaggtgccatctgttaccacttcccttggctaggaaagggaattccctgaccccttgcacttcccggctgaggcgatgcctcaccctgctttggcttacgctcggtgggctgcacccactgtcctgcccccactgtccgacaagccccgtgagatgaacccggtacctcagttggaaatgcagaaatcacctgtcttctgcgtcactcgcgctgggagctgtagactggagctgttcctatttggctatcttggaaccgcaaacagtatgtttttcttacattttttcctttacctttttgtttgacttacaggggtttaagtattctgtattatcttgtttttattaaacctgttctagaaataaa

SEQ ID NO: 10321 - DNA, 6056 bp, Homo sapiens
tgagttttttttctttgctttctttttttttttattatactttaagttctagggtacatgtgcacattgtgcaggttagttacatatgtatacatgtgccatgctggtgcgctgcacccactaactcgtcatctagcattaggtatatctcccaatgctatccctcccccatcccccaaccccaccacagtccccagagtgtgatattctccttcctgtgtccatgtgatctcattgttcaattcccacctgtgagtgagaatatgcggtgtttggttttttgttcttgccaaagtttactgagaatgatgatttccaatttcatccatgtccctacaaaggacatgaactcatcattttttatggctgcatagtattccatggtgtatatgtgccacattttcttaatccagtctatcattgttggacatttgggttggttccaagtctttgctattgtgaataatgccgcaataaacatacgtgtgcatgtgtctttatagcagcatgatttatagtcctttgggtatatacccagtaatgggatggctgggtcaaatggtatttccagttctagatcccttaggaatcgccacactgacttccacaatggttgaactagtttacagtcccaccaacagtgtaaaagtgttcctatttctccacatcctctccagcacctgttgtttcctgactttttaatgattgccattctaactggtgtgagatggtatctcattgtggttttgatttgcatttctctgatggccagtgatgatgaacattttttcatgtgttttttggctgcataaatgtcttcttttgagaagtgtctgttcatatccttcgcccactttttgatggggttgtttgttttttcttgtcaatttgtttgagttcattttagattctggatattagccctttgtcagatgagtaggttgtgaaaattttctcctattttgtaggttgcctgttgactctgatggtagtttcttttgctgtgcagaagttctttagtttaattagatcccatttgtcaattttggcttttgttgccattgcttttggtgttttggacatgaagtccttgcccatgcctatgtcctgaatggtaatgcctaggttttcttctagggtttttatggttttaggtctaacgtttaagtctttaatccatcttgaattgatttttgtataaagtgtaaggaagggatccagtttcagctttctacatatggctagccagttttcccagcaccatttattaaatagggaatcctttccccattgtttgtttttctcaggtttgtcaaagatcagatagttgtagatatgtggcgttatttctgagggctctgttctgttccattgatctatatgtctgttttggtaccagtaccatgctgttttggttactgtagccttgtagtatagtttgaagtcaggtagcgtgatgcctccagctttgttcttttggcttaggattgccttggcgatgcgggctcttttttggttccatatgaactttaaagtagttttttcgaattctgtgaagaaagtcattggtagcttgatggggatggcattgaatctgtaaattaccttgggcagtatggccattttcacgatattgattcttcctacccatgagcatggaatgttcttccatttgtttgtatcctctttgatttccttgagcagtggtttgtagttctccttgaagaggtccttcacatcccttgtaagttggattcctaggtattttattctctttgaagcaattgtgaatgggagttcactgatgatttggctctctgtttgtctgttgttggtgtataagaatgcttgtgattttgtacattgattttgtatcttgagactttgctgaagttgcttatcagcttaaggagattttgggctgagacaatggggttttctagatatacaatcatgtcgtctccaaacagggacaatttgacttcctcttttcctaattgaataccctttatttccttctcctgcctaattgccctggccagaacttccaacactatgttgaataggagtggtgagagagggcatccctgtcttgtgccagttttcaaagggaatgcttccagtttttgcccattcagtatgatattggctgtgggtttgtcatagatagctcttattattttgaaatacgtcccatcaatacctaatttattgagagtttttagcatgaagggttgttgaattttgtcaaaggctttttctgcatctattgagataatcatgtggtttttgtctttggctctgtttatatgctggattacatttattgatttgcgtgtattgaaccagccttgcatcccagggatgaagcccactcgatcatggtgaataagcttttttgatgtgctgctggattcgttttgccagtattttattgagggcttttgcatcaatgttcatcaaggatattggtctaaaattctctttttttgttgtgtctctgcctggctttggtttcagaatgatgctggcctcataaaaagagttagggaggattccctctttttccattgattggaatagtttcagaaggaatggtaccagttcctccttgtacctctggtagaattcggctgtgaatccatctggtcctggactctttttggttggtaagctattgattattgccacaatttcagatcctgttattggtctgttcagagattcaacttcttcctggtttagtcttgggagagtgtatgtgtcaaggaatttatccatttcttctagattttctagtttatttgcgtagaggggtttgtagtattctctgatggtagtttgtatttctttgggatcggtggtgatatcccctttatcattttttattgcgtctatttgattcttctctcttttcttctttattagtcttgctagcagtctatcaattttgttgatcctttcaaaaaaccagctcctggattcattaattttttgaagggttttttgtgtctctatttccttcagttctgctctgattttagttatttcttgccttctgctagcttttgaatgtgtttgctcttgcttttctagttcttttaattgtgatgttagggtgtcaattttggatctttcctgctttctcttgtgggcatttagtgctataaatttccctctacacactgctttgaatgcgtcccagagattctggtatgttgtgtctttgttcttgttgatttcaaagaacatctttatttctgccttcatttcgttatgtacccagtagtcattcaggagcaggttgttcagtttccatgtatttgagcggttttgagtgagattcttaatcctgagttctagtttgattgcactgtggtctgagagatagtttgttataatttctgttcttttacatttgctgaggagagcttcacttccaagtatgtggtcaattttggaataggtgtggtgtggtgctgaaaaaaatgtatattctgttgatttggggtggagagttctgtagatgtctattaggtctgcttggtgcagagctgagtttaattcctgggtatccttgttgactttctgtctcattgatttgtctaatgttgacagtggggtgttaaagtctcccattattaatgtgtgggagtctaagtctctttgtaggtcactcaggacttgctttatgaatctgggtgctcctgtattgggtgcatatgtatttaggatagttagctcttcttgttgaattgatccctttaccattatgtaatgggcttctttgtctcttttgatctttgttggtttaaagtctgtttcatcagagactaggattgcaacccctgcctttttttgttttccatttgcttgttagatgttcctccatccttttattttgagcctatgtgtgtctctgcacgtgagatgggtttcctgaatacagcacacttatgggtcttgactctttatccaatttgccagtctgtgtcttttaattggagcatttagtccatttaatttaaagttaatattgttatttgtgaatttgatcctgtcattatgatgctagctggttattttgctcgttagttgatgcagtttcttcctagtcttgatggtctttacattttggcatgtttttgcagtggctggtaccggttgttcctttccatgtttagcgcttccttcaggagctcttttagggcaggcctggtggtgacaaaatctctcagcatttgcttgtctgtaaagtattttatttctccttcacttatgaagcttagtttggctggatatgaaattctgggttgaaaattcttttctttaagaatgttgaatattggcccccactctcttctggcttgtagggtttctgccgatagatctgctgttagtctgatgggcttccctttttgggtaacccgacctttctctctggctgctcttaacattttttccttcatttcaactttggtgaatctgacaattatgtgtcttggagttgctcttctcgaggagtatctttgtggcgttctctgtatttcctgaatctgaacgttggcctgccttgctagattggggaagttctcctggataatatcctgcagagtgttttccaacttggttccattctccccatcactttcaggtacaccaatcagacgtagatttggtcttttcacatagtcccatatttcttggaggctttgctcatttctttttattcttttttctctaaacttcgcttctcgcttcatttcattcatttcatcttccatcgctgataccctttcttccagttgatcgcatcggctcctgaggcttctgcattcttcacgtagttctcgagccttggttttcagctccgtcagctcctttaagcacttctctgtattggttattctagttatacattcttctaaatttttttcaaagttttcaacttctttgcctttggtttgaatatcctcccgtagcgcagagtaatttgatcgtctgaagccttcttctctcagctcttcaaagtcattctgcatccagctttgttccattgctggtgaggaactgcgttcctttggaggaggagaggtgctcttctttttagagtttccagtttttctgttctgttttttccccatctttgtggttttatctacttttggtctttgatgatggtgatgtacagttgggtttttggtgtggatgtcctttctgtttgttagttttccttctaacagacaggaccctcagctgcaggtctgttggaataccctgccgtgtgaggtgtcattgtgcccctgctggggggtgcctcccagttaggctgctcgggggtcaggggtcagggacccacttgaggaggcagtctgcccattctcagatctccagctgcgtgctgggagaaccactgctctcttcaaagctgtcagacagggtcacttaagtctgcaaaggttactgctgtctttttgtttgtctgtgccctgcccccagaggtggagcctacagaggcaggcaggtctccttgagctgtggtgggctccacccagttggagcttcctggctgctttgtttacctaagcaagcctgggcaatggcgggcgcccctccccagcctcactgccgccttgcagtttgatctcagactgctgtgctagcaatcagcgagactccgtgggtgtaggaccctcggagccaggtgccggatataatctcgtggtgcgccgttttttaagcccgtcggaaaagcgcagtattcgggtgggagtgactcgattttccaggtgccgtccatcacccctttctttgactgggaaagggaactccctgaccccttgcgtttcccaagtgaggcaatgcctggccctgcttcggctcgtgcacggtgcatgcacccactgtcctgcgcccactgtctggcactccctagtgagatgaacccggtacctcagatggaaatgcagaaatcacccgtcttctgcgtcgctcacgctgggagctgtagaccggagctgttcctattccgccatcttggctcctccctccagaaa

SEQ ID NO: 10322 - DNA, 5847 bp, Homo sapiens
cttttttttaaattttattttattattattatactttaagttttagggtacatgtgcgcaacgtgcaggtttgttacatatatatacatgtgccatgttggtgtgctgcacccattaactcgtcatttagcattaggtatatctcctaatgctatccctcccccctccccccaccccacaacagtccctggtgtgtgatgttccccttccggtgtccatgtgttctcatcgttcaattcccacctatgagtgagaacatgtggtgtttggttttttgcccttgcgatagtttgctgagaatggtggtttccagcttcatccatgtccctacaaaggacatgaactcatcattttttatggctgcatagtattccatggtatacatgtgccacattttcttaatccagtctatccttgttggacatttgggttggttccaggtctttcccattgtgaatagtgccacaataaacatacgtgtgcatgtgtctttatagcagcatgatttataatcctttgggtatatacccagtaatgggatggctgggtcaaatggtatttctagttctagatccctgaggaatcgccacactgacttccacaatggttaaaccagattacagtcccaccaacagtgtaaaagtgttcctatttctccacatcctctccagcgcctgttctttcctgactttttaatgattgccattctaactggtgtgagatggtatctcattgtggttttgatttgcatttctttgatggccagtgatgatgagcattttttcatgtgttttttggatgcataaatgtcttcttttgagaagtgtctgttcatatccattgcccactttttgatggggttgtttgtttttttcttgtaaatttgtttgagttcattggtgattctggatattagccctttgtcagatgagtaggttgcaaaaattttctcccactctgtaggttgcctgttcactctgatggtagtttcttttgctgtgcagaagctctttactttaattagatcccatttgtcaattttggcttttgttgccattgcttttggtgttttagacatgaagtccttgcccatgcctatgtcctgaatggtatttcctaggttttcttctagggcttttatggttttaggtctaacatttaagtctttaatccatcttgaattaattttcgtataaggtgtaaggaagggatccagtttcagctttctacctatggctagccagtttccccagcaccatttattaaatagggaatcctttccccattgcttgtttttgtctggtttgtcaaagatcagatagttgtagatatgcggcattatttctgaggcctctgttctgttccattgatctatatctctgttttggtaccagtaccatgctgttttggttactgtagccttgtagtatagtctgaagtcaggtaacgtgatgcctccagctttgttcttttggcttaggattgacttggcgatgcgggctctttttttggttccacatgaactttaaagtagttttttccaattctgtgaagaaagtcattggtagcttgatggggatgacattgaatctataaattaccttgagcagtatggccattttcacgatattgattcttcctacccatgagcatggaatgttcttccatttgtttgtatcctcttttatttcactgagcagtggtttgtagttctccttgaagaggtccttcacatcccttgtaagctgtattcctaggtattttattctttttgaagcatttgtgaatgggagttcactcacgatttggctgtctgtttgtctgttattggtgaataggaatgcttgtgatttttgcagattgattttttattctgagactttgctgaagttgcttatcagcttaaggagatttggggctgagacaatggggttttctagatatacaatcatgtcatctgcaaacaggaccaatttgacttcctcttttcctaattgaatgccctttatttccttctcctacctgatttccctggccagaacttccaacactatgttggataggagtggtgagagatggcatccctgtcttgtgccagttttcaaaaggaatgcttccagttgttgtccattcggtatgatattggctgtgggtttgtcatagatagctcttattattttgagatacgtcccatcaatacctaatttattgagagtttttagcatgaagggattttgaattttgtcaaagacattttctgcatctattgagataatcatgtggtttttgtcattggttctgtttatacgctggattacatttattgatttgcgtatgttgaaccagccttgcatcccagggatgaagcccacttgatcatggtggataagctttttgatgtgctgctggttttggtttgccagtattttattgaggatttttgcattgacgttcatcagggatattggtctaaaattctcttttttggttgtctctgcccggctttggtatcaggatgatgctggcctcataaaatgagttagggaggattccctctttttctattgattggaatagtttcagaaggaatggtaccagctcctccttgtacctctggtagaattcggctgtgaatccatctggtcctggactttttttggttggtaagctgttaattattgcctcaatttcagagcctgttattggtttattcagggattcaacttcttcctggtttagccttgggagggtgtatgtgtcaaggaattcatccatttcttctagattttctagtttatttgcatagaggtgtttatagtattctctgatggtagtttgtatttctgtgggattggtggtgacatcccctttgtcattttttattgggtctctttgattcttctctcttttcttctttattagtcctgctagcagtctatcaattttgttgatcttttcaaaaaaccagctcctgcattcattgattttttgaagggttttttgtgtctctatttccttcagttttgctctgatcttagttatttcttgctttctgctagcttttgaatatgtttgctctttcttctctagttcttttaattgcgatgttagggtgtcaattttggatctttcctgctttctcttgtgggcatttagtgctataaatttccctctacatactgctttgaatgtgtcccagagattctggtatgttgtgtctttgttcttgttggtttcaaagaacatctttatttctgccttcatttcgttatgtacccagtagtcattcaggagcaggttgttcagtttccatgtagttgagtggttttgagtgagtttcttaatcctgagttctagtttgattgcactgtggtctgagagacagtttgttataatttctgttcttttacatttgctgaggagtgctttacttccaactatgtggtcaattttggaataggtgtggtgtggtgctgaaaagaatgtatattctgttggtttggggtggagagttctgtagatgtctattaggtcctcttggtgcagagctgagttcaattcctggataaccttgttaactttctctctcgttgatctgtctaatgttgacagtggggtgttaaagtctcccattattattgtgtgggagtctaagtctctttgtaggtcactcaggacttgctttatgaatctgggtgctcctttattgggtgcatatatatttaggatagttagttcttcttgtcaaattgatccctttaccattatgtaatggccttctttgtctcttttgatctttgttggtttaaaatctgttttatccgagactaggattgcaacccctgctttttttttgttttccatttgcttggtagatcttcctccatccctttattttgagcctatgtgtgtctctgcacgtgagatgggtttcctgaatacagcacactgatgggtcttgactctttatccaatttgccagtctgtgccttgtacttggagcatttagcccatttacatttaaggttaatattgttatgtgtgaatttgatccgtcattatgatgttagctggttattttgcttgttagttgatgcgttttcttcctagcctcgatggtctttaccatttggcatgtttttgcagtggctggtaccaattgttcctttccatgtttagtgcttcctttaggagctcttttcgggcaggcctggtggtgacaaaatctctcagcatttgcttgtctgtaaagtattttatttttccttcacttatgaagcttagtttggctggatatgaaattctgagttgaaaattcttttctttaagagtgttgaatattggcccccaatctcttccggcttgtagagtttctgctgagagatcagctgttagtctgatgggcttccctttgtgggtaacctgacctttctctctggctgcccttaacattttgtccttcatttcaactttggtgaatctgacaattatgtgtcttggagttgctcttctcgaggagtatctttgtggcgttatctgtatttcctgaatgtgaatgttggcctgccttgctagattggggaagttctcctggataatatcctgcagtgtgttttccaatttggttgcattctccccgtcactttcaggtacaccaatcagacgtagattttgtcttttcacatagtcccatatttcttggaggctttgtttgtttctttttattcttttttgtctaaacttctcttcatgcttcatttcattcatttagtcttccatcgctgataccctttcttccagttgattgcattggttactgaggcttgtgcattcgtcacgtagttctcatgccatggttttcagctccatcaggtcctttaaggacttctctgcattggttattctagttatccattcgtctaattttttttcaaagttttaacttctttgccattggttcaaacttcctcctttagctcggagtagtttgatcttctgaagccttcgtctctcatctcgtcaaagtcattctccatccagctttgttccgttgctggtgaggagctgcgttcctttggaggaggagaggcgctctgatttttagagcttccggtttttctgctctgttttcgccccatctttgtggttttatctacctttggtctttgatgatggtgatgtacagatgggtttttggtgtggatgtcctttctgtttgttagttttccttctaaccatcaggaccctaagctgcaggtctgttggagtttgctggaggtccactccagaccctgtttgcctgggtatcagcagtggtggctgcagaacagcggatattggtgaaccgcaaatgctgctgcctgatcgttcctctggaagttttgtctcagaggagtacccggccatgtgaggtgtcattctgcccctacctggggggtgcctccaagttaggctactcaggggtcacggacccacttgaggaggcagtctgcccattctcagatcccaagctgtgtgctgggagaaccactactctcttcgaagctgtcagacagggacatttaagtctgcagaggttactgctgtctttttgtttgtctgtgccctgtccccagaggtggagcctacagagacaggcaggcttccttgagctgtggtgggctccacccagttcgagcttcccggctgctttgtttacctaagcaagcctgggcaatggcaggcgcccctcccccagcttcgctgccaccttgcagtttgatctcagactgctgtgctagcaatgagtgaggctctgtgggtgtaggaccctccgagccaggtgtgggatataatctcctggtgtgc

SEQ ID NO: 10323 - DNA, 29713 bp, Homo sapiens
ttcatctcttttttttattattatactttaagttttagggtacatgtgcacaacgtgcaggttagttacatatgtatacatgtgccatgttggtgtgctgcaccaattaactcgtcatttaacattaggtatatctcctaatggtatccctcccccctccccccacccaacaacaggccctggggtgtgatgttccccttcctgtgtccatgtgttctcattgttcaactcccacctatgagtgagaacatgcggtgtttggttttttgtccttgtgatagtttgctgagaatgatggtttccagcttcacccatgtccctacaaaggacatgaactcatccttttttatggatgcatagtattccatggtgtatatgtgccacattttcttttatttatttatttatttattttattttttatttatttatttttttattatactttaagttttagggtacatgtgcacaatgtgcaggattgttacatatgtatacatgtgccatgttggtgtcctgcacccattaactcatcatttagcattaggtatgtctcctaatgctatccctcccccctccccccacctcacaacagtccctggggtgtgatgttccccttccagtgtccatgtgttcttattgttcaattcccacctaggagggaaaacatgtggtgtttggttttttgtccttgcgatagtttgctgagaatgatggtttccagcttcatccatgtccctaccaaggacatgaactcatcattttttatggctgcatagtattccatggtgtatatgtgccacattttcttaatccagtctatcattgttggatatttgggttggtgccaagtctttgctattgtgaatagtgctgcaataaacatacatgtgcatgtctctttataacagtatgatttataatcctttgggtgtatacccagtaataggatggctgggtcaaatggtatttctagttctagaacactgaggtaatcaccacactgacttccacaatggttgaactagtttccagtcccaccaacagtgtaaaagtgttcctatttctccacatcctctccagcacctgttgtttcctgactttttaatgattgccattctaactggtgtgagatggtatctcattgtggttttgatttgcatttctctgatggccagtgatgatgagcattttttcatgtgtcttttggctgcataaatgtcttcttttgagaagtgtctgttcatatccttcacccactttttgatggggttgtttgtttttttcttgtaaatttgtttgagttcattgcagattctggatattagccctttgtcagatgagtaggttgcaaaaattttctcccattctgtaggttgcctgtccactctgatggtagtttcttttgctgtgcagaagctcttgagtttaattagatcccatttgtcaattttggcttttgttgccattgcttttgctgttttagacatttagtccttgcccatgcctatgtcctgaacagtattgcctaggttttcttctagggtttttatggttttaggtttaacatttaagtctttcatccatcttgaattaatttttgtataaggtgtaaggaagggatccagtttcagctttctacatatggctagccagttttcccagcaccatttattaaatagggactcctttccctattgcttgtttttgtcaggtttctcaaagatcagatagttgtagatatgtggcaatatttctgagggctctattctgttccattggtctatatctctgttttggtaccagtaccatgctgttttggttactgtagccttgtagtatagtttgaagtcaggtagtgtgatgcctccagctttgttcttttggcttaggattgacttggccatgcaggctcttttttggttccatatgaactttaaagtagttttttccaatcctgtgaagaaagtcattggtagcttgatggggatggcattgaatctataaattaccttgggcagtatggccattttcaatatattgattctttctacccatgagcacggaatgttcttccatttgtttgtatcctcttttatttcattgagcagtggtttgtagttctccttgaagaggtccttcacatcccttgtaagttggattcctaggtattttattccctttgaagcaattgtgaatggcagttcactcatgatatggctctctgtttgtctgttattggtgtgtaagaatgcttgtgatttttgtacattgattttgtatcctgagactttgctgaagttgcttatcagcttaaggagattttgagctgagacaatggggttttctagatatacaatcatgtcgtctgcaaacagggacaatttgacttcctcttttcctaattgaatgccctttatttccttctcctgcctgattgccctggccagaacttccaacactatgttgaataggagtggtgagagagggcatccctgccttgtgccagttttcaaagggaatgcttccagtttttgcccattcagtatgatgttggctgtggttgtgtcatagatagctcttattattttgagatatgtcccatcaatacctaatttactgagagttttttagcatgaagggctgttgagttttgtcaaaggtctttactgcatctattgagataatcatgtggtttttgtctttcattctgtttatatgctggattacgtttattcattttcatatgttgaaccagccttgcatcccagggataaagcccacttgatcatggtggataagctttttgatgtgctgctggatttggtttgccagtattttattgaggatttttgcatcaatgttcaccagggatatttgtctaaaattctctttttttgttgtgtctctgcctggctgtggtatcaggatgatgctggcctcataaaatgagttaaggaggattccctctttttctgttgattggaatagtttcagaaggaatggtaccagctcctccttgtacctctagtagaattcggctgtgaatccatccggtcctggactttttttggttggtaagctattaattattgcctcaatttcagagcctgttattggtctattcggagattcaacttcttcctggtttagtcttgggagggtgtatgtgtccaggaatttatccatttcttctagattttctagcttatttgcatagaggtgtttatagtattctctaatggtagtttgtatttctgtgggctcggtggtgatatcccctttgtcatttgttattgcctctgttagattcttctgtcttttattctttattagtcttgctagcggtctatcaattttgttgatcttttcaaaaaaccagctcctggattcattgattttttgaagggttttttgtttctctatttccttcagttatgctctgatcttagttatttcttgccttctgctagcttttgaatgtgtttgctcttgcttttctagttcttttaattatgatgttagggtgtcaattttggatctttcctgctttctcttgtgggcatttagtgctataaattttcctctacacactgctttgaatgtgtcccagagattctggtatgttgtgtctttgttcttgttgttttcaaagaacatctttacttctgccttcatttcattatgtacccagcagtcattcaggagcaggttgttcagtttccatgtagttgagcagttttgactgagtttcttaatcctgagttgtagtttgattgcactgtggtctgagagacagtttgttataatttctgttcttttacatttgctgaggagtgctttacttccaactatgtggtcaattttggaataggtgtggtgtggtgctgaaaaaaatgtatattctgttgatttgaggtggagagttctgtagatgtctattaggtccgcttggtgcagagctgaattcaattcctggatatccttgttaactttctgtctcgttgatctgtctaatgttgacagtggggtgttaaagtctcccattattattgtgtgggagtctaagtctctttgttggtcactcaggacttgctttatgaatctgggtgctcctgtattgggtgcatatatatttaggatagttagttcttcttgttgaattgatccctttacccttatgtaatggctttctttgtatcttttgatctttgttagtttaaagtctgttttatcagagactaggattgcaacccctgcctttttcttgttttccatttgcttggtagatcttcctccatccctttattttgagccaatgtgtgtctctgcacttgagatgggtttcctgaatacagcacaatgatgggtcttgactctttatccaatttgccagtctgtgtcttttaattggagcatttagcccatttacatttaaggttcatattgttatgtgtgaatttgatcctgtcattatgatgttagctggttattttgctcgttagttgatgcagtttctttctagccttgatggtctttacaatttggcatgtttttgcattgggtggtaccggttgttcctttccatggttagtgcttccttcagtagttcttttagggcaggcctggtggtgacaagacttctcagcatttgttttctgtaaaggattttatttctccttcacttatgaagcttagtttggctggatatgaaattctgggttgaaaattcttttctttaagaatgttgaatattggcccccactctcttctggcttgtagagtttctgctgagagatctgctgttagtctgacgggctttcctttgtgggtaacccgacctttctctctggctgcctttaacattttttccttcacttcaactttggtgaatctgacaattatgtgtctttgagttgctcttctcaaggagtatctttgtgatgttctctgtatttcctgaatttgaatgttggcctgtcttgctagattggggaagttctcctggataatatcctgcaaaatgttttccaacttggttccattctccgtttcactttcaggtacaccaatcagacgtacatttggtcttttcacatagtcccatatttcttggaggctttgttcatttgtgttttttcttttttctaaacgtcttttctcacttcatttcattcatttcatcttccatcgctgataccctttcttccagttgattgcattggctactgaggcttttgcatttgtgacgtagttctcgtgctgtggtcttcagctccattaggtatttttaggacttctctgcattggttattctagttagccattcatctaattttttttcaaggtttttaacttctttgccattgattagaacttcctccttttgctcggagtagtttgatcttctgaagccttcttctctcaactcgtcaaagtcattctctgtccagctttgtcccattgctggtgaggagctgtgttcctttggaggaggagaggtgctcttatttctagagtttccggtttttctgctgtgttttttccccatctttgtggtttcctctacctttagtctttgatgatggtgatgtacagatgggtttttggtattgatgccctttctgtttgttagttttccttctaacagtcaggaccctcagctgcaggtctgttggggtttgctggaggtccactccagactctacttgcctgcgtatcagcagtggtggctgcagaacagcggatattggtgaactgcaaatgctgctgcctgcttgctcctctggaagttttgtcgcagaggagtacccggccgtgtgaggtgtcagtctgccctacttcagtgtgcctcccagttaggctactcggggatcaggggcccacttgaggaggcagtctttccattctcagatctcaagctgtgtgctgggagaaccactactttcttcaaagctgtcagacagggatatttaagtctgcagaggttactgctgtctttttgtttgtctgtgccctgcccccacaggtggagcctacagaggcaggcaggcaggcctccttgagctgtggtgggctccacccagttcgagcttcccggctgctttgtttacctactcaagccttggcaatggcaggcgactctcccccagccttgctgctgccttgcagtttgatctcagactgctgtgctagcaatgagcgaggctccatgggcgtaggaccctcggagccatgtgtgggatataatctcctggtgggccatttgttaaacccattggaaatgcacagtattagggtgggagtgacctgattttccaggtgccgtctgtcacctctttctttgactaggaaaaggaattccctgaccccttgcacttcccgggtgaggtgttgctccgccctgctttggctaacgcatggtgtgctgcacccactgtcctgcacccactgtcctgcacccactgtccggcactccccagtgagaggaacctggtacttcagttggaaatgtagaaatcacccatcttctacatcgctcacactgggagctgtagactggagcagttcctatttggccatcttggctccaccccctgtgccacattttcttcatgcagtctatcattgttggacatttggcttggttccaagtctttgctattgtgaatagtgctgcaataaacatacatgtgcatgtgtctttatagcagcaagatttataatcctttgggtatatacccagtaatgggattgctgggtcaaatggtatttctagttctagatccctgaggaattgccacactgacttccacaatggttgaactagtttacagtcccatcaacagtgtaaaagtgttcctatttctccacatcctctccagcacctggtgtttcctaactttttaatgatcactgttctaactggtgtgagatggtatctcattttggttttgatttgcatttctctgatggccagtgatgatgagcattttttcatgtgtcttttggctgcataaatgtcttcttttgagaagtgtctattcatgtccttcacccactttttgatgggattgtttgtttttttcttgtaagtttgtttgagttcatcatagattctggatattagccatttgtcagatgagtagatcgcaaaaattttctcccattctgtaggttgcctgttcactctgatggtagtttcttttgctgtgcagaagctcttgagtttaattagctcccatttgtcaattttgtcttttgttgccattgcttttggtgttttagacatgaagtccttgcccatgcctatgtcctgaattttattgcctaggttttcttctagggtttttatggttttaggtctaacatgtaagtctttcatccatcttgaattaatttttgtataaggtataaggaaaggatccagtttcagctttctacatatggctagccagttttcccagcaccgtttattaaatagggaatcctttccccattgcttgtttttctcaggtttgtcaaagatcagatggttgtagatatgcagcattatttctgaaggctctgttctgttccattggtctatatctctgttttggtaccagtaccatgctgttttgattactgtagccttgtagtttagtttgaagtcaggtagcgtgatgtctccaactttgttcttttggcttaggattgacttggcaatgcgtgctcttttttggttctgtatgaattttaaagtagttttttccaattctgtgaagaaagtcattggtagcttgatggggatggcattgaatctataaaatactttgggtaatttggccattttcacgatattgattcttcctgcccatgagcatggaatgttcttccatttgtttgtatcctcttttatttcattgagcagtggtttgcagttctctttgaagaggtccttcacatcccttgtaagttggattcctaggtgttttattctctttgaagcaattgtgaatgggagttcactccgggtttgactgtctgtttgtgtgttattggcgtataagagtgcttgtgatttttgcacattgattttgtatcctgagactttgctgaagttgcttatcagcttaaggagattttgggctgagacgatggggttttctagatataaaatcatgtcatctgcaaacagggacaatttgacttcctcttttcctaattgaatgccctttatttccttctcctgcctgattgccctggcaaaaacttccaactctgtgttgaataggagtggtgagagagagcatccctgttttgtgcccgttttcaaagggaatgcttccagtttttgcccattcagtatgatattggctgtgggtttgtcatagatagctcttattattttgagatacatcccatcaatacctaatttagtgagagtttttaacatgaagggctgttgaattttgtcaaaggccctttctgcatctattgagataatcacatggtttttgtcattggttctgtttatatgctggattatgtttattgatatgcatatgttgaactagccttgctttgcagggttgaaacccacttgatcatggtggataagctttttgatgtgctgctggattcggtttgccagtattttattgaggatctttgcatcgacattcatcagatatattggtccaaaattttctttttttgttgtgtctctgccaggttttggtagtgggatgatgctggcctcataaaatgagttagtgaggattccttctttttctactgtttggaatactttcagaaggaatggtaccagctcctctttgtacctctcgtagaattcgactataaatttgtcttgtcctggactttttttgttggtaggctattaattgttgcctcaatttcagaactttttattggtcttgtcagggatttgactttttcctcgtttaatcttgggagggtgtatgtgttgaggaatttattcacttcttctagattttctagtttatttgcatagaggtgtttatagtattctctgatggtagtttgtatttctgtgggataagtggtgatatcccctttatcattttttattgcgcctatttgattcttctcttttcttctttattattcgaacccatggcaaagaagttaaaaaccttaaaaaaattagatgaatggctgacgagaataatcactgcagagaagtccttaaaggacctgatggagctgaaaaccaaggcacaagaactacatgacgaatgcacaagcctcagtagccgattccatcaactggaagaaagtgtatcagtgatggaagatcaaatgaatgaaatgaagtgagaagtttagagaaaaaggaataaaaagaaacaaacaaagcctccaagaaacatgggactacgtgaaaagaccaaatctacatttgattggtgtacctgaaagtgacagggagaatggaaccaagttggaaaacactctgcaggatattatccaggagaacttccccaatctagcaagacaggccaacattcaagttcaggaaatacagagaatgccaaaagatactcctcaagaagagaaactccaagacacataattgtcagattcaccaaagttgaaatgaaggaaaaaatgttaagggcagccagagagaaaggtcgggttatccacaaagggaagcccatcagactaacagctgatctcttggcagaaactctacaagccagaagagagtgggggccaacattccacattcttaaagaaaagaattttcaacccagaatttcatatccagccaaactaagcttcataagtgaaggagaaataaaatcctttacagacaagcaaatgctgagaggttttgtcaccaccaggcctgccctaaaaaactactgaaggaagcactaaccatggaaaggaacaaccagtaccagccactgcaaaaccatgccaaattgtaaagaccatcaaggctaggaagaaactgcatcaactaacgagcaaaataaccagctaacatcataatgacaggatcaaattcacacataacaatatgaaacttaaatgtaaatgggctaagtgtgccaattaaaagacacagacaggcaaattggataaagagtcaagacccatcagtgtgctgtattcaggaaacccatctcaagtgcagagacacacataggctcaaaataaagggatggaggaagatctaccaagcaaatggaaaacaaaaaaaggcaggggttgcaatcctagtctctgataaaacagactttaaaccaacaaagatcaaaagagacaaagaaggctattacataatggtaagggatcaattcacaagaagcactaactatcctaaatatatatgcacccaatacaggagcacccaatttcataaagcaagtccttagagacctccaaggagacttggactcccacacaataataatgggagactttaacaccccactgtcaacattggacagatcaacgagacagaaagttaaaaaggatatccaggaattgaactgagctctgcaccaagtggacctaatagacatctacagaactctccacctcaaatcaacagaatatacattcttctcagcaccacactgcacttattccaaaattgaccacatagttcaaagtaaagcactcctcagcaaatgtaaaagaacagaaattataacaaactgtctctcagaccacagtgcaatcaaactagaactcaggattaagaaactcactcaattgggaggccgagacgggcggatcacgaggtcaggagatcgagaccatcttggctaacacggtgaaaccccgtttctactaaaaatacaaaaaattagccgggcgtgttggcgggcgcctgtagtcccagctacttgggaggctgaggcaggagaatggcatgaacctgggaggcggagcttgcagtgagccgagatcacgccactgcactccaacctgggagacacagcgagactccgtctcaaaaaaaaaaaaaaaaaaaaaaaaaaaaaaaaagaaactcactcaaaactgctcacctacatggaaactgaacaacctgctcctgagtgattactgggtacataatgaaatgaaggcagaaataaagatgatctttgaaaccaatgggagcaaagacacaacataccagaatctctgggacacatttaaagcagtgtgtagagggaaatttatagtactaaatgcccacaaggaaagcaggaaggatctaaaattgacagcctaacatcacaattaaaagaactagaaaagcaagagcaaacacattcaaaagctagcagaaggcaagaaataactaagatcggagcagaactgaaggagatagagacacaaaaaacccttcaaaaaatcaatgaatccaggagttggttttttgaaaagatcaacaaaattgatagaccgctagcaagtctcttcatcttttgtttgttccctttttgtgtagaagctttctagtttgacataatcccatttgtctattttcacttttgttgtctgtgctttgtggtcatatctaaaacatcattgcccagaccaatgtcatgaagctttttctttgtattttctagtagttttataatttcaggtctaacatttaagtcattaatcaattttgaattgcttgtgtatatagtgggagacaagggtctaattttattcttctgcaagtggatatccagttttcttaacactacttattgaagagaattctggtgattaaaaagtccaagagcatggttctggcatctgctcaacttctggtgagggtcccatactgcatcacaacatggtggagtagcagaaggggaagtgggcatgtgcaaaacgaaaccaaacatgagaggcaacctcattttataacaatcctcttatggcaaccaatctagtcactcaagtgtgaaaactcacttactccctggagactgtattaatccctacgagagggcagatccttcacatctcaaatgcctcttaaaggtcccactatctctcaacaccattatattgggacctagcctttacatgaattttggtggggacacaccatagtcaaaccatagcaccatataaaagcatggtttatttttgggctatctattctttccctttgtctacgtttctgtttctgtgccagtaacatgttgttttgattactatatctttgtagtagattttgagatcaagtggtgggatgcctctaactttgttcattttgttcaataattctttggatattttaggtcttttgtggttccatatgaattttagtgttgtttttcctatttgtattaaaactgtcattggaactttgatagggattgcattgaatctgtaggtcagtttggataatgtagacatttaaacaatattaattcttacaacccaagaacacaggctactgttttatttatttttcttcattttttaaatcaatgctgtaaagttttcaagtgtacaggtatttcactttcttgattaagtttataactaagtgttttaggtataaattattttttgatgctatcatacatgggatttttaaaaatttgtttttcagagagtttgttgttagtatatagaagtgctactgatttttgtatgttgattttgtatcctgcaactttactgaatttacttatttgttttaagattttttttgtgaatactttagagtattctgtatataagatcatgttgtctgccaccagggacaatttaacttcttcctttccaacttggataccttttatttcttactctagcctagttgctatgactaggacttctggtactatgttgaataggagtggtgagggtgggcatccttattttgttcctgattttagaggcaaagctctccacttttcactattgaatatgatcttagctgtggacttgtcatatgtgacctttattgtgttgcggtgcattctttccatacctaatttattgagagttttaatcatgaaaggatgttgaattttgtaaaatgctttttctgcatctattgagatgatcatatggtttttgtctttcattctattaatgtggtatatcacatttagtgatttgcatatgctgaaccatctttgcattcttaggataaatcccatttgatcatagtgaatgattttgttaatgtgctgttgaattttgtttctagtattttcttaagaatttttccatctatgttcatcagggatattagtctgtaattttttcgtggtgtccttgtctggttttggtatcagagtaatgctgactttgcaaaatgattttggaagtatgccctcctcttcaatttttttggaagtgggaagaattattctttacatgtttgttagaattcagctgtggagccatcggatcatgggctcttctttgattggagattttttattactgattcaattgccttattattggtgtattcagatattttatttcttcttgattctgtcttgatagattgtattcgtttaggaatttatcaatttcttttaaattttccagtgtactgtcatataattatttataatagtctcataatcctttgtatttctgtggtttcagttgtaatattgtctctttcatttctgattttatttatttaacttttctttctgttttccttagtctcaccaaaggtttgtcaattttgtttatctttttcaaaaaaccaacttttagttttgttgatcttttctattgttttcttagcctctatttcatttatttctgccctgatctttattatttcctttcttctactaattttggcttagtttgttcttctttttctagtttcttgagatataattttaggttgtttatttgggttctttcttctttttttatgtagacatttattgctataaacttccttcttagaattacttttgctgcattccatttgttttggtatgttgcatgtacattttcacttgtcaagatattttaaaatttcactttaatttccctttgacatattggttgttatggagtatgttgtttaatttccatatacctgtgcattttccacaattattatcattattgatttatagtttctagtttcatattgatttctgttgtggattgaaaagttactggatatggtttcaatattcttaaatttgttaagacttttttggcctaacttgtgatttatccgggaatgttctgtttgtccttgagaggaatgtgtgtctattattgttagatggaatgttctgtatatgtctgttaggtccattttgtctaatgtttagatcaagtccaatgtttccttattggttttctgtcttgataatatgtccattgtttaaagtgaggaattgaagtcctccagtattttcttctcatcttctttgtgatattgcccctactattatagtgttgcagtctatttttccctttatatctattaatatttgctttatatatttatgtgctctgatgttgggtgtatgtgtatttaaaattgttatggcttcttgatgaattgacccctctttatcattatataactaccttgtttgtccctttttacagttttttacttaaagtttattttatctgatgtaagtgtagctacccctgttgtcttttggtctccatttgcacagaatgactttttccatcccttcactttcagtcttgtctatttttgaagctgaagtgagtctgttggaggcacacttattgggctgttgtatttcttaaaaattttcagcctctgtatatcttttggttggagcacttaacccatttacatacatgataataattgacaggtaaggacttactattgccattttgttgttttctcattgttttgtatttcctttgttcctttcatcctctcttgcgttcttcttttgtgattagttgattttctcttctagtttgctttgattctttactttttatcttttgtgtatctactatagattttcgctttgtgattaccatgaagtttgcataaaacataattataacaggctattttaagctgataaaaacttcagttcaattgcatgtgaaagctctacacttttactccataccctcacaacttatatttttgatgccatgatttacatactttcacattgtgtgtctcttaacatattattgtgctattattatttttaacacttttgtcttttaaactttatgctagagttataagtaatttactcaccaccattataatattagactggtctaaattttactgtagttacttttactagtgagttttatattttcatatgttttcatgttgctaattagcatccattctttttagcttgaagaactccctttagcatttctagtaagacaagcttggtggtgatgaacttcctcagcttttgtttgtttgggaaagtataccttatgttttgaagaacaactttactgagtacagtatttattttattattatgattattttattttttgagacagtctcactctctcacccaggctggagtgcagtggtgctatctcggctcactgcaacctccacttcccaggttcaagcaattctcctgtttcagccccccgagtagctgggactacaagcgtgcaccaccattcccggctaatttttgtatttttagtagagacagggtttcaccatgttggccaggctggtgtcgaactcctgacctcaaataatcttaacctgcctcagtctcccaatgtgctgggattacaggcataagccaccacatctagcctgagtacagtattttttattggctgatttttttacttttgctttttttatttttatttttattttattttatttttttgtggcgatagggtcatagggagctatgttgacaaggctggtgtcagatttctggccttaagtgatcctccctccttcacctcccaaagtgctggcattacaggcatgaaccactgtgcctggccaattgacaggttttgtcttttttttctgacttcagcactttgaatatatcattccactctctcctggcctgtcagctttcttcagagaaatacactgatagtgcaactgaaattctcttatatgtgatatccttttctttagctgatttcacgatgctctgtctttgatttttggctgttcaagcatatgtctttgtgcagtcttatttggattgaatctgattgcagacttttgagctttctgtacctgaatatttgtatctttcccccaattgggaatttttccactattgtttattaaaacaaacttcctatccctccctttttctcttctccttctttttaatgtccataattttaaaattagttctattgatgctgccccataaatcccataggctttctttatttgttttcattttttatttttctctatgactgggtaatttcaaataacctgtctttgagttcacagattcttttttctgcttgatcagttttgctgttgatattctctattgtagtttttattttattcattgtattcttcaactgtagaatttctgtgtttttttaaaatctgagatgattaactgattaaatctttctgttaaatttttagttttaaaatttattgttttcctggtttcattgaatttttccccctatattttccttaagttgctatgcttccttaaaacaactattttcaattttttttttcaggcagcatatagatctccatttctttatgggcagccactgggaattattgtgttcttttggtggttatatgtctcctttattttttgtgtttcttgtcagcttacactgatttttgtgcttttggtggagcagtcacctcttctagacattatgggctagtttcactgtagaaagaccttctcctatggtggggtgtatgaagccacttgttgggtgaggtacagtagttctggtattagtgaagatgtacctccatgcagtctttgtgcaactctgtaagctgaggttagtgttgacaaagctcatatggcaatggctccagtgtctgaggcatggcaggtatagtgcagggtcttcactcatcaacctccggatgtttacagtagcagtgaggactgttgagaacttcagtgacaataagttctagggtcttcttgatctcttgctcctactgtgaggttgtggctgagtgagttactcactgacactggatgcagcctgtgggcttgctcctagtagtggaagcactggtatctgatgagtagtgcttgtagagtggccatggagcctaggtctgaagcacaggcacgtatggaagggactatagctctggggtcatggtggtagtgtcagtggtgcctagggtgcagatacccttggtgagttggtaatgttatgctatatgtaggtgcttgtaaagcagtcagggagctgggaactagagcatgggcatgcatagaactacagtgacttcagggtcagggtgaggtcttgctctctatggtggctgaggtggcatctggagtgaggcacagggagtccttagctctaggacctagggtgtgagctagtttgctatactcatggctctgatttgtgacttggggttgcatgcaacatagccttggagcctgggtccaatgtgcaggctcttaatggcaactgaactggtatctatagtgcagtcacacgcagagaaactttggatctggggcctggggtgtgaagtagctttttatggccatggctccaatgtccaaggtatggcaggtacagtgcagccacagagattgtgtctggagtgtgggtacttgcagagtggctatggctcagggattagggtcctgcatggggttgggagaggtggcagctccatccctagagtgccacactggcaactgcttcttgaggagcaggagtgtgcagctatttcttcctttctgggtttcccaatggaatggccattgattacctaattgaccaaagatgctggtgttctctgtggagcgggtcactggggaaccataatggttcctgctgtgtggctgatcccaatagcctctgtcttttatctttgttcctagccaactcctttcatttcgggtatgctgatctcacctgctatcctgtgtgtgtgtgtgtgcgtgtgtgtgtgtgtgtgtgtgtatatatattctctgttttattttgctccactgtgttcctgaagatacttaaatgggcccttgaatcctgtcaggtgtatttctgttcatgggtagctgtgtatatttgatgtttttttttcgtgtgtatgatggaatgaaaactggtatctcttacttcaccttcttggtgacatccttttttaaaaattttatttatttatttattttacaccatcattctgcatttctcttattttcctttttttacaccagacatcttaaatagtaattttttaagatttcaattgtttttaatatatttccatttttccttgttagcaaatcaaaatacaactgttttttgtagattgagtttgtatctagtgactatgcaaaacttatttatttgttttaggagttttaggggtttttctttagtagtgtcttttggattttatatgtagacaattacatcattggcaaatagtggcaattttattattccttttcatctttatgcgtttcatttccttttctttccttattgcgctagcaagtacaatgttaaataggagtgctgagaatgggcatccttgctttgttatttccttagaatatatttttgaaatttattttttgagttagggatttgtccaagtctatggaagaagtattctttcagcatcaagtatgatgttactctaatgggtgtttttttggtagttgatcttcatcaaattgaagtagttttcctctattcctatttgctgaaggggtttttttttttaaatcatgactggtcaaattttgaagaataatatttctatattatattagtctttgattgctgcataataaattaccacagtcttagcatcataaaacaacacctatttattagttagccattctgtaggtcagaagtctgccacattgcagctgggttctctgctcagaatcttacaagactgcaatcaaattgttagccagctcacttttcatctgaaagttctgggggaaagttcacttccaagctctttcttgttgctggcagatttcaattccttgtggtggtaggactgagatccctattttcttgctgtccggtggctcggggttgctctcagctcctagaggccactgacatcctttccatgtgcccttgtctatcttcaagcccgcaataaagtgtcaaatcctcttatgctttgaatctctgatttctttgaccagccagagaaaatgctctgcttttaaaggactcttgtgattagatcaggcccacttgaatactcttttattagtcaactgtgccatataacataacctaagcatgggagtaaaagccatcaaattcactatttcagggaatttaccaacttgtacacttgtgatggtggtgccagaaatctttggagacatcctctgcctaccacatacatctactgagatgagcatttttttttatcattagtctgttgatatggtgaataacattattgaatttcaaacgatgaatgactctcattctcagtataaaccccaactggtcatgatgcattatccttttttatattgttaaatttgatttgctcatattctgttgagaatttgagtctttgtttatgaagaatattagcctgttttattatgcttttataattcttatgtctagttttagtatcagggtagttctggccttataagataagttggaagtggagtttccatcttactgagctagaaaagacagggagggagcagtcttggttcaaattccacagacttgacttttcttaccaaattaaaaaatgtttcttgcagtttcttcttcatttactgtattcttttacaaccattttcagggctttaaatggttgttcttaatttttttcaccagtttcagtggggaatatgtcccatggagctcttcatgctgaagttgatcccctgtccattttttttcccatttttgaaagatctattttgctgagtatggaattctgggtagttttttctttcagcacattaaaaatatccctcaattgtcctctgacttgcagagtttctaatgagaaacgtgatgtaattctttttttcctctgtatgtaaaatgtacatattttctggctgccttaaagattgttctctgtttgatttttagcagtttgatatgtataggtgatttttgtttgttttattttattttagtatttattgttctttgtgttctctgacattattggatctgtggtttggtgtcttattaattttggaaaattttcaccaattgtctttcaaatattattttctgccttattctctcccttttggaattctaatgcacacaggcacacattgtttgatattgttttttgattcttggattttttccccccactcctttctttgtgtttaagttggttaatttctattaatttgtcttcaagttcactgattctttccctggctatattatgttttcaggtgagcttgccaaaagcattatttatctctgttagcatgtttttcattcctagcatttccacttggttctttctaatagctttatcttttctgctgaaatcccctgtggaatcatgcatattgttcacatttaccaatgaagcctttaatatatttattataactacctatatttcctattggataggtccaacatctgtgccatatctgagtctgctactgattcttgctttatctcttgccagtattttttttcttgcttctttgtatgactcatacatttctgttgaaagctagacatcttgtataggataatagaggttgatgtaaacattttttatgcctggaaatgagcatacttacttttcctctaggcctttagtcagtttagttaggacttaaactgggtttgggttttgctgttgttgtagttaccctcagagcaccacaggattctatttcctctagctttaccttgtgtttaatatggggctgatttgctacaggggtttttcaatgtctgctccactctcagatttaggtttgagaaagaaataaaagggcagttcctaatattcggaaactggcctgacactcacaggtagacgatattattctcttgttagatatccacgatatcacagaatgccacctcggataagtttattctgagaccaagataaaaatgagacaaagaaaggtcacttcataattttttttctaagcatagagataagcaagttccctttgccacctgcaaaatactgaacatctttgtcccttggccaaaataactggctgctacttctttattaattaaaactttatttccattctagtatctagataagatttgttgagatagtaaataataggattgcccttactttatgacaacatccaatctagaatgaacccacccttccttagaccctttccctaaatcagccaaccaaagcccaaatcctataattctaacatccaattgttgagacattccatgattccctatgatgtgtgttctccttccttgcaatgaaaaataaaccaaagattttcagctaccaatgtgtaattggctgggtggcattgacagaattagaggttcacaaagattcagctgagaccctcactgcattggactagaatgcttaattccatgacatttgagaccccttctttctttatgtgctcaatgtgccacctacttttgattagaagatacgtttatactaaattgagctctgctcaggccactgcactccagcctgggcaacagaatgagactccgtctcaaaaataaataaataaattgagctctggtattttgttggaggtcttcaatgttgtgtttattttgttttcttaaaagtaggcccccctttgggattttggttttctgattagatttgtgttgttctttgatgacattgttctctagcatctacagcttgcttgccaaatgccttgtcttgtttgtctgcttgtctattgtcttgaatcttgtttttctacaagaagaaccatttttggggagataatgggaagagacctgataagtttatcctcaaactaggcttgggggatgagaagttcagatttctttttagactggtattttttggacaaactttgctataatcaacatttcaaaccttataaggacttttcccttattctttttttttgtctttgtgaactgcttttgtttgagtttcatctgcatgaaatcagaaggtttgtctcatccctgatgagtaatgatctttgactaagatctagatatacaaggacacgtgaccaccattcttacaggcatattgaggttctcataggatcttttcaatctaaaactgtatctcctccagaatggacagtttcctttattttttcttggtacaacacgaactcctgtgtacacctaactggcacaatttcagtttgaaattacagtggatgcttgggaaccttttgatatagacaaacttgttcatttgagaggtgcctttgaacaaaagagaattgaaatgctgactgtccaatggtttgctttctttcattggtatgaagagggatttgaataaaatttgcactaaaaattgcctttctaaaagatcatctagctaaaactaatgcaaaatataagcaacctaagaccatttgccttgtggatcaactaaaatcccatttcaattcttcctatctgtgtcccattctccctctacctcctttgccttcaccatcagaaccttatttaactttcatggagttcttccttttgtctccttctctttctaaataagttgcactacctcttcctcaaaatcccttaaaattgcaacctcaacagaagaaagatcccggcagtgagcgggacacagattttaagcctgggtcacactcactgcaatagttacatacatccctaattccaaaataaaaagagaaaattcaataaagtattcaaacttattatgggcacatacaacacgggcctcatggacctctaccaacaaattcaccttttggtggggccaggaaatacaaaaccttagttagaaaaggccaattggaaagacctagaaagtgacttcaaaaacaatcaggacaccttaagcacagcaaataggccataaccttttgaaaactataccataactctttcccactaaaataaaccagaccttgacagaatagatccataagatactcaaagacagactaataagcattcttaaaaaaattttcagggttcacccccaatgttgacatttctaatactctttccactttctttgataaattaaagccagaaattgcagatatggtacataaaaaaaattgcctggcaaaccatgtcactaattgaacttcagcatttggctaaacatttttaaatggctttaaatatcaaatgagaaagtaaaaccccaaactaaccttatacaattataagtaaagcatttaaatagatatttctcatccacaagggacaataaatattttccctttaacaaagacacttgctgatactataaataaatgggacactggaaaaaataactgtcccatcttaactaaaaagaaaaatgaactaccaaccctcttttttctaaagaattattatatgaagctgctctgcgggggattcccttaaatcacaaggagaactatctttaataatagaaaaacaaaaacaaacttttttggtagatatgggcactactctgttgactataaatcccattacaattgcaactcattttccttggagtcataaaactattctggtgacaggaatttcaaacaatcctcaaactattcccaatacctcaacctgtgactgtaactctcagcctcctcattagtcaacatgtatttcttctccctgacaccaattattgaaagagatcttttatgtaaatgtattgccaaatcaaatgctcctcaggtgaactacttctcaaaatacctcattattcttccatgcatgattctttaatggtgcagttagatatcaagttgactatccttataagcttgaccaaatctgggtttgaggatttatgtgaggttccttattctccagcagttctacagatgtgagaagaattctagggattaaacttctaatgtagaaaaggacttcttgaaattcttccctaaagttgtttgataccttctaaacctaaaactaaagaaggattgagccccttttgtggaaggttttatgaaatgatgactagttacttctcacactagtccaggtaatattccaatgttgcctgttaaaaagactcatgggagtggatattgatttgtgtaagaccttaagtctaaaaataagattgtgattctttgtttcccagtggtcagtcccaaatctaaatattttgtcctaaatactgcaagaagccacctacttcattgtagcaaagttatgttctgcctttttagcatcccactggattcagatagtttatatttatttgacttcttatgagaaaaccaatgatatagctggactgttatgctccagggatttactgacaccttcccttatttatctgaaattcctgactgggactttaaggatttgagatttacttatgattctctccttatacaatgatcttttactgtgttccaatgatgatattgtactatgcttaaaaaacaggaaaagctttaagattgattctgtgtatttattaaatctctacaatacttcccaatgctggggttgcagagatagtataaacctttttttctttttcttcatgaagggtccggacataattgagtcataattgagtatggacccaattatatgggaatcatgtataaaatatatttcaatgatagtatgcttttcaggctaaaagaagcatgtacaagtttatgtgcaaagactggcagaatattaaagattgctttttaagattctagattcaattctgtgaagaaagtcatggtagcttgatggggatggcattgaatctataaattaccttgggcagtatggccattttcacgatattgattcttcctacccatgagcatggaatgttcttccatttgtttgtagcctcttttatttcattgagcagtggtttgtagttctccttgaagaggtccttcacatcccttgtaagttggattcctaggtattttattctctttgaagcaattgtgaatgggagttcacccatgatttggctctctgtctgttattggtgtataagaatgcttgtgatttttgcacattgattttgtatcctgagactttgctgaagttgcttatcagcttaaggagattttgggctgagacgatggggttttctagatataaaatcatgtcatctgcaaacagggataatttgacttcctcttttcctaattgaatgccctttatttccttctcctgcctaattgccctggccagaacttccaacactatgttgaataggagtggtgagagagggcatccctgtcttgtgccagttttcaaagggaatgcttccagtttttgcccattcagtatgatattggctgtgggtttgtcatagatagctcttattattttgaaatacgtcccatcaatacctaatttattgagagtttttagcatgaagggctgctgaattttgtcaaaggccttttctgcatctattgagataatcatgtggtttttgtctttggttctgtttatatgctggatgacatttattgatttgcgtatattgaaccagccttgcatcccaggaaagaagcccacttgatcatggtggataagctttttgatgtgctgctggattcggtttgccagtattttattgaggatttttgcatcaatgttcatcaaggatattggtctaaaattctcttttttggttgtgtctctgcctggctttggtatcaggatgatgctggcctcataaaatgagttagggaggtttccctttttttctattgattggaatagtttcagaaggaatggtaccagttcctccttgtacctctggtagaattcggctgtgaatccatctggtcctggactctttttggttggtaagctattgattattgccacaatttcagagcctgttattgttctattcagagagtcaacttcttcctgatttagtcttgggagggtgtatgtgtcgagggatttatccatttcttctagattttctagtttatttgcatagaggtgtttgtagtattctctgagggtagtttgtatttctgtgggatcggtggtgatatcccctttatcattttttattacatctatttaattcttctctcttttcttctttattagtcttgccagcagtctatcaattttgttgatcctttcaaaaaaccagctcctggattaattaattttttgaagggttttttgtgtctctatttccttcagttctgctctgattttagttatttcttgccttctgctagcttttgaatgtgtttgctcttgcttctctagttcttttaattgtgatgttagggtgtgaatttttggtctttcctcctttctcttgtgggcatttagtgctataaatttccctctacacactgctttgaatgtgtcccagagattctagtatgttgtgtctttgttctcgttgttttcaaagaacatctttatttctgccttcatttcgttatgtacccagtagtcattcaggagcaggttgctcagtttccatgtagttgagtggttttgagtgagtttcttaatctcgagttctagtttgattgcactgtggtctgagagacagtttgttataatttctgttcttttacatttgctgaggagtgctttacttccaactatgtggtcaattttggaataggtgtggtgtggtgctgaaagaaatgtatattctgttgatttggggtggagagttctgtagatgtctattaggtctgcttggtgaagagctgagttcaattcctgggtatccttgttcactttctgtctcattgatctgtctaatgttgacactggggtgttaaagtctcccattattattgtgtgggagtctaagtctctttgttggtcactcaggacttgctttatgaatcttggtgctcctgtattgggtgcatatatatttaggatagttagctcttcttgttgaattgatccctttaccattatgtaatggccttctttgtctcttttgatctttgttggtttaaagtgtgttttatcggagactgggattgcaacccctgcctttttttgttttccatttgcttggtagatcttcctccatccttttattttgagcctatgtgtgtctctgcaggtgagatgggtttcctgaatacagcacactgatgggtcttgactctttatccaatttgccagtctgtgtcttttaattggagcatttagtccatttacatttaaagttaatattgttatgtgtgaatttgatcctgtcattatgatgttagctggttattatgcttgttagttgatgcagtttcttcctagccttgatggtctttaccatttggcatgattttgcagtggctggtaccagttgttcctttccatgtttagtgcttccttcaggagctcttttagggcaggcctggtggtgacaaaatctctcagcatttgcttgtctgtaaaggatgttatttctctttcacttatgaagcttagtttggctggatatgaaattctgagttgaaaattcttttctttaagaatgttgaatattggcccccactctcttctggcttgtagagtgtctgctgagagatccgctgttcatctgatgggcttcccttcatgggtaacccaacctttctctctggctgcccttaacatcttttccttcatttcaactttggtgaatctgacaattatgtttcttggagttgctcttctcgaggagtatctttgtggcattctctgtatttcctgaatctgaatgttgccctgccttgctagattggggaagttctcctggataatatcctgcagagtgttttccaacttggttccattctccccgtcactttcaggtacaccagtcagacgtagatttggtcttttcacatagtcccatatttcttggaggctttgttcatttctttttattcttttttctctaaacttcccttctcacttcatttcattcatttcatcttccatcactgatacccttcttccagtcgatcgcatcagctcctgaggcttctgcattcttcacgtagttctcgagccttggctttcagctccatcagctcctttaaggacttctctgtattggttattttagttatacattcgtctaaatttttttcaaagttttcaacttccttgcctttggtttgaatttcctcctgtagcttgaagtagtttgatcgtctgaagccttcttctctcaactcgtcaaagtcattctctgtccggctttgttccgttgctggtgaggagctgcattcctttggaggaggagaggcactctgctttttagagtttccggtttttctgctctgttttttccacatctttgtggttttctctacctttggtctttgatgatggtgacatacagatggttttctggtgtggatgtcctttctgtttgttagttttccttctaacagacaggaccctcagctgcaggtctgttggagtttgctagaggtccactccagactctgtttccctgggtaccagcagcagtggctgcagaacagcggattttcgtgaacggaatgctgctgtctgatcgttcctctggaagttttgtctcagaggagtaccccggccatgtgaggtgtcagtctggcctctactggggggtgcctcccagttaggctgctcgggggtcaggggtcagggacccacttgaggaggcagtctgcccattctcagatctccagctgcgtgctgggagaaccactgctctcttcaaagctgtcagacagggacatttaagtctgcagagtttactgctgtctttttgtttgtctgtgccctgcccccagaggtggagcctacagaggcaggcaggcctccttgagctgtggtgggctccacccagttcgagcttccaggctcctttgtttacctaagcaagcctgggcaaaggtggactcccctcccccagccttgctgctgccttgcagtttgatctcagactgctgtgctagcaatcagcaagactccgtgggcgtaggaccctccaagccatgtgcgggatataatctcccggtgtgccgttttttaagctcattggaaaagtgcagtattggggtgggagtgatctgattttccaggtgccgtctgtcacccctttctttgactaggaaagggaactccctgagcccttgcacttcccgagtgaggcagtgcctcgctcttcttcggctcatgcacggtgcactgcacccactgtcctgcacccactgtctggcactccctagtgagatgaacccagtacctcagatggaaatgcagaaatcacccatcttctgtttcactcacgctgggagctgtagaccagagctgttcctatttggccatcttggctcggtcc

SEQ ID NO: 10324 - DNA, 6651 bp, Homo sapiens
tttgtttttattattattattattattatttttaattattatactttaagttttagggtacatgtgcacattgtgcaggttagttacatacgtatacatgtgccatgctggtgtgctgcacccactaactcgtcatttagcattaggtatatctcccaatgctatccctcccccctcccccccccacaacagtccccagagtgtgatgttccccttcctgtgtccatgttatctcactgttcagttcccacctatgagtgagaatatgcggtgtttggttttttgttcttgcgatagtttactgagaatgatgatttccaatttcatccatgtccctacaaaggacacgaactcatcattttttgtggctgcatagtattccatggtgtatatgtgccacattttcttaatccagtctatcattgtaggacatttgggttggttccaagtctttgccattctgaataatgccacaataaacatacatgtgcatgtgtctttatagcagcatgatttatagccctttgggtatatacccagtaatgggatggctgggtcaaatggtatttctagttctagatccctgagcaatcgccacactgacttccacaatggttgaactagtttacagtcccaccaacagtgtaaaagtgttcctatttctccacatcctctccagcacctgttgtttcctgactttttaatgattgccattctaactggtgtcagatggtatctcattgtggttttgatttgcatttctctgatggccagtgatggtgagcattttttcatgtgtcttttggctgcataaatgtcttcttttgagaagtgtctgttcatgtccttcgcccactttttgatggggttgtttgtttttttcttgtaaatttgtttgagttcattgtagattctggatattagccctttgtcagatgagtaggttgcgaaaattttctcccattttgtaggttgtctgttcactctgatggtagtttcttttgctgtgcagaagctctttagtttaattagatcccatttgtcaattttgtcttttgttgccattgcttttggtgttttagacatgaagtccttgcccatgcctatgtcctgaatggtaatgcctaggttttcttctacggtttttatggttttaggtctaacgtttaagtctttaatccatcttgaattgatttttgtataaggtgtaaggaagggatccagtttcagctttctacatatggctagccagttttcccagcaccatttattaaatagggaatcctttccccattgcttgtttttctcaggtttgtcaaagatcagatagttgtagatgtgcggcattatttctgagggctctgttctgttccattgatctatatctctgttttggtaccagtaccatgctgttttggttcctgtagccttgtagtatagtttgaactcaggtagtgtgatgcctccagctttgttcttttggcttaggattatcttggcaatgcgggctcttttttggttccatatgaactttaaagtagttttttccaattctgtgaagaaaggcattggtagcttgatggggatggcattgaatctgtaaattaccttgggcagtatggccattttcacaatattgattcttcctacccatgagcatggaatgttcttccatttgtttgtatcctcttttatttcattgagcagcggtttgtagttctccttgaagaggtccttgacatcccttgtaagttggattcctaggtattttattctctttgaagcaattgtaaatgggagttcactcatgatttggctctctgtttgtctgttgttggtgtataggaatgcttgtgatttttgcacattgattttgtatcctgagactttgctgaagttgcttatcagcttaaggagattttgggctgagacaatggggttttctagatatacaatcatgtaatctgcaaacagggacaatttgacttcctcttttcctaattcaataccctttatttccttctcctgcctaattgccctggccagaacttccaacactatgttgaataggagtggtgagagagggcatccctgtcttgtgccagttttcaaagggaatgcttccagtttttgcccattcagtatgatattggctgtgggtttgtcatagatagctcttattattttgaaatatgtcccatcaatacctaatttattgagggtttttagcatgaagcgttgttgaattttgtcaaaggccttttctgcatctattgagataatcatgtggtttttgtctttggctctgtttatatgctggattacatttattgatttgcgtatattgaaccagccttgcatcccagggatgaagcccacttgatcatggtggataagctttttgatatgctgctggattcggtttgccagtattttattgaggatttttgcatcaatgttcatcaaggatattggtctaaaattctcttttttggttgtgtctctgcctggctttggtatcagaatgatgctggcctcataaaatgagttagggaggattccctctttttctattgattgcaatagtttcagaaggaatggtaccagtttcctccttgtacctctggtagaattcggctgtgaatccatctggtcctggactctttttggttggtaagctattgattattgccacaatttcagatcctgttattggtctattcagagattcaacttcttcctggtttagtcttgggagagtgtatgtgtcaaggaatttatccatttcttctagattttctagtttatttgcgtagaggtgtttgtagtattctctgatagtagtttgtatttctgtgggattggtggtgatatcccctttatcattttttattgcatctatttgattcttctctctctttttcttaattagtcttggtagcagtctatcaattttgttgatcctttcaaaaaaccagctcctggattcattaattttttgaagggttttttgtgtctctatttccttcagttctgctctgattttagttatttcttgccttctgctagcttttgaatgtgtttgctcttgcttttctagttcttttaattgtgatgttagggtgtcaattttggatctttcctgctttctcttgtgggcatttagtgctataaatttccctctacacactgctttgaatgcatcccagagattctggtatgttgtgtctttgttctcgttggtttcaaagaacgtctttatttctgccttcatttcattatgtacccagtagtcattcaggagcaggttgttcagtttccatgtagttgagtggttttgagtgagattcttaaacctgagttctagtttgattgcactgtggtctgagagatagtttgttataatttctgttcttttacatttgctgaggagagctttacttccaagtatgtggtcaattttggaataggtgtggtgtggtgctgaaaaaaatgtatattctgttgatttggggtggagagttctgtagatgtctattaggtccacttggtgcagagctgagttcaattcctgggtatccttgttgactttctgtctcgttgatctgtctaatgttgacagtggggtgttaaattctcccattattaatgtgtgggagtctaagtctctttgtaggtcactcaggacttgctttatgaatctgggtgctcctgtattgggtgcatatatatttaggatagttagctcttcttgttgaattgatccctttaccattacgtaatggccttctttgtctcttttgatctttgttggtttaaagtctgttttatcagagactaggattgcaacccctgcctttttttgttttccatttgcttggtagatcttcctccatccttttattttgagcctatgtgtgtctctgcacgtgagatgggtttcctgaatacagcacactgatgggtcttgactctttatccaatttgccagtctgtgtcttttaattggagcatttagtccatttacatttaaagttaatagtgttatgtgtgaatttgatcctgtcattatgatgttagctggttattttgctcgttagttgattcagtttcttcccagtctcgatggtctttacattttggcatgattttgcagcggctggtaccggttgttcctttccatgtttagcgcttccttcaggagctcttttagggcaggcctggtggtgacaaaagctctcagcatttgcttgtctgtaaagtattttatttctccttcacttatgaagcttagtttggctgggtatgaaattctgggttgaaaattcttttctttaagaatgttgaatattggcccccactctcttctggcctgtagagtttctgccgagagatccgctgttagtctgatgggcttccctttgagggtaacccgacctttctctctggctgcccttaacattttttccttcatttcaactttggtgaatctgacaattatgtgtcttggagttgctcttctcgaggagtatctttgtggcgttctctgtatttcctgaatctgaacgttggcctgccttgctagattggggaaattctcctggataataccctgcagagtgttttccaacttggttccattctccccatcactttcaggtacaccaatcagacgtagatttggtcttttcacatagtcccatatttcttggaggctttgctcgtttctttttattcttttttctctaaactttccttctcgcttcatttcattcatttcatcttccattgctgataccctttcttccagttgatcgcatcggctcctgaggcttctgcattcttcacgtagttctcgagccttggttttcagctccgtcagctcctttaagcacttctctgtattggttattctagttatacattcttctaaattttcttcaaagttttcaacttctttgcctttggtttgaatgtcctcccgtagctcagagtaatttgattgtctgaagccttcttctctcagctcgtcaaagtcattctctgtccagctttgttcccttactggtgaggagcagcgttcctttggaggaggagagacgctctgatttttagagtttccagtttttctgttctgctttttccccatctttgtggttttatctacttttggtctttgatgatggtgatgtacagatgggtttttggtgtggatgtcctttctgtttgttagttttccttctaacagacaggaccctcagctgcaggtctgttggagtaccctgcagtgtgaggtgtcagggtgcccctgctggagggtgcctcccagttaggctgctcggggttcagtgacccactttaggaggcagtctgcccgttctcagatctccagctgcgtactgggagaaccactgctctcttcaaagctgtcagacagggacatttaagtctgcagaggttactgctgtctttttgtttgtctgtaccctgcccccagaggtggagcctacagaggcaggcaggcctccttgagctgtggtgggctccacccagttcgagcttcccggctgctttgtttacctaagcaagcctgggcaatggtgggcgcccctaccccagcctcgctgccgccttgcagtttgatctcagactgctgtgctagcaatcagcgagactccgtggggtaggaccctccaagccaggtgcgggatataatctcgtggtgcgccgttttttaagcccgtcagaaaagtgcagtattcgggtgggagtgacctgattttccaggtgccgtccgtcacccctttctttgattaggaaagggaactccctgaccccttgcgcttcccgagtgaggcaatgcctcaccctgctttggctcgcgcacggtgcgtgcacccactgacctgcacccactgtctggcactccctagtgagatgaacccggtacctcagatggaaatgcagaaatcacccgtcttctgcgtcgctcaggctgggagctgtagaccggagctgttcctattcggccatcttggctcctccccctgttttaattattaatttgactcttttgtattgtgttcagggaatatgttcacattttgaaatttatggaaattttgttagtagtttggtaaatggtccatttttatagatattccactttttataaatactaagtactaatagatttcattaatagtgttcaaatcctttatatcttttttatttaataaatgatattaggttatttaagaaaatgtttatatgtgtgtatattttggagataaatgacatgtatggaatttggcttaaaatagcccagcaaatataaaagggagtgatggatagattaaacagatgaaccaaaatgtttgtgcttgttacagctgggttatagtagggtttgtattctctacttttgtgtagtctaaaattttataataataaaaagttttaaaactcctctctacccttatttgtttttagattgcttgatctgttgattcctgagaaaggtgtgttaaagttttccattatgttatattatttttctaatactgtttacttgatattttgaacccatgtaattcagtgcataaaattttactacagttaaatttccttttatcataataaaatctcttt

SEQ ID NO: 10325 - DNA, 8207 bp, Homo sapiens
tcttttttttattttatttttattatactttaagttttagggtacatgtgcacaatgtgcaggtttgttacatatgtatacatgtgccatgttggtgtgctgcacccattaactcgtcatttagcattaggtatatctcctaatgctatccctcccccctccccccaccccacaacagtccctggtgtgtgatgttccccttcctgtgtccatgtgttctctttgttcaattcccacctatgagtgagaacatgtggtgtttggtttttttgtccttgtgatagtttgctgagaatgatggtttccagcgtcatctatgtccctacaaaggacatgaactcatcattttttatggctgcatagtattccatggtgtatatgtgccacattttcttaatccagtctatcattgttggacatttgagttggttccaagtctttgctattgtgaatagtgccgcaataaacatacatgtgcatgtgtctttatagctgcatgatttataatcctttgtgtatatacccagaaatgggatggctgggtcaaatgatatttctagttctagatccctgaggaatcgccacactgacttccacaatggttgaactagtttacagtcccaccaacagtgcagaagtgttcctatttctccacatcctctccagcacctgttgtttcctgtctttttaatgatctccactctaactggtgtgagatggtatttcattgtggttttgatttgcatttctctgatggccagtgatgatgagcattttttcatgtgttttttggctgcataaatgtcttcttttgagaagtgtctgttcatatccttcgcccactttttgatggggttgtttgttttttttcttgtaaatttgtttgagttcattgtagattctggatattagccctttgtcagatgagtaagtatactcatttttatagacataccaagtgataacatatgaaatgagatgaaatgaacgttaactccgctgtggaaaaattgtcatttttaaagaggtgaccatcatgtaaacaacaaccactgccattattgccgctgctaatgcttagatttactaccagctaatatttatggagtaataattatatggcaggaactgtaatacattgtttaaatatagtttattatttaaccctctgagtccggtttgttactcctattttacagatgataaaattgagacttttaaaacttaagtatagtgcccacggtgacaaggttgaacagccaagattctgatatagaccatctgtctctaaaaccatgctcctaacactgccctatattgcctccctaaatatatatatatatataacatacatatatataatatatatataatatacatataattaattctaaaacttacatgtatatatgtaagttttagaattaattatatgtctaggctatactgcagtagccaattccttccagggaaaggggaaactatagaagagacaacactaccctcaagttgaacttgaaatatgagactctctctaggtaaacaaaaagacaagggcataagggcagaatatcagtatcaacactgtatgttattttctaagagcttgggaagcgtggctatctagctgaaggtaattcagatctgttggagggatagtatgggagggggaattttcataagagaaaagcctaggaagacaatcagaaggcacatcatagtcaagagatataaataattcacactcaagaaaatgggaagctgttgatgatggtgtgctatggagagtcctaatcagttttgtttttgaaataatacccaacctgcagaattaggtcactattatgacatgtttgtagagtgcatgatcattgtttaggaaactggatgaatgccagaaggatgccctgaaaaaatggatgggagtttaaatgttaccttcgtgtagtagatgtaccatcagctgcatctgacctcttactattctttaacttctcagttactgcaaatcagtgttcttaataagagactggagatatttgagaggaagatttttctataaatgcttgattggagccctttattcatttggctcaaaattaagacaatgatatctgaataaatgtagttctataattatatactttattataaaactttcacatatattttcacatatgatactcaaataaccttatgaatttagtagcatagctgttttttgctacaatttgaatatgagaaaagagagcagtagaaaggtgaaactgttgccgtaagtctactaaatggcagagccaagacctcaagtgggcctcttgtgcaaaccactgttacttttacacttgatttagccaaaaggctgagaagcgataccagtgttacttttttctatgctcacatatcaccttgatctgagacaaattatctctcattgttttgtcacaattatgtgatatacttttatttaaagaattaaactgctatataattcctattcaaattttctatatgctattatattttccttgtatatctacatactcttttattacttcacagtataaactttctcatgtatatactttttttcactagcaattgtctacatctcaaaaatttcacctgtcaagtgtataaatttcctcagtaaataaaaagctgctgaatatttttatatgagctttaaacttagcttcaccttgtttccattatgctgcaaggtgctttaaaggtagaaatgcatttctggtctgctcacaaacagatgaaaaattattttcctgccttctttgattttactttctcgtatgcactcatttgagttatatctcatctgtgttaaaatggaggtagctgtatatcagcaaagtagaaagaattcttgatactaaagtagtacatttccttgccttgttttcttttccttcatagagtttagtagtgttcattttatttatttgaatgtcaaaattctcagattactgccaaatattgtgattatagcagtttaggtgaataaaaacaagtaatggctgaatttaattatggataataaccatatgagaaagggatgaaagaacccctgaatctcctagagcttcatcatcactatttattttgcaaaataattatttagaattaatgagcttatatcagaattgatgtatgactgattttactttattttttaaaattttattattattgtactttaagttttagggtacatgtgcacaacgtgcaggtttgttacatatgtatgcatgggccatgtcggtgtgctgcacccattaactcgtcatttagcattagatatatctcctaatgctatccctcccccctccccccaccccacaacagtccctggtgtgtgatgttccccttcctatgtccatgtgttctctttgttcaattcccacctatgagtgagaacatgcggtgtttggttttttgtccttgtgatagtttgctgagaatgatggtttccagcttcatccatgtccctacaaaggacatgaactcatcattttttatggctgcatagtattccatggtgtatatgtgccacattttgttaatccagtctatcgttgttggacatttgagttggttccaagtctttgctattgtgaatagtgccgctataaacatacatatgcatgtgtctttataggcacataatttataatcctttgtgtatatacacagtaatgggatggctgggtcaaatgctatttctagttctagatccctgagaaatcgccacaccaacttccacaatggttgaaatggtttacagtcccaccaacagcataaaagtgttcctatatctctacatcctctccagcacctgttgtttcctgactttttaatgatcgccattctaactggtgtgagatggtatctcattgtgattttgatttgcatttctctgatggccagtgatgatgagcattttttcatgtgttttttggctgcataaatgtcttcttttgagaagtgtctgttcatatcctttgcccactttttgatggggttgtttttttcttgtaaatttgtttgagttcattgtagattctggatattagcccgttgtcagatgagtaggttgcaaaaattttctccgattctgtaggttgcctgttcactctaatggtagtttcttttgctgtgcagaagctctttagtttaattagatcccatttgtcaattttcgcttttgttgccattgcttttggtgttttagacatgaagtccttgcccatgcctatgtcctgaatggtattgcctaggtttttttctagggtttttatggtttgaggtctaacatttaagtctttaatccatcttgaattaatttttgtataaggtgtaaagaagggatccagtttcagctttctacatatggctagccagttttcccagcaccatttattaaatagggaatcctttccccatttcttgtttttgtcaggtttgtcaaagatcagatagttgtagatatgcagcgttatttctgagggctctgttctgttccattggtctatatctctgttttggtaccagtaccatgctgttttggttactgtagccttgtagtatagtttgaattcaggtagcatgatgcctccagctttgttcttttggcttaggattgacttggtgatgcaggctcttttttggttccatatgaactttaaagtagttttttccaattctgtgaagaaagtcattggtagcttgatggggatggcattgaatctataaattaccttgggcagtatggccattttcacgatattgattcttcctacccatgagcatggaattttcttccatttgtttgtatcctcttttatttcattgagcagtggtttgtagttctccttgaagaggttcttcacatcccttgtaagttggattcctaggtattttattctctttgaggcaattgtgaatgggcgttcactcatgatttggctctctgtttgtctgttattgatgtataagaatgcttgtgatttttgcacattgattttgtatcctgagactttgctgaagttcttatcagcttgaggagattttgggctgagatgatggcgttttctagatatacaatcatgtaatctgcaaacagggacaatttgacttcctcttttcctaattgaataccctttatttccttctcctgcatgattgccctggccagaacttccaacactatgttgaataggagtggtgagagagggcatccctgtcttgtgccagttttcaaagggaatgcttccagtttttgcccattcagtatgatattggctgtgggtttgtcatagatcgctcttattattttgagatacatctcatcaatacctaattgattgagggtttttagcatgaagcgttgttgaattttgtcacaggccttttctgcatctattgagataatcatgtgttttttgtctttagttctgtttatgtgttggattacatttattgatttgcgtattttgaaccagccttgcatcccagggatgaagcccacttaatcatggtggataagctttttgatgtgctgccggattcggtttgccagtattttactgaggatttttgcatcgatgttcatcaagaatattggtctaaaattctgttttttggttgtgtctctgccagtctttggtatcaggatgatgctggcctcataaaatgagttagggaggattccctctttttctattgattggaatagtttcagaaagaatgctaccagctcctatttgtacctctggtagaaatcggctgtgaatccatctggtcctggactttttttggttggtaagctattgattattgcctcaatttcagagcctgttattggtctattcagagattcaacttcttcctggtttagtcttgggaggatatatgtgtggaggaatttatccatttcctctagattttctagtttatttgcatagaggtgtttatagtattctctgatggtagtttgtatttctgtgggattggtggtgatatcccctttatcattttttattgcgtctatttgatttttctctcttttcttctttattagtcttgccagcagtctatcaattttgttgatcttttcaaaaaaccagctcctggattcattaattttttgaagggttttttgtgtctctatttccttcggttctgctctgatcttaattatttcttgccttctgctagcttttgaatgtgtttgctcttgcttttctagttcttttaattgtgatgttagggtgtcaattttagatctttcctgctttctcttgtgggcatttagtgctataaatttccttcttcacacagctttgaatgtgtcccagagattctggtatgttgtgtctttgttctcgttggtttcaaagaacatctttatttctgccttcatttcattatttactcagtagtcattcaggaacaggttgttgagtttccatgtagttgagcagttttgagtgagtttcttaatcctgagttctagtttgattgcactgtggtctgagagacagtttgttataatttctgttcttttacatttcctgaggagtgctttactccaactatgtggtccgttttggagtaggtgtggtgtggtgccgaaaagaatgtatattctgttgatttggggtggagagttctagagatgtctattaggtccgcttggcgcagagctgagttcaattcctgggtatccttgttaactttctgtctctttgatctgtctaacgttgacaatggggtgttaaagtctcccattattaatgtgtgggagtctaagtctctttgtaggtcactaaggacttgctttatgaatctgggtgctcctgtattgggtgcatatacatataggatagttagctcttcttgttgaattgatccctttaccattatgtaatggccttctttgtctcttttgaactttgttggtttaaagtctgttttagcagagactgggattgcaaaccctgcctttttttgttttccatttgcttggtagatcttcctccatccctttattttgagcctatgtgtgtctctgcacgtgagatgggtttcctgaatacagcacactgatgggtcttgactctttatccaatttgccagtctgtgtcttttaattggagcatttagcccatttacatttaaagttaatattgttatgtgtgaatttgatcctgtcattatgatgttagctggttattttgctcgttagttgatgcagtttcttcctagccttgatggtctttacaatttggcatgtttttgcagtggctggtaccagttgatcctttccatgtttagtgcttccttcaggagctcttttagggcaggcctggtggtgacaaaatctctcagcatttgcttgtctgtaaagtattttatttctccttcacttatgaagcttagtttggctagatatgaaattctgggttgaaaattcttttctttaagaatgttgaatattggtccccacactcttctggcttgtagagtttctgcggagagatcagctgttagtctgatgagcttccctttgtgggtaatccgacctttctctctggctgcccttaacattttttccttcatttcaactggtgaatctgacaattatgtgtctttgagttgctcttctcgatgagtatctttgtggcattctctgtattttctgaatctgaatgttggcctgccttgctagattggggaagttctcctggataatatcctgcagagtgttttccaacttggttccattctccccatcactttcaggtacaccaatcagacatagatttggtcttttcacatagtcccatatttcttggaggctttgttcatttctttttattcttgtttctctaaacttctcttctcgctgcatttcattaatttcgtcttccattgctgataccctttcttccagttgatcgcatcggctattgaggcttctgcatttgtcacgtagctcttatgccttggttttcagctccatcaggtcctttaaggacttctctgcattggttattctagttatctggtcgtctaattttttttcaaagcttttaacttctttgccattcattcgaatttcctcctgtagctcagagtagtttgatcatctgaagccttcttctctcaacttgtcaaagtcattttcc

SEQ ID NO: 10326 - DNA, 5974 bp, Homo sapiens
tttttattattattatactttaacttttaggatacatgtgcacaacgtgcaggtttgttacatatgtatacatgtgccatgttggtgtgctgcacccattaactcgtcatttagcattaggtatatctcctaatgctatccttctcccctcccaccaccccacaacagtccccggtgtgtgatgttccccttcctgtgtccatgtgttctcattgttcaattcccacctgtgagtgagaacatgcggtatgtggttttttgtccttgcgatactttgctgagaatgatagtttccagcttcatccatgtccctacaaaggacaggaactcatcattttttatggctgcatagtattccatggtgtatacatgccacattttctttttttttttaaacatttgaaaacctttattttttttatttttttattttttattttattttattttattttattattattatactttaagttttagggtatatgtgcacaacgtgcaggttagttacatatgtatacacgtgccatgctggtgtgctgcacccagtaactcgtcattaagcattaggtatatctcctaatgctatccctcccccatccccccaccccacaacagtccccagagtgtgatgttccccttcctgtgtccatgtgttctcattgttcaattcccacctatgagtgagaatatgcggtgtttgctttcttgttcttgcgatagtttactgagaatgatgatttccaatttcatccatgtccctacaaaggacatgaactcatcattttttatggctgcatagtattccatggtgtatatatgccacattttcttaatccagtctatcattgttggacatttgggttggttccaagtctttgctattgtgaatagtgctgcagtaaacatacgtgtgcatgtgtctttatagcagcatgatttatagtcctttgggtatatactcagtaatgggatggctgggtcaaatggtatttctagttctagatccctgaggaatcgcctcactgacttccacaatggttgaactagtttacagtcccaacaacagtgtaaaagtgttcctatttctccacatcctctccagcacctgttgtttcctgactttttaatgattgccattctaactggtgtgagatggtacctcattgtggttttgatttgcatttctctgatggccagtgatggtgagcattttttcacgtgtgttttggctgcataaatgtcttcttctgagaagtgtctgttcatgtccttcgcccactttttgatgaggttgtttgtttttttcttgtaaatttgtttgagttccttgtagattctggatattagccctttgtcagatgagtaggttgcgaagatgttttcccattttgtaggttggctgttcactctgatggtagtttcctttgctgtgcagaagctctttagtttaattagatcccatttgtcaattttggcgtttgttgccattgcttttgatgttttatacacgaagtccttgcccatgcctatgtcctgaatggtattgcctaggtttttttctagggtttttatggttttaggtctaacgtttaagtctttaatccatcttgaattaatttttgtataaggtgtaaggaagggatccagtttcagctttctacatatggctagccagttttctcagcaccatttattaaatagggaatcctttccccattgcttgtttttgtcaagtttgtcaaagatcagatagttgtagatatgcggcgttatttctgagggctctgttctgttccattgatctatatctctgttttggtaccagtaccatgctgttttggttactgtagccttgtagtatagttggaagtcaggtagcgtgatgcctccagctttgctcttttggcttaagattgacttggcaatgcgggctcttttttggtgccatatgaactttaaagtagttttctccaattctgtgaagaaagtcattggtagcttgatggggatggcattgaatctataaattaccttgggcagtatggccattttcacaataatgattcttcctatccatgagcatggaatgttcttccatttgtttgtatcctcttttatttcattgagcagtggtttctagttctccttgaagaggtccttcacatcccttgtaagttggattcctaggtattttattctctttgatgcaattgtgaatgagagttcactcatgatttggctctctgtttgtctgttattggtgtataagaatgcttgtgatttttgtaccttgattttgtatcctgagactttgctgaagttgcttatcagcttaaggagattttgggctgagacagtggggttttctagatatacaatcatgtcatctgcaaacagggacgatttgacttcctcttttcctaattgaataccatttatttccttctcctgcctgattgccctggccagaacttccagcactgtgttgaataggagtggtgagagagggcatccctgtcttgtgccagttttcaaagggaatgcttccagtttttggccattcagtatgatattggctgtgggtttgtcataaatagctcttattattttgagatacgtcccatcaatacctaatttattgagactttttagcatgaagggttgttgaattttgtcaaaggccttttctgcatctattgagataatcatgtggtttttgtctttggttctgtttatatactggattacatttattgatttgcatatattgaaccagccttgcatcccagggatgaagcccacttgatcatggtggataagcgttttgatgtgctgctggttttggtttgccattattttattgaggatttttgcatcaatgttcatcaaggatattggtctaaaattctctttttttgttttgtctctgcccggctttggtatcaggatgatgctggcctcataaaatgagttagggaggattccctctttttctattgattggaatagtttcagaaggaatggtaccagttcctccttgtatctctggtagaattccgctgtgaatccgtctggtcctggactctttttggttggtaagctattgattattgctacaatttcggagcctgttattggtctatttagatattcaacttcttcctggtttagtcttgggagggtgtatgtgtcgaggaatttatccatttcttctagattttctagtttatttgcgtagaggtgtttgtagtattctctgatggtagtttgtatttctgtgggatcggtggtgatatcccctttatcattttttattgcatctatttgattcttctctcttttctttattagtcttgctagtggtctatcaattttgttgatcctttcaaaaaaccagctcctggattcattaattttttgaagggttttttgtgtctctattaccttcagttctgctctgattttagttatttcttgccttctgctagcttttgaatatgtttgctcttgcttttctagttcttttaattgtgatgttagggtgtcaattttggatctttcctgctttctcttgtgggcatttagtgctataaatgtccctctacacactgctttgaacgtgtcccagagattatggtatgttgtgtctttgttctcattggtttcaaagaacatctttatttctgccttcattttgttatgtacccagtagtcattcaggagcaggttgttcagtttccatgtagttgtccagttttgagtgagtttcttaatcctgagttctagtttgattgcactgtggtctgagagacagtttgttataatgtctcatcttttacatttgctgaggagagctttacttccaagtatgtggtcaattttggaataggtgtggtgtggtgctgaaaaaaatgtatattctgttgatttggggtggagagttctgtagatgtctattaggtccgcttagtgcagagctgagttcaattcctgggtatccttgttaactttctgtctcgttgatctgtctaatgttgacagtggggtgttaaagtctcccaatattattgtgtgggagtctaagtctctttgtaggtcactgaggacttgctttatgaatctgggtgctcctgtattgggtgcatatatattttaggatagttagctcttcttgttgaattgatccctttaccattacgtaatggccttctttgtctcttttgatctttgttggtttaaagtctgttttatcagagaccaggattgcaacccctgcctttttttgttttccatttgcttggtagatgttcctccatccttttattttgagcctatgtgtgtctctgcacgtgaggtgggtttcctgaatacagcacactgatgggtcttgactctttatccaatttgccagtctgtgtcttttaattggagcatttagtccatttacatttaaagttaatattgttatgtgtgaatttgatcctgtcattatgatgttagctggttattttgctggttagttgatgcagtttcttcctagcctcgatggtctttacagtttggcatgattttgcagtggctgctaccggttgttcctttccatgtttagtgcttccttcaggagctcttttagggcaggcctggtggtgacaaaatctgtcagcatttgcttgtctgtaaaggattttatttctccttcacttatgaagcttagtttggctggatatgaaattctgggttgaaaattcttttctttaagaatgttgaatattggcccccactctcttctgacttgtagagtttctgctgagagatcagctgttagtctgatgggcttccctttgtgggtaacctgatcttgctctctggctgcccttaacattttttccttcatttcaactttggtgaatctgacaatgatgtgtcttggagttgctcttctcggggagtatctttctggcattctctgtatttcctgaatttgaatgttggcctgccttgctagattggggaagttctcctggataatatcctgcagagtgttttccaccttggttccattctccccatgactttcaggtacaccaatcagacgtagatttggtgttttcacatagtcccatatttcttggagggtttgttcatttctttttattcttttttctctaaacttctcttcacgtttcatttgattcatttcgtcttccatcactgataccctttcttccagttgatcgcatcgactactgaggcttgtgcattcatcacgtagttctcatgccatggttttcagctccatcaggtcctttgaggacttctctgcattgattattctagttatccattcgtctaattttttttcaaagtttttaacttctttgccattggttcgaacttccttctttagctcagagcagtttgatcttctgaagccttcctctctcaactcgtcaaagtcattctccgtccagctttgttccgttgctggtgaggagctgcgtttctttggaggaggagaggcactctgatttttagagtttccagtttttctgctctgttttttccccatctttgtggtttcatctacctttggtctttgatgatggtgacatacagatgggtttttggtgtggatgtcctttctgtttgttagttttccttctaacagacaggaccctcagctgcaggtctgttggagtttactggaggtccactccagaccctgttttcctgggtatcagcagcggtggctgcagaacagcggatattggtgaaccgcaaatgctgctgcctgttcattcctctggaagttttgtctcagaggagtacccagccatgtgaggtatcagtccgccgctactggggtgtgcttcccagttaggttacttggggatcagggacccacttgaggaggcagtctgccctttctcagatctcaggctgtgtgctgggagaactactactctcttca

SEQ ID NO: 10327 - DNA, 45172 bp, Homo sapiens
ttctattttcttagttcttttttttttattatactttaagttttagggtacatgtgcacaatgtgcaggttagttacatatgtatacatgtgccatgctggtgtgctgcacccattaactcgtcatttagcattaggtatatctcctaatgctatccctcccccctccccccaccccacaacagtccccgtagtatgatgtccccttcctgtgtccatgcgttctccttgttcaattcccacctatgagtgagaacatgtggtgtttggttttttgtccttgtgatagtttactgagaatgatgatttccaacttcatccatgtccctacaaaggaaacgaactcatcattttttatggctgcatagtattccatggtgtatatgtgccacattttcttaatccagtctatcattgttggacatttggattggttccaagtctttgctattgtgaatagtgctgcaataaacatacgtgtacgtgtgtctttatagcagcatgatttatagtcctttgggtatatacccagtaatgggatggctgggtcaaatggtatttctagttctagatccctgaggaattgccacactgacttccacaatgtttgaactagtttacagtcccaccaacagtgtaaaagtgttcctatttctccacatcctctccagcttctgttgtttcctgactttttaatgattgccattctaactggtgtgagatggtatctcattgtggttttgatttgcatttctctgatggccagtgatggtgagcattttttcatgtgttttttggctgcataaatgtcttcttttgagaagtgtctgttcatgtcctttgcccactttttgatggggttgtttgtttttttcttgtaaatttgtttgagttcattgtagattctggatattagccctttgtcagatgagtaggttgcgaaaattttctcccattttgtaggttgcctgttcactctgatggtagtttcttttgctgtgcagaagctctttagtttaattagatcccatttgtcaattttggcttttgttgccattgcttttggtgtttaagacatgaagtccttgcccatgcctaggtcctgaatggtaatgcctaggttttcttctagggtttttatggttttaggtctaacatttaagtctttaatccatcttgaattaatttttgtataaggtgtaaggaagggatccagtttcagctttctacatatggctagcccgttttcccagcaccatttattaaatagggaatcctttccccattgcttgtttttctcaggtttgtcaaagatcagatagttgtagatatgcggtgtcatttctgagggctctgttctgttccattgatctatatctctcttttggtaccagtaccatgctgttttggttactgtagccttgtagtatagtttgaagtcaggtagtgtgatgcctccagctttgttcttttggcttaggattgacttggtgatgcgggctctttgttggttccctatgaactttaaagtagttttttccaattcttgaagaaagtcattggtagcttgatggggatggcattgaatctgtaaattaccttgggcagtatggccaacaaagccaggcagagacacaaccaaaaaagagaattttagaccaatatccttgatgaacactgatgcaaaaatcctcaataaaatactggcaaaccgtatccagcagcacatcaaaaagcttatccaccatgatcaagtgggcttcatccctgggatgcaaggctggttcaatatacgcaaatcaataaatgtaatccagcatgtaaacagaaccaaagacaaaaaccacatgattatctcaatagatgcagaaaaggcctttgacaaaattcaacaacacttcatgctaaacactctcaataaattaggtattgatgggacgtatctcaacataataagagctatctatgacaaacccacagacaatatcatactgaatgggcaaaaactggaagcattccctttgaaaactggcacaagacagggatgccctctctcaccactcctattcaatatagtgttggaagttctggccagggcaattaggcaggagaaggaaataaagggtattcaattaggaaaagaggaagtcaaattgtccctgtttgcagacgacatgattgtatatctagaaaaccccattgtctcagcccaaaatctccttaagctgataagcaacttcagcaaagtctcaggatacaaaatcaatgtgcaaaaatcacaagcattcttatacaccaataacagagaaacagagagccaaatcatgagtgaactaccattcacaattgcttcaaagggaataaaatacttaggaatccaacttacaagggacgtgaaggacctcttcaaggagaagtgcaaaccactcctcaatgaaataaaagaggatacaaacaaatggaagaacattctattttcttagttctttatatgcctagcaattttctgctatatcctggatacaatgaatgttaaattatgaagatttgggattctcttatttttctctgatgaacgttgtttcttttgttttagcaggtgatttttttcggtgggaggtggggctgggcttgaacttcaaaagttactttttgggcagcatctccattatctgttcagattgactttaaatatgtctgtgtgcaggaattacccatgagttgtcagtttgcaacctctatattagaatgttatggtctttaattgagatgcctttagtctgttctataaatgcctgattcagagatcactaaaaaatgtgggtagacagaatttggatatgtattctctggttctttctcaggtaggattctccccatggcttcagcattcagtttattggattcaattttttggtttcacaaatcagaagacaaatcccagccaattcatataccaaacctgagccacacagaatttacccatgtaacaaacctgcacatggactgcctgaacttaaaataaaagtagggaaaaaaagtagggaacaaactaccaaaataaaataaaacattcagaacacacgcaagaaggaaagtgatcacatctgtcatgcatcaacttatgctttccctttgaaactttgcatacattgattacagagcatacctatctggttggctcaggagaggaaggttgggctgaattagtcttttccagacagaggcatgaaagtctctttctctcttgtgaagcagacatcaacccaactgcatatgagaagagggcatagagggagccaagttggggagatctgactgtcttctcctgttctggcctatgatctttacctcacacgtttacccactggtaatctctattatggaataggaaccatagcatggcacagatagcaatccttgtgcaccaggaactaattcaagtggatcagaaaagcccagggatatggggattgtgctaaaaggagcagcggtggcattcctgaacactgagaagagtgtttccaacatctgaagagatgctacattttccagcctactaggctgaaagataaaaacaacttttgttgactcctctgaaaacttgagaatttaactgaaatatgtaaatgaaattttgaatacatatgaaatgtgaagccttctgatatttggtccataaattatgtttcaccagagtttagatcataaaatttttccattgcagacaaactactggtctttctgttcctatacattataaacccaagatgtgtcacattatgtaatgaaaaccaaatagaaatttgttctttaaggaatttcataataaaaaacaaaacaaaacaaacaaacaaatgagccaagcatggtgtgcacacctgtattcctggctacttgagaggctgaggtgggataattgcttgagcccaagagctatgatcatgccactggactccagccttggtgacagagcaagaccccatctctgaaagaaaaaaaaagtataatgaacacatgagtccctctattcagcataaaaaaattaccataacttcccaattatgttccgtttttcttttttttttttactggaatatttctagagaaatccaagctatcgtatcactttattctaaatactttagactcctatatgtgtctataaccaataaacattttttcttgtttatcttactatttatccattattacaaataaataaattaataattattccctgtcatcatttaatatctgttctatattctaagtttcctacactgtatcaaaaatagcttttaattgttgtgtttgtttcaggatccaaacaaagtccacttctgactttcagagattctaccacaaaaatatcttatttctacaattgccaccttccctcacctagttttcatatcatttcattaaggtattggagaaattagatcaattgacttgtagaatgtcctacactgttgacttggtatcatctaacttgtttctgtatccgccatatttcctattaaactgaaagtcagatccagaggcttgcttaaattcagcttgaattccttgggcatgatgcttcagagggagtgctgtgtatttcctctgcgttgtgctgtgatatctcgtcgtcccctgttaatgatggtcattaagattgatgagtgagttcctgtgttatcagtccaattcatccattgcgtaatccccatagcctttctcctaatggttttagcatccactgatgattgttaccaagatccattatctcactagatgttgcaaaatgaaacataataaaacaaaacaaaatgatttcttaattctgtcattcttcttcttttaaaagcttgtatttgtctacaaagaaggaatttctccagtcaactatttgtgttccctgaaataaggtttattcagaaaaaaaaagtgtttttttgaatatcaattttcagaataaaagattggtagtcgagtcagaaaaatctaagtgtggagtgcacttagctgctgactaacaattgcagagatgggaatgtacttatctaccttccaccaagtaaacgtgtacttcccatccaacagacacttctgaccactctccactacattcaagtattcactttttgtttcatgcctgagttttatatttgttttcttcagtgggatggaggagagagttgtcaggtagggtaataatataccatacctagaactgaaattctctgtagtttaaattttttaaatgaatacttccaaacataaacaaaaatagaaaattgtacaatggacccacatataccaatcaccagactcagtcattatcaagatttgcctcacttgccacatctatctctttttgttctttctcatttttcataagtatttaagacaagtctcagacatcacataatttcacctctacatacaatcatggatactctgttacataacccttatttatggttagtgagaatgtgaatgagtacagtcattatggaaaacagtatggaaggctctctaaaactaaaaatagaattaccatacaatacagtacttcacccacatttgttgcagcagtattcccatggccaagatatggaattaatttaagtgtccatcaatatatgaatggataaagaaaattttgtatacatactctgtaatctattcagccattagaaaacaatgaaatcctgtcatttgcagcaatattgatggaactagaggtcattatgttaagtaaaataagccaggaataaaaagacaaatatcacacatttgcactcatatgtgggagctagaaaagttgatctcatggagttagaatgtagagtgatagttgtcacaggctgggaagggtagggtagatgaaaaaaggttggttaatgggtacaaacatacagttagataaaaggaatacattccaacttttaacagcacagcaggattactatcattgataataatttattgtatatttcaaaacagctagaagagaagatttaagtgttcccaacacaaaaaaatgataaatgtttgaggtgatggatagcataaataccctgatttgatcattacatattgtatgcatgtatcaaaatatcacatatacctcacaaatatgtattattattttgtatcaataaataatctaatatcttgtctacaagtaaatattcctggttatttaaaaatgtgtgctctaattaggattgaaacaaaatttataaattccacttaattgatacctctttggtctttgtgaatctagaacagtatcttctctcacttttattttccctgccattgactagttagagaaaccacaacagttgttcttatggaatatcccactttctggatttgtctatgtccttcttagtttctctgtcttccttatttttataaatgaaagttaactctggggacttaattacactcagcttcaacttcctgggaacagtacttcacagatggtgctgtgtgcctgacgtcacaatgtctggataacctaacaatttttacatttcactctaaataagaagtcacaaactgacaacacatagccaaatctttcacataaacacatttgaatttaagtgtcagttgttaattcttgtttttcttgcacaattgtttttcctatagtaattgaaaggaaaataaaaaataataactttctgtagctgtatctcagtcaaaagcaggaaaatggaagatcactttcatagtagtccagtttcatgctgctgataaagacatacccgagactgggaagaaaaagaggtttaattggacttacagttccacatggctggggaagcctcagaatcatggtgagaggcaaaaggcacttcttacatggtagcagcaagagaaaatgagaggaatgcaaatgcagaaacccctgaaaaaaccatcagatttcaagagacttattcactaccatgagaatagtatgagagaaactgcccccatgattcaaattatctcctgccaggcccctcccataacacatgacaattatgggagtacaattcaagatgagatttgagtggggacacagagccaaaccatatcattccaaccctggcccctccaaatctcatgtccttacgttacaaaagcaatcatgctttcccaacagtgccctaaagtcttatttcagcattaacccaaaagtccacagtccaaagtctcatctgaaacaaggcaagtcacttccacctatgagcctgtaaaatcaaaagcaagctagctacctcctagatacaatgggggtactggcattaggtaaataaagccattccaaaggggagaaattggccaaaacaatgggtttacagggctcacggaagtccaaaatccagtggggcagtcaaattttaaagctccaaaatgatctcctttgacaccaggtctcatgtccaggtcacgctgatgtaagaagtggattcccatggtcttgggaagctctgcccctgtggctttgcagagtatatcccccctcctggctgctttcatgggctggtgttgattgtctgaggctttttcaggtgcacagtgcaagctgtcgatggatctaccattctgggtctggaggatggtggccctcttctcacagcttcgctaagtggtgctccaataggggcactgtgtcagggctctgatcccacatttcccttctgcactgccctagcagaggttctccatgagggctccgcccctgcagcaaacttttgcctgggcatccaggcatttccatacatcttctgaattccaggcggaggttcccaaacctcaattcttgacttctgtgcacccatagactcaacaccacatggacactgccacggtttggggcttccaccctctgaagcaacagacctagctgtaccttggccccttttcgtcatggctggagtgaccgggacacaggacaccaagttgctagactgcacacagcatggggaccctgggcccggcccatgaaaccattttctcctaggtctccaggcctgtgatgggaggggctgccatgaagatctctgacatgccctagagacattttccccattgacttggggattaacatttggctcctcatgacatgcaaatttctgcagccagcttgaatttcttttcagaaaatgggtttttattttctatcacattgtcaggctgcaaattttctgaacttttatgctctgcttcccttttaaaactgaatgcctttaacagcacctaagtcacctcttgaatgcattgctgcttagaaatttcttctgccagacaccctaaatcatctctctcaagttcaaagttccacaaatctctagggcagaggcaaaaagccaccagtctccttgctaaaacataacaagagtcacctttgttccagttcccaacaagttcctcatctccatctgagacacctcaacctggacctttttgcccatattgctacaggattttgggcaaagctattcaacaagtctctatagacattccaaactttcccacattttcctgtcttcttctgagccctccaaactgtttcaacctctgcttgctacccagtttcaaagtcacttccacattcttggatgtcttttcagcagcgccccactctactaatacaaatttactctattagtccattttcacactgctgataaagacatatccaagactgggaagaaaaagaggtttcattggacttacagttccacatgactggagaggcctcagaatcatggcagaaagtgaaaggcacttcttacatggtggtggcaagagaaaacaagaggaattcataagcagaaacccctgaaaaaccatcaaacatcatgagacttattcactaccatgagaacagtatgggggaaactgcccccgtgattcaaatgatctcccactagatccctcccacaacatgtggaaattatgggattacaattcaagatgagatttgggtggggacacagagccaaaccatatcaagtattgtttcccatgtcaaaatatttcttcttacatcagacaacttcactcatttatattacctgccaggtacctgtgagaacatgagtttgtgacttctgctgtatatatatagatatattctccaacctatcatagcaggtataccagaaatctgatcactagtgttaaacccacccttggtagtcaattctcatttacccaatcaacatgcaattacttttgatgtgttgaaagctttgtgtcagtgcacagctcagctccaatttaaagcttacattgtctgtagtctgtagttgtttttgtcttttttttttttcagagtctcactctgttgccaggctggagtgcagtggtgccatctctgctcactgcatcctccgcctcccaggctcaagtgattctcttgcctcagcctcccaagtagctgggactacaggcatatgccaccacgcccggctaatttttgtatttttagtagagatggggtttcaccatgttggccaggatggtctcaatctcttgatcttgtgatccacccacctcggcctcccaaagtgctgggattacaggtgtgagccaccatgcccagcgtttttgtcttttttttcttcccaaataacttttatgttaagaggtacatgtgcaggtttgttatacaggtaaattcagtgttacagggtcttaggagtacacattatttcatcaccaggtaataagcagggtaccctgatatgatttggctgtgaccccagccaaaatctcatcttgaattataattcccataatcctcacacggaccggaccaagtagaggtaattggattatgagggcagtttcctccatgctgttctcatgatagtgagtgagtcttaggagatctgatggttttataagcatttagtatttcccctgcttgcactcactctgtcctgctgccttgtaaagaacgttcctgcttctgctttgccttctgctatggttgttagtttcctgaagccttcccagcaatgcagaattgtaagccaattaaagctcttttctttataagttacccagtctctggtatttctttctttctttctttctttctttttttttaataaccttgcccaactggcttgttttattggagaaggggacgcggaataaacaacgtgagacagctgggacctgaggctgggaagaaccccctcccctccctatacatgcccactgccccaaataaaaaataaccaactatgggagagcaactgagacagccactgggggcagggaaaggagacactgaactcaagggcagctgtgaagagaccatgtatgtgctgagagggcccagaggcagcggcagcacgaacagcgcaggtacaaatctccgtgttttccctgggcttacgtataaatacagagaggtgaggccttctctccccctgctctcccttccgctccgtgctgcttgccgcggtccccgctcctctttccgcatgagggcgaagggaagcggggatggacaagtcattgtcgaattgcaatcagacccacatccatcagcttctggatcttctttgcgattacaggattctttaagtgttcgctgagtgcctggggggtccttctgcatctgctccaggataaggtgcatggctatgtcactcatgatctgctgcacctcggggtcggccatggctcgtcgcttcacatcttcggggctgtggtgccggttgtactgcgccatcatacagcgctggtagccgtctgccgcctccttacagctggagtccgggtctagcgccttccggtacacatccatgactttggtgtagtccttcatcgcttccagggcaacggctttccgtgtataacccttgatgaaggtcggttctagctggatacattcttcacagtccttgagtgccagctggaatccaggagtttggtgtaacaggcagctcgattgctgtataatttggcatctttcgggttccttttgatggcttccgtataatgcttcatggcgtggggatagtcccctttctgaaaacactcgttgcctttgttcttctcttctaaagccaggtcggggtttatgtaggccagccgttcttgctccttcaggattttctctgcctgctggcatttcttgagcacatctggagttcggtgctctgccagagacttgttatagaaatggatggcatccttgtacttttcttctttgaagtaggagttgccaattcgagcacacactttggcaatctgtagatagtcttctctgttttctctccccacttcaatggacttctcacaaagctcccaacacttattgtagtcgcccttttcaaagtataccgctgcttgattggtaatgtaagtcatgttgctggggtccagctccttggctttgtcgtaatgcttcaaggctgtcagtctttcttcttgtaggcatcgttcctcagctctttttctttcagtgcctgcttcttattctctggaagatcttcttccactggctctggcttggtctcctttttgggaaggggtggtggtgaaggtgttgcaacctgttcctcctcatccatactgccccgatcgacctcaaggaggacactgagagtggtcaggatccggggatctcgtagttttgtgcccagatcagaaggcttgttttatagttgctctatcagctcccggtaggtaggatcactgagcagtgtccttgtcctgggatcactctccaacttctgttacagattgggcatgttgaaagcattcatacattttctctctgccaacctggcctccatattctgtaaaccctctttcagttgagggttatctgcctcgtgttttaagctctcctcgtaggttcacttggcttcttcaaatcggtttaagaactctagagctgctgcttttcgtgaatatcccttgccccagtcaaacttttaggtcgacggtcttgcagccgtccttgtaagccttctggtagtctcctttcttggcataggtggcagaacagttgctgtagagcacgtggttgtggggatccagcttaatggcttcagagtagcactgtaaggcattgtcgatgttttccacgcccagggccttgttgcccttctctttcagctcattgacctgcttcatagcacagcgcggcccggaaccccgctgaatcgaatctgtccgctctgcgttcccaacccagtctctggtatttcttcatagcagtgtgagaaggaactaatacagtaaattggttctgaggtagtggggtgctgctatatggatacccgaaatgtggaagcaactttgcaagcgggtaacaagcagagattggaacagtttggagggctcagaagacaggaaagtgcgggaaagtttggaacttcctagagacttggagggctccaaagacaggaagatgtgggaaagtttggaacttcccagaaatttgttgaatggctttaaccaaaatgctgatagtgatatggacaattaagtccaagctgaattggtctcagatggagatgaggaacttatgggaaactggagtaaaggtcactcttgctatgctttagcaaagagactggtggcattttgcccctgctctagagatctgtggaactttgaacttgaaagagatgatttagggtattggtgaaagaaatgtctaagtggtaaagcattcaagaggaagaagaacatataagcttgaaaaatttgcagcctgacaatgcaacagaaaagaaaaacccctgcagatcacgaggtcagcagataaagaccatgctagccaaaatggtgaaaccccgtctttactaaaaatacaaacattagccgggcatggtggtttgctcttgtagtcccagctacttgggaggctgaggcaggagaattgcttgaacctgggaggcggaggctgcagtgagccaagatcatgccactgcactccagcctgggtgacagagcaagactctgtctcaataataataataataataaaataataataataataataataataatgtagtaataataaataataatttaataataataaattcctggaaatagataaaccaagaagaaatagaaactctgaacagaccaataacaagcagcgagattgaaattgtaattaaaataaactgccaaaaaaaaatccaggaccagatgcattcccagctgcagtctatcagacattcaattaaagattggtaccaatagtactgaaaccatttcaaaagatacagatttacggagttctctccaaatcattctatgaagccagttatcaccctaataccaaaaccaggaaagacataacaaagaaaggaaactatagaccaatatctctgataaacatagatgcagaaatcctcaacaaaatactagctaactgattccaacagcgtatccaaaatatattccaccataatcaagtgggttttacactagggatgcaggaatggtttaaaatacaaaagccagtaaatgtgataaaccacatagacagagttaaaacaaatatcatataatcatctcaacatatgcagaaaatgcatctgacaaaatccagcatcgctttatgcttaaaaccctcagcaaaattggcatagaagggacataccttaaagtaataaaagccacctgtggtaaagccacctttggtaaacccacagccaacattatactgaatggggaaaagttgaaagcatcccctgtgagaactggaacaagacaagaatgcccactttcaccacttatatttaacatagtactgggattcctcagacaaaagaaagaaataaagggcatccaaaatggtaaagagataaactgtcactgtttgctgatgatatgatcatatacctgaaaaaccctaaagactcatccaaaaagcttctaggtgtgataaatgaattcaataaagtttcaggatacaaaatcaatgtacacaaattactagcactgctatacaccaatagcgaccaagccgagaatcaaatcaagaactaactcccttttacaatagctgcaaaaaatatataaaatacttaggaatacacctagccaaggaggtgaaagatttctgcaaggaaaactgcaaaacactgctgaaagaaatcatagatgacataaacaaatggaaacacatcccatgctcatgaatgggcagaatcaatgctgtgaaaataactatactgccaaaagcaatctataaacttaatgcaatttccatcaaaataccatcatcattcttcacagaactagaaaaaaatcctaaaatacgtatggaaccaaaaaaagagcctgcatagccaaagcaaggctaagcactgagaacaaatctggaggcatcacattacctgacttcaaactatgctacaaagctctagtcaccaaaaaacatggtattggtataaaaataggcacatagaccaatggaacagaacagagaatccagaaataaagccaaatacttacagacaactgatctttgacaaagcaaaccaaagcataaagtgggaaaaggactacccttccaacaaatgatgctgggataattggcaagccacatgtaggagaatgaaactgcagggtcatctctcaccttattaaaaacaacaactcaagatgtattaaagactcaaatctgcgacctcaaaccatctaaattctagaatataacatagaaaaaactcttctagacattcgtttaggcagagagttcatgaccaagaacccaaaagcaaatgcaaccaaaacaaagataaatagataagaccttattaaattaaaaagcttcttcacagcaaaagaaataatcaacagagtaaacagacaacccacagagtgggagaaattattcacaaagtatgcatctgacaaaggactaataatatccagaatctacaaggaagtcaaatgagcaagaaaaataataatcacatcaaaaagtgggctgaggacatgaatagacaattctcaaaagaggatatacaaatggccaacaaagatataaaaaatgcttaacattactaatgatcaggaaaatgcacatcagaaccacaatgtgataccaccttactcctgtaagaatggccataattgaaaaataaaaaaaaatagatgttggtatggatgtggtgaaaagggaacacttttacactgctgatgggaatgtaaactagtgcaaccactatggaaaacagtatcaacattccttaaagaactaaaagtagatctacagtttgatccagcaatcccactactgggtatctacccagagaaaaagaagccattatatgaaaaagccacttgcacgtgcatgtttatagtagcacaatttgcaattgcaaaaattcggaaccagcccaaattcccgtcattcaatgagtggataaagaaattgtgatatatatatatatacaatactatatatatatatgtatatacacacaccatactatatatatatatacacacacacacacacacaccataccatatacatatatatacaccataccatatatatatacacacacacacacacacacacacagacaccatggaatactactcagccataaagaggaaagaaataatagcattcacagcaacctggatggggttggagaccattattctaagtgaagtaactcagattggaaaaccaaatattgtatgttctcacttatagatgggagctaagctatgaggacgcaaaggcataagaataatgcaatagatgttggggacttgggggaaagtgtggaaggggtgtattagtctgttctcacactgctataaagaactgcctgagactgggtaatttataaagaaaagaagtttaattgactctcagttccacatgactggggaggcctcaggaaacttacaatcagggtggaaggggaagcaggcacatcttatgtggcagcaggcaagagagagagagagagtatgtgagagagagcagggaaaactgccttataaaccatcagatctcctgagaacttacttgcgatcatgagaacagcattggggaaactgcccttatgattcaatcaaccccctccctggacacatggggattacatgtcccttgctcaacatctggggattacaatttgaaatgagatttgggtggggacacagacccaagacaatcaagggggccgagggataaaatgctacacattgggtacagtgtacactgcttgggtgatgggtacaccaaagtctcagaaatcaccactaaagaattatctatgtaaccaaacaccgcctattcttcaaaaatgatagaaataatattttttaaaaattaaataggccgggcatggtggctcatgcctgtaatcccagcactttgggaggctgaggtgggcagatcacctgaagtcaggagtttgagactagcctggccaacatggtgaaaccctgtgtctaccaaaagtacaaaaattagctgggcatggtggtgggcgcctgtaatcccagctacttgggaggctgaggcagaagaatcacttgaacccaggaggcggaggttgcagtgagctgatattgcaccattgcactccagcctgggtgacaagagtgaaactctgtctcaaataatactaatactaatactactactactactactaataataataataaatcattcaataaacttgtgattgcattttgaagttattgtagtgagtttttcagctctgtcagatcagtttggctcattctcaaaatggctatttcatctttcagcttctgtatcattttattggattccttagaattcttgtattgggttttgactttctcctaactctcgatgatctttgttcctatgcagattgtaagttctatgtctttcatgtcagccatttcggcctggttaagaactattgttggggaccagtgtggtcatttggaggtaagaagacactctggatttttgagttgccagaggtcttgtgctggatcattgtcatctgtgtggggtgatgttcctttaatctttgaaggtgctctcctttggatggtgttttttggttttatcttctttgctgcccttgagggtttgattgtggtataaggtggattcagtcaactggctttattttttttttgaagatttcaggggcccaaggcccagctcagcagtcctggccttcatgttgtaaccctgggcaggttacaactgggcccctggctttgttctctggcccctaaagattaggaacctgctgtgctggaagggcctaggtgttcctggtccactggcaagaacactctgatggggtaatggcagagagtttcatccttgcttgtgcatatcagcagcagtggtgttggctctgttttctaagacatgaaaaaattagggggaatttgtttaataatacaacctttctataatcttgaaaattaaaactaaaattaacaaaaagaattgataatttccaaacttctaaaattagcaaaactcctttaggaattttaccatacattttatcacaatgtttcataaagctaaagcattaatgtctcccaaatgcaatattttaacttggactttttaaagagaaacaacttttaaaaagccataaagacatcatatgaactcagctcttacaaatgtggattgttgaagacgatacttactttaaactcataagggatataaataaatataaaactttagtacccaggacatgaaaaccagaatgatgataaacgtaggttccatattaaacatcatgtttccagttctttcaggaacaatatatttatctagtttctaaattgagaaaaggaagtaaaaaggagaggtgaattatgaaaaaagcatgttatcagtgttctcctttagattgtttttgaaagcttttaaacactgggtgtgtaagttaaagctgcttttagcacttcctcaacagatcaccttagattttgctaaacttggcaccattataggggtcatattttcacacggatgcactcttcctgaacagaatgtatttgacagaaacaagtttttctttcattccaggcatttgtgtgtttgctttttataacaaacagtaagacaaagctcaccattttggactctctcccaatatttccaatttagctatgaaaacaagatttttatttcatggtttggagaagtgcactttaaaagttaactctttaagagcacacaggattttttcctcaaaattcattttatattctttgatttgaattttgtttgcacttctttggatatcacaaagtctagcctctcatcacatgagttggtaagggagatattttcataagtagtcttttttttaaccttacatgatttaacgttttactatagttctttttttaatatatatttttgtttgagatgctaaatctggtctccataatcagatttgggagcagcctttattttgttgttaggtttttggcagagtctagaagtccccaagctgccaaagttttgtctgaaagccttttgagttcagcagttttcatactctatcctgtcataatgagcagcatctgccccccaaaaaaggccaagttattatgacaggttagaatcttaatagtattaggaaaaaatcttgcaaggttatatctagaatatgtattcaaatgaaccacaagcctaattccagtggttgcaaggacagcacgtcatgcagcctgtattcccagtcttccatagaagtcaaagcatccagtgaaaattctgacactgaaagaatgtctattgaattcttcattctgaagcaggttataagaaggagatttgctgggcatggtggcttacacctgtaatcccagcactttgggaggccgaggtgggtgaattgcttgagcccaggagttcaagaccagtctaggcaacatggaaaaacgctgtctctacaaagcatacaaaattagccaggcacagtggtatacacctgtagtcccagccaattgggaagctgaggtggaaggatcaactgagcccagcagttcaagactgtagtgagccatgatcacgccaccgcactccaacctgggtgacagaatgagaccctgtctcaaaaaaataaataaataaaaataaaaaaggaggctggcaagaagacctatttttaaatggacacatttcttttaggaagagaaagaaatactattttttacttgtaaaagaaaatgggtaaattaaaatgtgactgtacttgatattttcactgaatgtaattatcgtcatcatcatcaccatgatctttgtaagcctaaatgacttatttggaagagaatgttagtatattttacatgtcatcttagttctttattgtcatgctttcctttttaaaatttgctttctttagcctctgaaccattcaaatatgctattatcattcttttcagttcataggcctacattatttactgttcaaatataatataacactagaacagctatttgtgctgaaatatatttcaccatttttaatgggagaaaagattatcaactttcctataaacagagaactgatatacagaggtattagttcattccatagcacataggagtgctacttgtacacaaaatgaaatatcaggaaatgttaatgcatgtactgttctgtgtaacttcagacttcatcactaaactaatgaaagagtatcttgaatagtcgttcaagctagatacaaatcagttgctgaaaataagaggacaataaatgaaatattagatagagatttgcaaaagcaccataataatttacattactggaatatgagtagaaatgtatttttagtctcttattctcaaggtttgatatgctaactataaagcaaggatgacacttcatgaactggggcttcttagtgttcacaaatgtgtgtgtatgtgtagcttttaatttttagtttgaatacaaaactgaactttgttgcacatgtataaaaactctacattttttaggtcattcagcctgaggaaaaagttatatcaacagaagagcaacaaaactaaatttttctgacacttcttgtatcgctattacaggacctctctatttaattcaagaagttcagaaagaaaggaaagaggtggtgtcttttaaatagaaatgtcttttatttctatttttgtctagctaactcctattcatgtatcaatgcctagctcaagagacggtttctttggaaagcctttcttaacccacattctatttaggtagcccatctctacacattcataaaaccctatgcctgtttcctgcttttcacagtactgattatggaattataaccattgggttactcattagctgtcttatgatctttctatcatttcgctcctctatttcctcctctcttccttttttctcattcctaatctcacacccgtacacaagaccatgagttcctcatgaacaaagactgctttactgggctttgaatttctagcatttagcgcaatgtctggtacatagtaatgaccaaccaatatttattgaattaacatatataagtgaatgaatgcttaggaactagtcatatcagctgtgaccatttttgtcttttcctctagattggtaggataatatactctgttgcagctaatgatcactgtgttagtttgatagggctgcataacaaagtacaacagactggttgtttttaaaaaataaatagaaatttattttctcactgctctggaaactagaagtctgagatgaaggtgttggcaggattggttccttctgaagatggtgtagaaagaatctgtttcagacctctttccttgttttgtagaagtctgtcttctccctgtgtcatcatcttccctttggacatgtctatgtccaaatttcctcttcttgcagtgacatcagctatattggattggggcccaccctagtgaacccaattttacttgattacctctttaaagagtctatcttcaaatacagtcacattctgagatactaggagttaggagttcgacatataaattttggggaagacataatccagctcataactcctaagggtgctgctcttagtaataaccatattagtaagcaaccatttttgagcacatattttatgctcaaaaacagtgttagaaacagtattagttttgtttcagaaacagtattaagtattttatatgcacatctccgacacgtaaggttgccctgatgtctgccacaggctcctgcactcatgaacccatcgaagcaccaatattttgtcacccatcctgtggttcagtagttaactgcaatggagaaaatttctctttacttccactggtgtgacgccttactaagtggggtgctaagtagtgctactttttcttttttttttaacgtggattctcagctgcccaggctggagtgcagtggcaagatctcggctcagtgcaacctccgtctcccgggttcaagcgattctcctgcctcagcatcccgaatagctgggattacaggcgcccgccatcacgcttgcttatttttcagtatttttagtagagatggggtttcaccatgttggccaggctagtctcatactcctggcctcaagtgatccaccggcctcagcctcccaaagttctgggattacaggcatgagcctccgcacccggcctgagtagtgttactcttaaggatctacaaaaagtttattgaagcagttcttttactttttattattttattgcattcttcatgtatgaaacttcaaccatgggtccacaggagttgagtcgggggaccaagttgaatggcaagttacaggctctattcagaattatgccattttatccatgccctagtactgcccttgtgtgttttgattccctcttctttcggtttaaattttcccctccccgcaggacttaaatataatagatgcagagccaatccacctccatcatccctccagacgtgcatggtttctagaaaatatacaagttctcaactgagatctcagctaaatttagctgcaaactgagttttcactatgcttttctaagaaattttactcatgtaattgtttcttgttgtcttgtcttctttcttttttaatttaaaaatatttaattgacaaataaggattatatatattcaaagtgtgtgacggggtatccaatcttttggcctctgtgggccacactggaagaagaagagttctcttgggccacatataaaatacactaaccatagctgatgagctaaaaaaaatcacaaaaaaaatcgcataatgttttaagaaagtctatgaatttgtattgggctgcattcaaagccatcccgggccgcatgcggcccaagggccatgggttggacaagcttgatgtacaatgtgatgatttgatatatgtaaatattgcataatgaaagaaagacagtgaaaagagaaagaacctcaaggattcatgtcgtctgttttttttttagcaagattatgcaagtgtctatattataggcatctaagagcattagtagtgcctatttttcctccttttgtgaaaaaaagagcacaggagtagtggaaaaagaaaggagttgacacatgaggtaaaataatctatactcttctctcttttagaggtgttagaaagatctatagctgtatcttctccaaggtcaagtcagggcttgtggtggaatacattctacctcagctcctccatacactgatgacagtatcctgcattcagggccatggaaaggttgacttactcaatctcaccatgtgagtagcgatagacttccccagcaattttattcatctagctgaattctttctaaagactattttggaaattcaatttctagagttttgaaaaatgaattccaaatatcacctgaaggctttgtttattttaacaattgagatcaatagggaaaagatagagtttaaaatgatttcccattctatgaatgttcctccatatgattcaagtagcacctagtatttatcataattttaaatttaattggcaacatattttattgtcctttagtattgtggttcattaatactatcaaaacctttcaagccagattaccaaaatcttggtgacttttattgccagaatttgagagtttgtttcctccaatcttcaataatttcaccctctatttagtttaccaaagcctgttaaattgctgttctcgtaatgtcaggaggaatttcacatctctttgcagaattaaacttattgagttggtgtttcacatgccagatctatctatctatctatctatctatctatctatctatctatctatctatatatatatatatttatccctggggattgcctattcacattagtaggagctgagtagacatatcaagcaaacaacagccctctcttcacttgacaatcaggtagcaagggtacagttatcagtgctagtaatattacatctccagaagaatttaaaggatcactttcaattatgggtagagctctaagcttgataggatattacagagctgaactatttatagaatcacaaatcccttcacaaacattttggaaattgatgtttacatgttagcactattataaaaatgtattttttaaatgtatgcaattaaatttttttgccaagaatgttaaaaacttgaaatcattgtggaaagcaaaaaagtccatagtatgtgttccttaatagaaggcaacacagtacttttttgcctggaattctaatttgcaaatccaatgtctctctccagataaatgcaatgtaatataactcgtaccagtatgtaatatgccagttaggtgcccccaaaaagatctagatctgtaaatagtgcttgaggaccaacaggatttctttgtggttttatgcttgacactattagcatttttcatagattgaaaatgctttattagatcttaaatctttctaacaatattacctaatatctataggtaaattgtcatgtttcccaagtgacaaaaaaggggggcattattagaaagaaagcattaccaaattttctgttttggatagattcatatatattatatgagtaatcaataatatataattaaatacattataattacataaataaatcaatccaaatatatatattttcgtcagtcttaatttttttctaaacaataagccaaaccctatgtatgccaggtacaaagcataatttggaaatttcaccagtcagtgcttttccatgccattattgggagcattatgcttctagctataaaacaaataattaaaatccaagaagggttatgtaatgagagtatactcaaagtgtctgatgggaaagaaaatgacatgtaaaaccctatgtaaataaagtaatcctttaatattctatgtagatactcatttgagacaaataactttgtacaaagatctattttttcaaatattgtctgcttgaatggcttttgatgatcccaaaagggaactgtagatagacctttcttgcaagtggattactgcttctgctgtactgagagtctggatacatgcacaggtattactggtaagaattaaatctaaaaggggctgccaactagcaaggttctactttgatcacatgctgagtacatatgaagccattgaaataatcattagtcttgaaataaggatgttgtgcctgcattccttcaccccaacataagcatagctgaatatttggaagattgttttaatatagcaagctatagagctgcaaatcgttatttttgtggtgacctgaatctctttacatcattgtccttgagacatttatttttagtatcttctatgttcttaaataaggtgcaatagctccagtaagtaatctaaaatgttgtcatttattgactttttgtaatgaaaataactaaaattcccccaaataatttcttttacatgtttacaggaagatatgaaaagtaaacacttaaatagcttttttattaacatttaaagaaaattaatacttcttatttgactcagaattaaacaaattcattattctttttttttttttttttttggagatggagtttcactctttttgcccaggctggagtgcaatggcacgatcttggctcactgcaacctctgcctcctgggttcaagcaattttcctgcctcagcctccctagtagctggtgttataggtgcccgccaccatgcccagctaagtttttgtatttttagtagagacagggtttcactatgttggccaagctggtcttgaactcctgacctcaggatccacccgcctcagcctcccaaagtgttgggattacaggcatgagccaccatgcccggctccaaattcattattcttgaaaaatatagagaatatagtaattgtcaaatttcttttttaaaatgtgaaattgatgacaatgacagtaattccttttatttgctcagtttctatccaaatgttaatttaaggaatgtagataactttggtttataagagcattgaacaatgaccagcaatccagtggaatgcatttgttacttttacaagttttcttttttttctttctttttttttgcagacagtgtcttgctctgttgcccaggctggagtgcagtgacatgatctcggctcactgcaacttctacctcctaggctctagcaatcttcccacctcagcctcctgagtagctgggactacaggtgtgtgccaccatgcctagctgatttttctagtctttgtaggacggggtttcatcatgttgcccaggctggtcttgaactcctggactcaagcaatccatataccttggcctcccaaagtgctgggattacaggtgtcagccaccatgcccagccaacttttataagttttctgatataaaacattgcttagtttatcatccattttctcatcaaaatcattcctaaccatgctgagcaaaatagaggatagagctctgtggcacaatacagagactttatttgtagttgatattgatccattaattagtattcacccaatatttcagctactattcttcattttatctataaaaatgtacctagaaatgtggatttgtgctaattcatctgatttataaaaattcagataatctatgccttcaatattcctgtttttaccacttggtagcttcctgttaatctttctagagcttttatgtgcacatacagaatatgcacatatgtgtctatctgccttcctttctttttacacacataatagcacactatgtaaataatagcgtgctatgaaactgctttgcatgttgccttttccacaaaatatatcttggactttattctggaaaatctagatctgccacatttttaaatggcttcacaacattgtgattgcacagatgtatcataagttattttgtcagtttcctattgatagacatttacattgtttccagttgtttggtaatgcaagcaatctttagtacctatccttgtacatacttcttggtgcacatttataataagacttatgcaagaaaactctaaaagtagaattgttgagtgaaatcgtactttaaattctgagagatcttgttaaaatgtgttcaaaccaaaaatttatgagagtgcctgattttctatactttatctcgtctgcatttgtgggcctctcattgttataagttttttcttatattgagttataatctatttttctataatttcccccatttatactagtactgacctctggatttacacataacatattaagtccctctcacatataacaagtctttaagcagttaaagagcgtcctcaaggtttgcccaaggttcatctccagattttatgctctgtagtggaagtttgcctgttggttgtcagatttatcccttgaccttcccctgttttgctctgaaatggaagggggctaacacatgaggttatgttttctaggctcatgttggctgacttctgactgagtttgccaaagtgagacactgcaggaaattggacagaggaaggatctagtgatataagtatttatctcaagaaactaggaagggactctgggcagatcaacatggcaaaatagaaggctccactgattatgtccccacccctgccccctcccccacaatgacaccaatttaacaactatctacacaggaaaaacattttcataagatccaaaaatcgcctgtaatcgcagcactttgggaggccgaggcaggcggatcacgaggtcaggagatcgagaccatcctggctaacatgatgaaaccccgtctctactaaaaacacaaaaaattagccgggcgtggtggtgggcgcctgtaatcccagctactttggaggctgagacaggagaatggcatgaacccgggaggtggagcttgcagtgagccgagattgtgccactgcactccagcctgggtgacagagccagactccatcacaaaaaaagaaaaagaaaaagaaaaaaaaagaaccaaaaatcaggtaaccaatcatagtgcctggttataactttatattgctgaaagaggcactgaagggatagaaaaaataatcttgaatcctcaatgccacccctcccccaccccaggcagctgtggcttggtgcagtgagcctccttgaccactgtgagagacacagcaattgtgaagcactgaactcgctgctgtcctgttagagcacaaagaaaaaccaggccaaactcagctgatgcctgtccatgaaggaagcatttaaaccagtcctagccaaaagggatttgccaatcccagtgatctgaacttgaggactcacaaacctcactgctaccaaggaccaaagtgctctcagactctaagtaaacttgaaaggcagtccaggccataaggactgcaactcttaggtagtcttattgctgaactaggcccagagacagtggattggtgggaaaggaaggtgagacatactgagacaccagctggggcagccaagagagtgctggcatcaccccttctttaactccagtttgcatacctcacagctccaaaaaggccccttccttccacttgtggaaaggagaaggaagactgggaaggactttgatttgcatcttggatgccagatgagctacagtaggatagggcactggttagagtcatgaggcccccattccaggctctagctctcaggtgacattgttagacacaccctaggccagaagggaacctgctgccttgaaagaaaggacagcgtcctgaaagcattaattacctgcaaattgaagagactttaggactcaaataacaagcaacaatactcaggtactacattgagggccttgcgggatcctctgagacctgctggcttcagataagactaagcctgttatcagctgtgttggctattgggcaaaactccctctgcttgagaaaatcagagggaaaggaaaggggactttgtcttgcaccttaagtacaagcacaaccacagggatgtagagcacaaagtgggcttttgggggtccccaattccagaactttgctcttagatggcatttctagacctgccctgggggagagggaagcccactgccctgaagggtgagttccagtcagtcagcattcaccacaagctaacttaagagccctaaggccttaaaggaacatcagtggtagtctggcagtactccttgtggcatggggtggtggtggctatgaggtgaggcttctatgcctttggaaaggggaagaaagagtgggaaggatggtgtcttgtgatttgagtgccagttcagccacagtacaatagaacaccaggtagattattaaggtttttgactcctcttcctgaatcccaggacagtaactctgaacccacctaagcctgggggacctcaccaccctgaagtgaaagacccagaccttgatggttttgccatctgctgattgtacaacctcaggcccttgagtgaacataggcagtatccagggagttattacagcagagcttacagccagtggttacaacactgggcaagacccagtgctgtgctggcttcacatgtgacccagtgcagtcatagtggtagtagcctcaggggtgcttatgttactccacccacagcattaaatggctcagaacagagagagactctgtttgaaagaaaaaaaggaacgaggacaagagtctgcctggtaatccatataattcattcagatgttgtccaagaaaatcaaagtggcatctctatgagtctgcaagaaccacaatgttactgtgcttggggtacaccctaaagtatatacagcttagatcacaacacacgagtctcttcaaatatctggaaagccttagcaagaaggaggactacaaataagttcagacagtgaggactgcaataaataccttacacttcaatgcccaaacaccaaagaatatctaccagtatcaataccatctgggaaaatataaactcacaaaatgaactaaataaggcaccaaggatcaatcctggagaaagacagatatgtaactatttggacagagaattcaaaatagctgtgccgaagaaactcaaaaaaattcaagataacacacagaaggaactcagaattctatcaaattaatttaacaaatagatgacaataatttaaaagaattaagcagaaattctacagctgaaaaatgcaagtgacacaatgaagaatgcatcagtgtcttttagtagcagaattgatcaagcagaaaaaagaattagtgagcttcaagacagtataattgaaaagcactttctagatcctgttgatgtgcttctttgttttttcttatttctttcatatcaggagaaaaacaaagaagcacaccaaaaggatctagaaaatggcctcaaaaaggcaaatctaagagctatcggccttaatgaggaggtagagaaagaaataggggtagaaagtttattcagaggataatagagaatttcctaaacctacagaaagatatcaatgtccaagtacaagaagattatagaacagcaagcagatttgacccaaagaagattacctcaaggtgttgaataatcaaactccccaagatcaatgataaagaaaggatagtaaaagcagcaagagaaaagaaacaaataacatacaatagagctccaatatatctggcagcagactctttgttggaaaacttacaggccaggagatggtggcataacatatttaaagtgctgaagaaaaacaacttttagcctagaatagtatagctggcaaaaatatccttccaacatgaaggagaaataaaaactttcccagacaaagaaaagctgcgggatttcatcaataccaggcaggtcttacaagaaatgctaaagggagtacttcaatcagaaagaaaaggatattaatgagtaataaatgatcacctgaaggtacaaaactcactggtaatagtaagtatgcagataaacatggaatattataacactgtagctgtggtgtgtaaactgctcttatcctaagtaggaagattaaatgactcagcaataaaaaataataactgcaacaaattttcaagacatagtacaataatttgtaaatagaaacaataaaaagttaaaagtaaggggacaaagttaaggtatacaatttttattaattttgtttttgcttgtatgtttgtttatgcaaagagtgttacgttgttatcagctaaaaacagtggtttatatgatagtatttgaaaccttcgtggtaaccacaaaccaaaaaacatacagtgaatacacaaataatgtaaagcaagaaagtgaatcatatcaccagataaaatcaactttactaaaggaagacagaaaaaaaaaaagaaaagaaaacaattaaaatggcaggagtaagacctagtcagtacaataatatataaatgcaaacaacaaaacattaaaaagttactgggtgtggtggcttatgcctttaatctctgcacttagggaggccgaggcaggcaaattgctgaaccctaggagtttgagaccatcttgggtaacatggcaaaaatccatctctacaaaaaatacaacaattatccaggtgtgatggtgtgtgtctgtgatcccagctatttgagaggctgaggtgaaagggtcaattgagcctaggaggtgaaggttgcagtgagtcaatcttctgccactacacttcagtctgggagacagagcaaaaccctgtctcacaaaaaaaaaaaaaaaaaaaaaaaaaaaaaagaaagaaaaagaaaaaaagaaacgataaaaagcaggtggacaaagaagttaagccatagactttttattagtttgttttttacttgtttgtttgttttcttatgcagacagtgttgttataaggttaaaatatgggttattggtagtatttccaagcctcatgataaactcaaaccataaaatatacaatggatacacagaaaatataaagcaaaaaactaaattacatcgccagagaaaatagccttcaataaagcatatatataaggaaaatattatcagagctaaatagagaggccacaattaaataatagctggagacttcatcacaccattttcaccattggacagatcctccagacagaaaatcaccaaaaaaaaaaaaaaaaaaaatcagacttaatctgcactatagaccaaatggatctagataattacagaacatttcctccaacaacttcagaatacatattcttttcttcagcacatggatcgttctcaaagatcaaccatatattagggcacaaaacaagtcttaaaacgttcaaaaaattgaaataatatcaagcatcttctctgaccacaatggaataaaactagtaagtaataacaagaggaattttggaaactatacaaatatatggaaactaaacaatgtactcctgaatggccagtgggtcaatgaagaaattaagaaggaaattgaaaaattccttgaaacaaatgacatatcaacagaatgaaggataaaaactatgtgatcatttcaattgatgctgaaaaagcatttaataaaattcaacattccttcaggataaaaactctcaaaaacctggggatggaaggaacgtgcaccagcataattaaaaccatataaaacagagccatagctagtatcatactgaatgtggagaaactgaaaacctttcctctaagatctgagatatgacaaggatgcccactgtattagtccattttcacgctgccataaaaaacttctcaagactgggtaatttataaaggaagtaggtttaattgactcacagatctgcatgactggagaggcctcaggaaacttacaatcatagcataaggcacctcttcatagggtggcaggagagggaatgagagccgagtgaaggaggaagccccttataaaaccatcagatcttatgagaactcagtcactatcatgagaacagaatggggaaaactgcccccatgattcaattatctccacctggtcttgcccttgacacattgggattattacaattcaaggtgaaatttgggtgaggacacaggcaaagcacataattttgcccctggccctgcccaaatctcatgtccttctcacatttcaaaacacaatcatgccttcccaacagtcccccaaagtcttcactcatcccagcattaactcaaaagttcaagtccaacgtctcatctgagacaaggaaagtcccttctgcctataagcctgtaaaatcaaaagcaggtcagttactttctagttacaatgggggtacaggcattgagtaaatacacccaattcaaatgggagaaattggccaaaacaaaagggttacaggccccatgctatctgaaatccaatagggcagtcattaaaccttaaacttccaaaataatcttctttgactccatgtctcacattcaggtcacacggatgcaaaaggtgggaacccagagtcttgggcagctctgactctatggctttgcaaggtacagctccactcctggcttctttcatgggctggccttgagtgtctgtggcttttccaggcacactatgcaaactgtcggtggatctactgttctgggtctggaggatagtggccctcttctcaaagctgcacaagacagtgccccagtggggactctgggtaggggctccaaccccacatttcccttctgcattgccctagcagaggttctccatgaggactctgccctgcagcaaacttctgcctggacatccaggcctttccatacatcctctgaaatctagccagaggttcccaaacctcaactcttgacttctgtgcacctgcaggcccaacaccatgtggaagctgccaaggtttggggcctgaaccctgtgaagcaatggcctgagctgtatgttggcttcttttagccatggctggtgctgctgggatgcagggcaccaagtcccaaggctgcacacagctggggggcctggaccttgcccacaaaaccatttttccttcctaagcctctacgcttgtgatcggaaggtctctgacatacctggaggcatttccccattgtcttgatgattagcatttagcacctcattacttatgcaaatttctgcagccagcttgaatttctccccagaaaataggtttttcttttctatcccattgccaggctgaaaatttttgaaacttttatgctatgcttctcttgaacattttgctgcttagaaatttcttctgccggataccctaaatcatctctctcaagtccaaagttccacagatcttagggcaggggcaaaaagccaccagactatttgctaaagcatagcaatagtgacctttactctgttttccagcaagtttctcatctccatctgagaccacctcagcctggacttcattgttgatatcactattggcattttggtcaaagccattcaactagtctctaggaagttccaaaccttcccacatctttctggcttctgagccctccaagtctctaggaaactccaaactatcccacattttcctttcttcttctgagcccttcaaactgttccaacatctgcctgttacccagttccaaagtcacttacacgtttttgggtatctgcatagcagcatgccactccctgtggtaccaatttactgtattagtttgttctcatgcagctgtgaagaaatgcctgagactgggtaatttataaagaaaagatgtttaattgacacacagttctgcatggctgggatagcctcaggaaacttaaaatcatggcagaaggcaccttttcacagggcagcaggaaggagaatgagagccaaatgaaagaggaagctccttataaaaccatcagacctcattggagctcactcactattgagtacagtgtggggaaacaatccccatgattcagttatctccacctggccccacccttgacacgtggggattattacaattcaaggtgagagatttgattagggagacagagccaaaccatatcacccactgtcaccactattatttaacatagtactggaagtcctagctgcagcaattagacaagggaaagacataaatggcctccaaattagaaaggaagaagtcaaattatccttgtttacaggtgatgtaatcttgtatttggcaaaacctaaagactccacaagaaagctgttagaactaataaattcagtaatgttgcaggatacaaaaccaacatacaaaaatcagtagcattttcatatgccaatagtgaataatatgaaaaaatgtaatttcatttacaatagccatacataaaattggatacctagaaattaacttaaccaaagaaatgaaagatctctataatgaaaactataaagcactgatgaaaaaaactgaagaggaaaagaaaaaaaaaattgaagagaagaccaaaaaatggaaaaataacccatgtacatggattggaagaatgactattgttaaaatgtccatagtatcaaaaccaatctacatgttcaatgcaatccttatcaatgtatcagtgacattcttcacagaaatagaaaaacaactttaaatttatatggaaccacaaaatatccagagcagccaaagctatccaaattaaaaagaaaaaaacctggaggagtcacattacctggctgcaaattacactgcagagctataggaactgaaacagcatagtactggcataaaacagacacataggccaatggaacagaatagagaagacagaaaaaaatacacacaactacagtgaactcatttttgacaaaattgctaagaagatccactgggggaaaagacagcttcttcaataaatgatactagaaaaacgggatattcatattcagaaaaattaaactggacccctctctctcacctcatacaaaagtcaaattaaagtgaattaaagacttccatctaacacctcaaactataaaagtactacaagaaaactttggggaaaatctccaattcattgatctgggcaaaaatatattaaacaataccccataagcacaggcaaccaagcagaaatggacaaatggaatcacatcaggttaaaaagcttctgcactgtaaaggatacaatcaacaaagtgaagagaaaactcatagaatgggaaaaatatttgcaaactgctcatctgacaagggattaataaccaggatatatagagagttcaaaaagctctgtaggaagaaaatctagtaagctgaacaaaaattgggcaaaagatttgaatagacctttctcaaaagaagacatacaaatggccaaggtgctcaaaaccagtgatcatcagagaaatgcaaatcaaagctgcaatgagatatcattgcaccccagttaaaatggcttatgtccaaaaagtgggcaatgatacatgctggtgagaatgtggggaaaaagtaacccttggacaatgttggtgggaatgtaaattactacaaccgctatggaaaacagattcctcaaaacactataaactgagctaccatgtgatccagctatttctctgctgggtatatacccagaagtaaggaaatcagtatattgaagagatatctgcactcctgtgtttgttgcagcactatttacaatagctaagcttgggaagcaacctacatgtctatcaagagatgaatggacaaagaaaatgtggtacatatacacaatggggtactcttgagccataaaagaatataagtgaataagtaataaatgaataagcggataagagaataagcgaaataatccaggcacagaaagataaatatcacatgttctcacttaagtatgggatctgaaaataaaaacaattgaattcatgaacagagagagttgaagggtggttactggaggctgggaaaggtagtgggggctgagggagatgggaatggttaatagaaaatggaaatagaaagttaatagaaaataaaaaatagaaagaatgaataatacctactttgtggtatctcaacagggtgactatagtcaacaatatttaattgtacattttaaaataacttaaggtatgtaataggattgttcaaaacacaatggataagtgcttgaggggatggataccccattctccatgatgtgcttgtttcatattgcatctttgtatgaaaacatcttatgtaccccataaatatatacacctgtctatccttataaataaataaataaaaataaataaataaactaggagaagaacaaattctacctaattaaaggtgatggaaaataataaggataaaggcagaaattaattaaagagaaagaaaacatttaatagagtaagagtacaagcttaaatttagttctttggaaagactaatataattaattaactcttggcaaaactgatcaagacaaaaaaagataagacacaaattgccaacatcttgggtgaaaagagggataccactgagattctacagatattaaaaagataagagattgatttaatcttatgacaataaattcaattttagataaaatagaaaacttccttaaaaaacacaatttaccaaaactatcacaagaagtataacatttgaataatattatatctattaaagaaatcaaatttgtaattaaaaactttcccacaaagaatagtttagcctcagatgatagtaaatttcttcaaatatttaagagagaaataacatccatgtcacacaaattcttccagaggatagaaaaggaaggaatgtttctgaactcattttatgtgattataataacacttatgagaaaatctgacaaggacataataagaaaattaaaggccaatctccttagtggacataaataaaaatttttattatttattataaaattgaatccagtaataaaatgaacaatcgtcatgatcaagtttggtttcttctatgaattcaaaggtgatatgatatttttgaaaataatttaattattatatcaaagttttgatagcgttagtttcatgagtgctctctcatcctatggtatatttaaagtattttttaagaaaacaccttaacatggctgagtgtggtggctcatacctgtaatcccagcattttgggaggccaaggtgggtggatcacttgaggtcaggagtttgagacctgcctggccaacatgatgaaacctcatctctactaaaaatacaaaaattagccagtcgtagtggcggacgcctgtaatcccaactactctggaggctgagacacaagaattgcttgaatccgggaggcggaggttgtagtgagccgagatcataccactgcactccagcctgggcgacagagcaagactcttaaaaaaaataataagaattgacttgtcagttcctacataaaatctgctgaagttttcataggggtcaaaacataccaatttgcagctaattgatgtctttataatattgagtttttcaattagcatggcatatccctccatttattttggtcctccttaatttctctcaataatgtctgatagtttcctgtataggactcttgcacatgttttgttagatttgtttttaggtatttgatgctatcataaaaagtatcttttttttctcaaattttaatactgattgatttttgtgtattgaacttgtatccagtgaactttcctaatacacttactatttttaacagatgtgtatagattattttaatcttttcaatacataacagtgtcataagcaaataataaatctcttattttttcacttctaatccttttaccttttatttatttttttttactctatttcactggttaggactttcattacagtgttgaatgtaagtgacaacaacaggtgttcttgttttattgccactctaaggaggaaaacttttagtatttcaccactaaatatgacgtttgctataaggttttgtttcatatgctaaggacgtgttcttctattcctggtttgctagaaatgtttttcttattacaaactggtatagaattttaaacttcatcctaactcatttattgagactatcatagactttttctaatttatacctcttttctcacttttccttgatgtttatccattcaaataattgatgataaattgatttttcttgacaaaagttaattttttattattataatgaatgcaatatttattaagctcatattaaggttttttgtttgtgtgttttttgtagagatagggtttcaccacgttggccaggttggcgttgaactcctggccactagtactcagcccgccttggcctaccaaaatgctgggattacaggcatgagccaccacacgcagcaatattaaggtattttcttaaaaaatgttaaatgtaccataggaagagagagtactcataaaattaaaactatcagaactttgatataataaataattttgaaaaatatcatgtcacctttgaattcatagagtaaaccaaacttgatgataacaattgtttattttatcactggattcaaatttataatatataataaaatttttatttttgttcattagggagattggcctttaaattttttttttgaattcaatgatttatttttatttatttatttatttatttatttatttatttattattatactttaagttttagggtacatgtgcacaatctgcaggttagtcacatacgtatacatgtgccatgctggtgcgctgcacccactaactcatcatctagcattaggtatatctcccaatcgtatccctcccccatcccccgaccccacaacagtccccagagtgtgatgtcccccttcctgtgtccatgtgttctcattgttcaattcccacctatgagtgagaatatgcggtgtttggttttttgttcttgtgatagtttactgagaatgatgattttcaatttcatccatgtccctacaaaggacatgaactcatcactttttatggctgcatagtatcccatggtgtatatgtgccacattttcttaatccagtctatcattgttggacatttgggatggttccaagtctttgctattgtgaataatgccgcaataaacatacgtgtgcatgtgtctttatagcagcatgttttatagaccttagggtatatacccagtaatgggatggctgggtcaaatggtatttctagttctagatccctgaggaatcgccacactgacttccacaatggttgaactagtttacagtcccaccaacagtgtaaaagtgttcctattcgtccacatcctctccagcacctgttgtttcctgactttttaatgattgccattctaactggtgtgagatggtatctcattgtggttttgatttgcatttctctgatggccagtgatggtgagcattttttcatgtgttttttggctgcataaatgtcttcttttgagaagtgtctgttcatgtcctttgcccactttttgatggggttgtttgtttttttcttgtaaatttgtttgagttcattgtagattctggatattagccctttgtcagatgagtaggttgcaaaaattttctcccattttgtaggttgcctgttcactctgatggtagtttcttttgctgtgcagaagctctttagtttaattagatcccatttgtcaattttgtcttttgttgccattgcttttggtgttttagacatgaagtccttgcccatgcctatgtcctgaatggtaatggctaggttttcttctagggtttttatggttttaggtctaacgtttaagtctttaatccatcttgaattaatttttgtataaggtgtaaggaagggatccagtttcagctttctacatacggccagccagttttcccagcaccatttattaaatagggaatcctttccccattgcttgtttttctcaggtttgtcaaagatcagatagttgtagatatgcagcattatttctcagggctctgttctgttccattgatctatatctctgttttggtaccagtaccatgctgttttggttactgtagccttgtagtatagtttgaagtcaggtagtgtgatgcctccggctttgttcttttggctcaggattgacttggcgatgcgggctcttttttggttccatatgaactttaaagtaattttttccaattctgtgaagaaaggcattggtagctttatggggatgacattgaatctgtaaattaccttgggcagtacggccattttcacgatattgattcttcctacccatgagcatggaatattcttctatttgtttgtatcctcttttatttccttgagcagtggtttgtagttctccttgaagaggtccttcacatcccttgtaagtttgattcctaggtattttattctctttgaagcaattgtgaatgggagttcactcatgatttggctctctgtttgtctgttgttggtgtataagaatgcttgtgatttttgcacattgattttgtatcctgagactttgctgaagttgcttatccgcttaaggagattttgggctgagacaatggggttttctagatatacaatcatgtcgtctgcaaacagggacaatttgacttcctcttttcctaattgaataccctttatttccttctcttgtctaattgccctggccagaacttccaacactgtgttgagtaggagtggtgagagagggcatccctgtcttgtgccagttttcaaagggaatgcttccagtttttgcccattcagtatgatattggctgtgggtttgtcatagatagctcttattgttttgaaatacatctcatcaatacctaatttattgagagtttttagcatgaagtgttgttgaattttgtcaaaggccttttctgcatctattgagataatcatgtggtttttgtctttggttctgtttgtatgctggattacatttattgatttgcgtatgttgaaccagccttgcatcccagggatgaagcccacttgatcatggtggataagctttttgatgtgctgctggattcgttttgccagtatcttattgaggatttttgcatcaatgttcatcaaggatattggtctaaaattctcttttttggttgtgtctctgcccggctttggaatcagaatgatgctggcctcataaaatgagttagggaggactccctctttttctattgattggaatagtttcagaaggagtggtaccagttcctccttgtacctctggtagaattaggctgtgaatccatctggtcctggactctttttggttggtaagctattgattattgccacaatttcagacctgttattggtctattcagagattcaacttcttcctggtttagtcttgggagagtggatgtattgaggaatttatccatttcttctagattttctagtttatttgtggagaggtgtttgtagtattctctgatggtagtttgtatttccgtgggatcggtggtgatatcacctttatcattttttattgcgtctatttgatttttctctctttttttctttattagtcttgctagtggtctatcagttttgttgatcttttcaaaaaaccagctcctggattcattcattttttgaagggctttttgtgtctctatttccttcaattctgctttgattttagttatttcttgccttctgctagcttttgaatgtgtttgctcttgcttttctagttcttttaattgtgatgttagggtgtcaattttggatctttcctgctttctcttgtgggcatttagtgctataaatttccctctacacactgctttgaatgtatcccagagattctggtatgttgtgtctttgttcttgttggtttcaaagaacatctttatttccgccttcatttcattatgtacccagtagtcattcaggagcaggttgttcagtttccatgtagttgagcggttttgagtgagattcttaatcctgagttctagtttgattgcactgtggtctgagagatagtttgttataatttctgttcttttacatttgctgaggagagctttacttccaagtatgtggtcaattttggaataggtgtggtgtggtgctgaagaaaatgtatattctgttgatttggggtggagagttctgtagatgtctattaggtcagcttggtgcagagctgagttcaattcctgggtatcctttttgactttctgtctcattgatctgtccaatgttgacagtggggtgtcaaagtctcccattattaatgtgtaggagtctaagtctctttgtaggtcactcaggacttgctttgtgaatctgggtgctcctgtattgggtgcatatatatttaggatagttagctcttcttgttgaattgatccctttaccattatgtaatgcccttctttgtctcttttgatctttgttggtttaaagtctgttttatcagagactaggattgcaaaccctgcctttttttgtttttcatttgcttggtagatcttcctccatccttttattttgagcctatatgtgtctctgcacatgagatgggtttcctgaataccgcacactgatgggtcttgactctttatccaatttgccagtctgtgtcttttaattggagcatttagtccatttacatttaaagttaatattgttatgtgtgaatttgatcctgtcattatgatgttagctggtgattttgctcgttagttgatgcagtttcttcctagtctcgatggtctttacattttggcatgattttgcagcggctggtaccggttgttcctttccatgtttagcacttccttcaggagctcttttagggcaggcctggtggtgacaaaatctctcagcatttgcttgtctgtaaaggattttatttcttcttcacttatgaagcttcgtttggctggatatgaaattctggcttgaaaattcttttctttaagaatgttgaatattggcccccactctctcctggcttgtagagtttcggccgagagatcacctgttagtctgatgggcttccctttgagggtaacccgacctttctctctggctgtccttaacattttttccttcatttcaactttggtgtatctgacaattatgtgtcttggagttgctcttctcgaggagtatctttatggcgttctctgtatttcctgaatctgaatgttggcctgccttggtagattggggaagttctccagggtaatatcttgcagagtgttttccaacttggttcccttctccccgtcactttcaggtacacccatcagacgtagatttggtcttttcacatagtcccatatttcttggatgctttgctcatttctttttattcttttttctctaaacttcccttctcacttcatttcattcatttcatcttccatcgctgataccctttcttccagttgattgcatcggctcctgaggcttctgcattcttcacgtagttctcgagccttggttttcagctccatcagctgctttaagcacttctctgtattggttattctagttatacattcttctaaatttttttcaaagttttcaacttctttgcctttggtttgaatgtcctcccatagctcggagtaatttgatcatctgaaaccttcttctctcagctcgtcaaagtcattctccatccagctttgttctgttgctggtgaggaactgcgttcctttggaggaggagagtcgctctgctttttacagtttccagtttttctgccctgtttttcccccatctttgtggttttatctacttttggtctttgatgatggtgatgtacagatgggtttttggtgtggatgtcctttctgtttgttagttttccttctaacagacaggaccctcagctgaggtctgttggagtacccggccgtgtgaggtgtcagtctgcccctgctggggggtgcctcccagttaggctgctcaggggtcaggggtcagggacccacttgaggaggcaggctgccccttctcagatctccagctgcatgctgggagaaccactgctctcttcaaagctatcagacagggacatttaagtctgcagaggttactgctgtctttttgtttgtctgtgccctgcccccagaggtggagcctacagaggcaggcaggcctccttgagctgtggtgggctccacccatttcaagcttcccggctgctttgcttacctaagcaaacctgggcaatggcaggcgcccctcccccagcctcgctgccgccttgcagtttgatctcagattgctgtgctagcaatcagtgagactccgtggttgtaggaccctctgagccaggtgcgggatataatctcgtggtgcaccattttttaagcctgttggaaaagcgcagtattcgggtgggagtgacccgattttccaggtgccgtctgtcacccttttctttgactaggaaagggaactccctgaccccttgtgcttcccaagtgaggcaatgcctcgtcctgcttcggctcgcgcacggtgtgcgcacccactgacctgtgcccactgtctggcactccctagtgagatgaagccggtacctcagatggaaatgcagaaatcacccatcttctgcatcgctcacgctgggagctgtagaccggagctgttcctattcggccatcttggctcctccctctattta

SEQ ID NO: 10328 - DNA, 5679 bp, Homo sapiens
ttctttctttttattattattattattattattattatactttaagttctatggtacatgtgcacaacctgcaggtttcttacatatgtatccatgtgccatgttggtgtgctgcacccattaactcgtcatttacattaggtatatctcctaatgctatccctcccccctccctacaccccacaacaggccctggttgtgatgttccccttcctgtgtccaactgttctcattgttcaagtcccacctgtgagtgagaacatgcggtgtttggttttctgtccttgtgatagtttgctcagaatgatggtttccagcttcatccatgtccctgcaaaggacatgaactcatccttttttatggcgcatagtattctattgtgtatattgccacattttcttaatccagtctatcattgatggacatttgggttggttccaactctttgctattgtgaatagtgccacaataaacatacatgtgcatgtgtctttatagtagcatgatttataatcctttgggtatatacccagtaatgggatggctgggtcaaatggtatttctagttctagatccttgaggaatcaccacactgtcttccacaatagttgaactagtttacagtcccaccaacagtgtaaaagtgttcctatttctccacatcctctccagtacctgttgtttactgactttttaatgatcgccattctaactagtgtgagatggtatctcattgtggttttgatttgcatttctctgatggccagtgatgatgagcattttttcatgtgtctgttggctacataaatgtcttcttttgagaaatgtctgttcatatcctttgcccctttttgatggggttgtttgaattttttcttgtaaatttgtttaagttctttgtagattctggatattagccctttgtcagataggtaggttgcaaaaattttctcccattttgtaggttgcctgttcactctgatggtagtttcctttgctgtgcagaagctctttagtttaattagatcccatttgtcaattttggcttttgttgccattgcttttggtgttttagtcatgaagtccttgcccatgcctatggcctgagtggtattgcctaggttttctttctttttttttttctttgagacagagtcttgctctgtcgcccaggctggagtgcaatggcgcaagctccactcactgcaagctccgcctcccaggttcacgccattctcctgcctcagtctcctgagtagctcagactacaggcacccgccaccacgcccggcaaattttttgtatttttagtagagatggggtttcaccatgttagccaggatggcctcgatctcctgacctcgtgatctgcccgccttggcctcccaaagttctgggattacaggcatgagccaccacgcccagccacctaggttttcttctagggtttttatggttttaggtctaacatttaagtctgtaatccatcttgaattaatttttgtttaaggtgtaaggaaaggatccagtttcagctttctacatatggctagccagttttcccagcaccatttattaaatggggaatcctttccccatttcctgtttttgtcaggtttgtcaaagatcagatggttgtagacgtgtggtatcatttctgaggactctgttctgttccattggtctatatctctgttttggtaccagtaccatgctgttttggttactgtagccttgtgatgtagtttgaagtcaggtagcctgatgcctccagctttgttcttttggcttaggattgtcttggcaatgcgggctcttttttggttccatatgaactttaaagtagttttttccaattctgtgaaaaaagtcattggtagcttgatggggatggcattgaatctataaattaccttgggcagtatggccatttttcactatactgattcttcctatccatgagcatggaatgttcttccatttgtttgtgtcctcttttatttcatcgagcggtggtttgtagttcttcctgaggaggtccttcacatcccttattaagttggattcctaggtattttattctctttgaagcaattgtgaatgggagctcattcatgatttggctctctgtctgttattggtgtacaggaatgcttgtgatttttgcacattgattttgtatcctgagactttgctgaagttgcttatcagcttaaggagattttgggctgagatgatggggttttctaaatatacaatcatgtcatctgaaaacagggacaatttgacttcttcttttcctaattgaataccctttatttcttcctcctgcctgattgccctggccagaacctccaacactatgttgaataggagtggtgagagagggcatccctgtcttgtgccagttttcaaagggaatgcttccagtttttgcccatccagtatgatattggctgtgaatttgtcataaatagctcttattattttgagatacatcccatcaatacctaatttattgagagtttttagcatgaagtgctgttgaattttgtcaaaggccttttctgcatctatcgagataatcatgtggtttttgtctttggttctgtttatatgatggattacgtttattgatttgcatatgttgaaccagccttgcatcccagggatgaagcccatttgatcatggtggataagctttttgatgtgctgctggattcggtttgccagtattgtactgaggatttttgcattgatgttcatcagggatattggtctaaaattctctttttttgttgtgtctctgccagggtttggtatcaggatgatgctggcctcataaaatgagttagggaggattccctctttttctattgactggaatagtttcagaaggaatggtaccagctcctccttgtacctctggtagaatttggctgtgaatccatccggtcctggactttttttggttggtaggctattaattattgcctcaatttcacagcctgttattggtctattcagggattcaacttcttcctggtttagtcttggtagggtgtatgtgtccaggaatttatccatttcttctagattttctagtttatttgcatagaggtgtttatagtattctctgatggtagtttgtatttctgtgggatcggtggtgatatcccctttatcattttttattgcatctatttgattcttctctcttttcttctttaatagtcttgctagtggtctatcaattttgttgatcttttcaaaaaaccagctcctggattcattgattttttgaagggatttttgtgtttctgtctccttcagttctgctctgatcttagttatttcttgccttctgctagcttttgaatgtgtttgctcttgcttctctagttcttttaattgtgatgttagggtgtcaattttagatcattcctgctttctcttgtgggcatttagtgctataaatttccctctacacactgctttaaatgtgtcccaggaattctggtatgttgtgtctttgttctcgttggtttcaaagaacatctttatttctgccttcattttgttatgtacccagtagtcattcaggagcaggctgttcagtttccatgtagttgagtggttctgagtgagtttcttaatcctgagttctagtttgattgcactgtggtctgagagacagtttgttataatttctattcttttatatttgctaaggagtgttttacttccaactatgtggtcaattttggattaagtgtgatgtggtgctgagaagaatatatattctgttgatttagggtggagagttctgtagatgtctattaggtccacttggtgcagagctgagttcaattcctggatatccttgttaactttctgtctcattgatctgtctaatgttgacagtggggtgttaaagtctcctattattattgtgtgggagtctaagcctctttgtaggtctctaaagacttgctttatgaatctgggtgctcctgtattgggtgcatatatatttaggagagttagctcttcttgttcaattgatccctttaccattatgtaatgcccttctttgtctcttttgatctttgttggtttaaagtctgctttatcagagactaggattgcaacccctgcctttttttgttttccatttgcttggtagatcttcctccatccttttattttgagcctatgtgtgtctctgcacatgagatgggtctcctgaatacagcacactgatgggtcttgactctttatccaatttgccagtctgtgtcttttaattggagcatttagcccatttacatttaaggttaacattgttatgtgtgaatttgatcctgtcattatgatgttagctggctatcttgctcgttagttgatgcagtttcttcctagcatcgacagtctttacaatttggcatgtttttgcagtggctggtaccagttattcctttccatgtttagtgcttccttcaggagctcttgtaaggcaggcctggtggtgacaaaatctctcagcatttgcttgtctgtaaaggattttatttctccttcacttatgaagcttagtttggctggatatgaaattctggattgaaaattcttttctttaagaatgttgaatattggcccccactcttttctggcttgtagagtttttgctgagagatccactgttagtctgatgggcttccctttgtgggtaacctgacctttctctctggctgcccttaacattttttccttcatttcaactttggtgagtctgacaattatgtgtcttggagttgctcttctcgaggagtatctttgtggtggtctctgtatttcctgaatttgaatgttggcctgccttgctaggtaggggaagttctcctggataatattctgaagagtgttttccaacttggttccattctccctgtcactttcaggtacaccaatcagacgcagatttggtcttttcacatagttccatatatcttggaggctttgttcgtttctttttactctttttttctctaaacttctcttctcacttcatttcattcatttgatcttcaatcactgataccctttcttccagttgatcgaatcagctactgaagcttgtgcatgcgtcacgtagttctcatgccatggttttcagctccactggtcatttaaggacttttctacactggttattctagttagccatttgtctaatattttttcaaggtttttagcttctttgcgatgggttcgaacatcttcctttagctcagagaagtttgatcgtctgaagccttcttctctcaactcatcaaagtcattgtccgtccagccttgttttgttgctggcaaggagctgcattcctttggaagagaagaggcactctgatttttagaattttcagcttttctgctctggtttctccccatctttgtggttttatctacttttggtctttgatgatggtgacgtacagatggggttttggtgtggatatcctttctgtttgttagttttccttctaacagtcaggaccctcagctgcaggtctgttggagtttgctggaggtccgctccaggccctgtttgcctgggtatcaccagcggaggctgcagaacagcgaatattgcagaacagcaaatgttgctgcctgat

SEQ ID NO: 10329 - DNA, 40898 bp, Homo sapiens
ttattatactttaagttctagggtacatgtgcacaatgtgcaggtttgttacacaggtatacatgtgccatgttggtttcctgcacccattaactcgtcatttacattaggtatttctcctaatgctatccctccccctgaccccaccccatgacaggcctcagggtgagatgttccccaccctgtgtctaagtgttctcattgttcaattcctacctatgaatgagaacatgtggtgtttggttttctgtccttgggatagtttgctcagaatgatggtttccagctgcatccatgtccctgcaaaggacatgaactcatccttttttatggctgcatagtattccatggtgtatatgtgccacattttcttaatccagtctatcattgatggaaatttgggttggttccaagtctttgctattgtgaatagtgccacaacaaacatacaagtgcatgtgtctttatagtagcatgatttataatcctttgggtatatacccagtaataggatggctgggtcaaatgataattctagttctagatccttgaggaattgccacactgtcttccgcaatggtggaattagtttaccaccccccccaccaacagtgtaaaagcattcctatttctccacatcctctccagcatctgttgtttcctgactttttgattatcgccattctaactagcgtgagacagtatctcattgtggttttgatttgcgtttctctgatgaccagtgatgatgagcattttttcatgtgtctgcgggtgcataaatgtcttcttttgagaagtgtctgttcatatcctttgccctctttttgatggggttgttttcttcttctaaatttgtttaagttctttgtagattctagatattagccctttatcagatgggtagattgcaaaaattttctcccattctctatatttcccattcactctgacagtagtttcttttgctgtgcagaagctctttagtttaattagatcccatttatccagtttggcttttgttgccattgcttttgatgttttagtcatgaagtccttgcccatgcctatgtcctgaaaggtattgcctaggttttcttctaggatttttatggttttaggtctaacatttaagtctttaatccatcttgaattaatttttgtataaggtgtaacgaagggatccaatttcagctttctacatatggctagctagttttcccagcaccatttattaaatagagaatcctttcccatttcttgcttttgtcaggtttgtcaaagatcagatggttgtagatgtgtggtgttatttctgaggcctctgttctgctccattggtctatatatctgttttggtaccagtgccatgctgttttggttactgtagccttgtagtagagtttgaagtcaggtagcgtgatgcctccagctttgttctttttgcttaggattgtcttggcaatgtgggctcctttttggatccatatgaactttagttgtttccaattctatgaaaaatgtcattggtagcttaatggggatggcattgaatctataaattaccttgggcaatatggccattttcaccatattgattcttcctattcatgagcatggaaggttcttccatttgtttgtgtcctcttttatttcgttgggaagtggtttgtagttctccttgaagaggtccttcacatcccttgtaagttggatttctaagtattttattctctttgtagcaattgtgaatgggagttcactgatgatttggctctctgtctgttattggtatttaggaatgcttgtgatttttgcacattgattttgtatcttgagactttgctgaaattgcttatcagcttaaggagattttgggctgagacgatggggttttctaaatataaaatcatgtcatctgcaaaaagggacaatttgacttcctcttttcctaattgaatacctttatttctttctcttgcctgattgccctggccagaacttccaacactatgttgaataggagtggtgagagagggcatccctgtcttgtgccagttttcaaagggaatgcttccagtttttgcccattcagtatgatgttggctgtgggtttgtcataaatagctcttattattttgagatacgttccatcaatacctagtttattgagagcttttagcatgaaggctgttgaattttatcaaaggccttttctgcatctattgagacaatcatgtggtttctgtcattggttctgtttatgtgatggattatatttattgatttgcatatgttgaaccagccttgcatcccagggatgaagctgacttgatcgtggtgcataagctttttgatgtgctgctggattcagattgccagtattttattgaggatttttgcatcaatgttcatcagcgatactggtctaaaattctctttttttgttgtgtcactgccagcctttggtatcaggatgatgctggcctcataaaatgagctagggaggattccctctttttctattgatcggaatactttcagaaggaatggtaccagctcctctttgtatctctggtacaattcggctgtgaatccgtgtggtcctggactttttttggttggaaggctgttaattattgcctcaatttcagagcctgttattggtctattcagagattcaacttcttcctggtttagtcttgggagggtgtatgtgtccaggaatttatccatttcttctatattttctagtttatttgcatagaggtgttcatagtattctttgtatttctgcgggatcagtggtgacatcccctttatcatttttattgcatctatttgattcttctctcttcttctttagcagtcttgctagcagtctatcaattttgttaatcttttcaaaaaatcagctcctgaattcattaattttttgaagggttttttgtgtctctatctctttcagtgctgctctgatcttagttatttcctgcattctgctagcttttgaatttgtttgctcttgcttcactggttcttctaattttgatgttagggtgtcaattttagatctttcctgctttcttgtgggcagttagtgctataaatttccctctacacactgctttaaatgtgtcccagagattctggtacattgtgtcttttttctcattggtttgaaagaacatctttatttctgccttcatttcattatttacccagtagtcattcaggagcaggttgttcagtttccatgtagttgtgcggttttgagtgaatttcttaatcctgagttctaatttggttgcagtgtggtctgagagacagtttgttgtgatttctgttcttttacatttgctgaggagtgctttacttccaactatgtggtcaagtttggaataagtgcgatgtggtgctgagaagaatgtatattctgttgatttggggtggagagttctgtagctgtctattaggtctgcttggtgcagagctgagttcaggtcctggatatccttgttaaccttctgtctcgttgatctgtctaatattgatagtggggtgttaaagtctcccattattattctgcgggagtctaagtccctttgtaggtctctaaggacttgctttatgaatctgggtgttcctgtattgggtgcatatatattaaggatagttagctcttcttgttgaattgatccctttgccattatgtaatggccttctttgtctcttttgatctttgttggtttaaagtctgttttatcagagactaggattgcaacccctgcttttttgccttccatttgcttggtagatcttcctccatccctttattttgagcctatgtgtgtctctgcacatgagatgggtctcctgaatagagcacactgatgggtcttgactccttatccaattttccagtctgtgccttttaattggggcatttagcccatttacagttaaggttagtattgttgtgtgttaatgtgatccagtcattatgatgttagctggttattttgcccattagttgatgcagtttcttcctagcattgatggcctttacaatttggcatgtttttgcagtgtctggtacaggttgttcctttccatgtttagtgcttccttcaggagatcttgtaaggcaggcctggtggtgacaaaatctctcagaatttgctgtctgtaaaggattttatttctccttcacttatgaagcttagtttggctggatatgaaattctgggttgaaaattcttttctttaagaatgttgaatattggcccccactctcttctggcttgtagagtttctgccaagaaatccactgttacactgatggtcttccctttgtgcgttacccaacttttctctctggttgcccttaacttttttcccttcatttcaaccttggagaatctgattcccttccaaaatggccaaataggaacagctccagtctgcagctcccagtgtgatcaacgcagaacacgcatgattactgcatttccaactgaggttcctggttcatcacactgggactgttggacagggggtgtagcccatggagggcaagccgaagcagggtggtgcattgtctgaaccaggaagtgcaagggttcaggggatttccctttcctaaccaagggaatccgtaccttcgccaaagactgtacctggaaaaacaggacactcctgcccaaatactgtgcttttccaatggtcttagcaaacggcacaccaggagattatatcccatgccgggttcagcaagtcccactcccatggagccttgctcactgctagtgcagcagtctgagatcaacctgcaaggcagtagcctgtcagggagaggggcatctgccattactgagccttcagtaggtaaacaaagcagcctggaagctcaaactgggcggagcctaccacagctcagcaaggctactgcctctgtagactccacctatgggggcagggcatagctgaacaaaaggcagcagaaacttctgcagacttaaacgtccctgtctgacagccctaaagagagcagtggttctcccagcatggtgtttgagctcagagaacagacagactgcctcctcaagtgggtccctgacccccgtgtagcctaactgggagagacctcccagtagtggccgactgacacctcatacaggcaggtgcccctctgggacgaagcttccagaggaaggattgggcagcaatatttgctgttctgcaatatttgctgttctgcagcctctgctggtaatacctaggcaaacagggtctggagtggaccaccagcaaactccaactgacctgcggatgactgttagaaggaaaatgaacaagcagaaaggaatagcatcaacatcaacaaaaaggacaaaaaaggacatccacaccaaaaccccatctgtatgtcaccaacatcaaagaccaaaggtagagaaaaccaaaaagatgaggagaaaccagagcagaaaagctgaaaactctgaaaaccagagtgcttcttcctcctccaaaggattgcagcccctcgccagcaacagaacaaagctggatggagaatgacttagaagagctgacagaaataggcttcagaaggtcggtaataacaaacttctctgagctaaaggaggatgttcgaatccatcacaagaaagctaaaaaccttggaaaaagattagatgaatggctaactcgaataaacagtgtagagaagaccttaaatgacctgatggagctgaaaaccatggcacgagaactacatgactcatgcacaagcttcaatagccgatccaatcaagcagaagaaaaggtatcagtgattgaagatcaatttaatgaaataaagcgagaagagaagtttagagaaaaaaagagtaaaaagaaatgaacaaagcctccaagaaatatgggactatgtgaaaagaccaaatctatgtgtgattggtgtacctgaaagtgacggggagaggggaaccaagttggaaaacactcttcaggatattatccaggagaacttccccaacctagaaaggcaggccaacattcaaattcaggaaatacagagaacaccacaaagatactcctcgagaagagcaatcccaagacacatacagtaactattttttttagtatgactttcactcaacagtatcattaagaatcatgtgttgcatgtagctggggtctgttcattttcattctaataactcacctttgaattctttttgatgtgttatgtaatttgtagcactacataatttgtagatgatgtgatttacagataattgcatcatatgtaaataagaaaatatttttttttccaaaaccacttttatttcttgttctttcttgattgcactgtaaatgacctcaattatgatagtgaattgaaatggtaacagccactgtttttatctcattctcaatttcagaaagaaatgtttcagaaggtcattattagggatgagctttattgaaagttactttttgttttgtttagatttgtagatagcattcctcagagtaaggaatttctctcctgtttgctaaatatttgcaaaattaaaaaattaaatgtttgctaaatagggtgatagacccgtgatgcgtcgtgatgtcttatttaaggggaatgcgtgggcaatcttagtttcatggccgtgaggtaggaaccagatgccggatacagttcagtatagctacccccaagtgttacgggcccagagcgaggagagtagcacacttgcgtgggatattgatttcacggaggatggtgagtgagaaaccactaaatatttgctaaatattttggcatggatgaatgttgaaatttatataatgatttttctatatttattaagatgattatatcacatgatttttctcttttaatgctatgatcttacaaaatggtttctgttctttccaattctatatttttccctgttttttgccttttgttcaattgattgcatagtttttattattccatttcgtccctctatgagtttataaatcatatactctttcagaatactcacattagtgtacagttgggcaaaatcatccaacacaaagcctgttttgtattgaataccgtactgaaagtgaaaaaaaggatagttctattggtaatcaaagtataatttccactgactcagtatcactttcacaccatcgtaaagtcaaaaaatcttaagttggagactgtctgtagacacattgttcaataaatatcagaaagtgtaaaacatcatacaatgaaaagtccttttcctgctttagacctgcattcatccagtttccatccctctcaacataatgtgttactttttaaagttttcatactgatctttcccgaaatatttcatgcatatgtaagtcaatataatcattttgtattagtctgttctcacactgctaataaataaatacccgagactgggtaacttataaaggaaagaggtttaagtgactcacagttccacatagctggggaggcctcacaatcatggtggaaggcgaaggaggagcaaagtcacatcttacatagcagcaggcaagaagagagcgtgtgcaggggaactcccctttaaaaccatcagctcttgtgagacttattcactatcatgagaacagcatgggaaagacctcaccctgtgattcaattgcctcccaccaggaccctcccatgacacgtgggaatgatgagatctacaattcaagttgagatttgtgtggggacacagccaaaccatttcaaatatgttactactcttccatttttaagtaagtgatacatactttacacatgattatgcatcttcctttttaccttatatatttaaaagcatttcatagctacacatagaaaaatctttattttttcaataatgtatacgtttgtcccatattatatattatacttaaatcagtcccttacttataacattttgtgttgtttctgatcctgtgtttttataaacctacaaacataatacagatgtcattttgcacatgagagttattatctgtagaataaatttctggaagtggagtgctgagtctacaagcaggtgcatctgtcatcttgatagataatgtcacttgccctccatatgggttataccattttgcactcccatcatcaataattgagtctgcttatttttacctatcctcacccacagtgcctaatacatttagatttttgtcactttgaaactaagaacaataattctgtgtaactttttttttgtaattatgagtgacagtgatcatattttcataagtttaagagagatgtgagattgttcatctcttttgcccatttttccattggtctgttggtccttattgatcaaaaaatgatcattctctagcaagggtattagtcaattgtctgaacaaatgtttttcctagttcatgaaatgtatttgaattttttgatgggtagggtttttctgctttgtgttatttgcttgcttctggttttgtttggtatatagacaatttttctttgtatatggtagaatttttcataattcctacagtgtttgtcagtgttcttcagacaaacagaaccaataagatatatataattatataaagaaacttatttaaaaggaatcagctcatacaattaaggagtttggaaaggccaaaacctgaaggatggcctggcaggtgagagacccatggaagagtggatgttgtagttccagtatgaagattgtctactggcagaatttcctcttactcaggaagcagtcaggtttattattattattattattattattattattcaggcaagtaattggcccatctaccttatgaaggttaatctgctttacttgaagtccactaacttaaatgataatctcatccaaaaacaccctcatggaaacatcaagaataatgtttgaccaaatatctgaggactgtgacccagtcaaattgacacataaaattaactatcacacaccctttatggcttctgaatttttgtgtcatttttggaagatccacccccactccaaagttataaaaaaatcccatttttatctctagtgcattatgatttcatttttaataggtatatcttaaattctcatgaaatgtttcttgtgtgtgtaaccagactcaattgtccaaatattgtggattcaatataatcatgatcatcttcttctgatttaagatgccaaccttttcctaaagtttcatgtgcatttagatatctttccaagttttatgttctgtttggattattagccttattatgaaacagaaccagactgctttaattattgaatatttatagaatattttaatttctgataaagttagtctttgctctcttatttggtttctttactattctagtatataagaataaaaaaacaactaattttattacactaaaatgccatgtgccatactggtgtttctattagattcaaattaaaattacaaattagtgaagattgacatcttttttaaatcttcatttctaaaaatgtagtatgtcttttcatttgttgaagtattcttttgcttttcacttttttttttttttttttttttagaaataaggcctcgctctgtctcccaggctggattgcaatggtgcaatcatagcgcctcaaactcctgggctcaaagtgatcctcctacctttgcctcccaagtaactaggattatagacatgcatcaccacactcagttgattttttaaatttttttgtagagaagaggtttctcttcccaggcaggtctcaaacacctggcctcacgcaattctcccaccttggtctcccaaagtgttgggttccaggcatgagctactgtgccaggcttcttttgtattctttagagctatttcagaagcttctttcttcttgatataagtctgtaaattttcttggtacatttttgcatagttattttattatttttgttgctgtcataagtgtgggtctggtgtgaaggttattgaattctgtatgttagtttataacctgatacatttctgcattttcatactgcttgcagtatgaaatataagataacagtcttataatttcttctcttttccaattttcatatctgtaagttttttctttctttcttttttttttttttttttttttttttgaggcagagttttgctcttgttgcctaagctggagtgcaataacgtgatctcagctcactgcagcaacttccgcctcccgggttcaagttattctcctgccttagcctcctgagtagctgggattacaggcatgcaccaccatgcccggctaattttttgtatttttagtagaaacggggtttcaccatgttagccaggctggttttgaactgctgacctcaggtgatctgcctgcctcagcctcccaaactgctgggattacaagcgtgagccaccgtgcccaggctttctcttaaaatttcatgagattctaagtctagtacgttattaaataataaagttaatacttaatatccttttcttatgaggatacttctagtatttctccattaattttaacactagctttgggatagaagtagatacattatcccatagttaagctactattcattgatgattattttcttgagtgtttataaagaatggatttggatcattcaaatgattttttgtatctatggagattattatattactttcccttactgaaataaaagttatatctatatatttcttgatattgaacaccacctttccatatctggagtaaactgcacttggtgagagtgatatttttaattcagcagggtgagaatgtttagtgaagcattatacgttcaaaaatttgaaataatctacaggttcattaacagataaattggagttactttaataggtggatatatgtaagtgggattaatattgtatgtgaatggagattaacagattataaacatatgtagcaaggtagataaatcttataactttgcatcctctgacccctcccaaaagaaaagcagacacaaaagaatatgtactgtgtgatatgatttgcataaagtttaaacatgagaaaatttaaatgatagtgtttaggaatgcgtattttaaggaaataattatcataaaagtcaaaatattagttacctttaaaaaacagagtgggactgggcacggtggatggctcacgcctataatcccagcactttgggaggctgagatgggcagattgcttgagctcaggagttccagaccagcctgggcaacatggtgaaaccccatctctactaaaaatacaaaacttagccgggcttggtggcacatgtctgtaatcccagctacttgggaggctgaggcacaagaatagcttgaaacccggaggtggagactgcagtgagttgagattgcaccacagcattccagcctgggcgacaaagcgagatccatctcaaaaaaataaaaaattaaaataaaaaaattaaagaagaaagacagagacagagacagaaagtgattgggcaaatgagggacttccagggtgctgatatgtttaaattcttgacctgggtagtatttgcaaaagtatgtgctttataataattcatggagttttacatttatatttaatgtatttttctccatatgtgcatattgcattatgaaaagaatttaaaaattatttgcttataatttatttaaaattttcacatcactattcaggagtgaagatgtctatagttttctcctgtttttattctttttttgaggtttgatatgttgattatataaaaagaacttgaagatttccattatttgtcttggctcagaaaatgttaaaaaatcactgtataattacccattctttaaagatttaataaaagttccctgtgccttcatctgagcttgttgtttttcttgttcattgaagagatagagattgtaaaatttggcccatttaggtttttgcaatactatgggtcacatttgataaattatgttttcttagaaaattgtctattttatctaggttttgtatatttgcatcaaaataaataaagtaatgctgtacgatcttttaatttcctctatttttatagtcccccctgagcccccatatcatttactggttgtgaatttgtaccttctcctgttcctccttgattaatgaaactaacagttttgggatttttttttaagaaccaacattagcctttctttataaatttatctgatgattcgtctaattcaatccttctcaaactttgatctctatacaaatcacctggagaccttgttaaaatactgattctgatttagtaggtctgagttggggcctgagattctgcatttgtagcatgttgccagtgatcccaacattgctggcccctactttgagtaataaggttctagcacatctatttattcttttatatgtttctatctatattaatctctttcttcacttatttttctaatttcctgaaagatatttaatacatttctttccactttatttttcattactaataagttttttatttatagttgacataataattgtatatatttatagagtgcagtgttatgttttaatgattgtataccttgtataatgatcaaatcaggttaattaccgtatttgttactttaaacatttatctctctttgtggaaatatcatacaaaatcttctctttttgctgtcttgaaatgtacacaacattgttatttattacagttgcctagctgtgttataggacaccagaactattcttcttgtctaactataactttgtacccactgaccaacctctccccgtcgtgctatcccctacacctaccttccccagcctctgataacctctactctctatttctatgaggtcaacttttttagagtacacaaatgagtgagatcatgcagtgtttgtccttctgtgcctggcttacttcacttaacataatgtcctctaggtttatgctgccacaaatgatagaatttcgttctgttttatgactaagtagcattccattgtaaactattccattctatacaccacattttctttatccattcatctatggataggcatttagattgattctatatctttgctattgtgaatagcactgcaataaaaacaggagggtagctatctctttgacacaaatgatttcatttcctttggatatatataataatggcattgctgtatcatatgatagttctatttttaattgtttgagaaacttctgcatccttttccataatggctatattaatttacattattaccaacaagtcataagagttctcctttctccacattctctccagcatttgttattttttatctttttgataacagccgttctgactagggtgaggtaatagctcatagtagttttgatttgcatttccctgattattagtgatattgaccattttttgtcatatacctgttgactatttgtatgtattcttttgagaaacatctcttcaagtctgttgcccattattaatcacattgtttgttattttgttattgcattgagttccttacatattctgcatattaaccccttgttagatgcatagttcacacatactttctcctattctgtaggttgttttttcactctgatttttttcctgtgctgtacagaagctctttagtttgatgtaatcccatttgtctatttttgcttttgttgtctgtgctgtagaaatactcgacaaaatactaagaaaccaatctcatcaacacattaaaaagatgattcaccatgatcaactgattcatcccagggatgcaaggatggttcaatatatggaagttagtaaatgtgatacatcacattaacataaccaagaataaaaactctatgatcattttaatagatgctgaaaaagcattcaataaaattcaacgtcctttaacgacaaaaactcttaacaaattgcatatcaaaggaacatgcttgaacacagtaaaggccacataggacaaattcatagctaacatcatactgaacagggaaaaattgaaatcttttcctctaagacttgaaacaagacaagaatgcccacttttaccacttacattaaacacagtactggaagttctaggcagagccattaggcaagagagagaaataatggacatccaaatctgaaaggaggaagccaaattgtccctggttgcagatgacatggtcatatttatagaaaactccaaagattgcaccaaaaaactgttagaactaataaataaatttagtaaatttacagaatacaaatcaacatataaaaattagtagtatttctataaaccaatagcaaactctctgaaaaagaaatcaagaaagcaatttcatttgcaatagctaaagaaaaaaacctaggaataaacttaactgaggaggtgaaagatccctatagtaaaaactataaaacatggatgaaagaaattgaataagacacaaaaaaaatggaaaggtaacatgtgattatggattggaagaattaatatttttaaaatgttcgtattacctaaagctagctgcagattcaatgcaatccctacgaaaataccaaagacattctttacagaaatggaaaaaaaaatcttaaattcatattgaaatgcagaagactctgaatactcaaagcaatctggagcaaaaaaataaataaataaagcaacaggtatcacactacctgattttaaaatacactacaaggctatagtaatcaaaacagcatggtactggcataaaaacagacatatagaataatgaaacagaatagagaacccagaaataaatctatgcatttacaaccaattgattttcacaaagatgccaataacatacattgggggaaagagcagcctcttcaataaatggtgctgggaaaagtgattatattcagaagaatgaaactagactcctacctctcacgatatgcaaaaatcaactcaaattaagactgtaatgtaagactgggcatggtagctcatgcctgtaattccagcattttgggaggccaaggcgggcagatcacctgagatcaagaattcgagaccagcctggccaacatggcaaaaccccgtctctactgaaaatacaaaaattatctgggtgtggtggcaggtgcctgtaatcccagctacttgggaggctgaggcatgataatcagaggcatgataatcacttgaatctgggaaactgaggttgcagtaagccaagcttaccccattgcactccagcctgggggatagagtgagactctgtctccaaaaaaagactgtaatgtaagacccaaaactatgaaactactagaagaaaacataagggatatgcttcacaaaattggactgagcaaggatctttttaataagacctaagaaggacagacagcataactattttatttattaataatttattaattaagattaattttaaaaattaacatgaaattaatgatttattaatatacatgtttctatgaatttccataagtcctgctttaatagtatgtagtaggttttgacctacatactgtggtatttttatgatttctttctctagatattttgatatttcaatatttgtaccctgtctgagctaagagttgtcataacagaaaactttttaacatttaggtgctattgaccattgttttctgaattttgttaatttctcattttttgcattgatgatactgtttctacttcttaaaatttgttgaagttttctttgaggcctagtgggtggttaatttctatgactgttacacataaaggtgtatacttcattatcaaggtatattttgaggcatatcaattagactatatctatgtcatttagcactatatattttgctacttagtacttctacaccttgactaatttttcctactggatgtgtcaaaaacagaaagaagaaaattaaagcctctttaaatgggggaaagaataggtttttcaacaaatgctacctggacaactgcatatccatatgaaaagaagggaatggaaccacctttccactccatacacaaaaattaactcataatgaatcaaagagctaaatgtaagaaatagcactatgaaattctcaaaagaaaatgtaggtataaatctttatgaccttgattaggtatggattcttagatgtgataccaaaaacacaagcaacataagaaaaaatagagaaagtggaaataatcaaaattaaaaacgtttttccttcaaaggataccatcaagaaaataaaaaaataacccaaggatttggagaaaattttaacaagtcatatatgtgataagggacttgtatttaaaataatatgtaatgaaaaaggggggcacattccaagatggccaaataggaacagcttcggtctgcatctcccagcgtgatcaacacagaagacaggtgatttctgcatttccaactgaggtacctggttcatctcactaggactgcttggacagagggtgcagcccagagagggcgagctgaagcagagcgggcatcgcctcaccagggaagcatgaggggtcgggggatttccctttcctagccaagggaagccgtgacagactacctggaaaaatggggcactcccacccaaatactgtgcttttcccaaggtcttagcaactggcagacaaggtgattctctcctgtgcctggctcgatgggtcccacacccatagagccttgctcactgctagcacagcagtctgagatcaatctgcaaggctgcagcgtggctgggggaggggcatccaacattgctgaggcttaagtaggtaaacaaagcagcctggaagctcaaactgggtggggcccaccacagcttgacaagacctactgcctctagactccacctctgtgggcagggcatagctgaataaaaggcagtagacaacttctgcagacttaaatgtccctgtctgacagctctgaagagagcagttgttctcccagcattgcatttgagctcgagaatggacagactgcctcctcaagtgggtccctgacccccttgtagcctaactgggagacacctcccagtaggggccaacagacacctcatataggtggctgcccttctgggacaaagcttccagaggaaggatcaggcagcaatatttgctgttctgcaatatttgctattctgcagcctacattggagatacccaggcaaacagggtctggagtggaactccagcaaactccaacagacctgcagctgagagacctgaccgttagaaggaaaactaatgagcagaaaggaatagcatcaacatcaacaaaaaggacatccacaccaaaaccccatccataggtaaccaacatcaaagaacaaaggtagataaaaccacaaagatggggagaaaccagagcagaaaagctgaaaattctgaaaatcagagcacctcttctcctccaaaggatcacagctcctcgccagcaatggaacaaagctggatggagaatgactttgatgagttgacagaagtagtcttcagaaggtcggtaataacaaacttctctgagctaaaggagtatgttcaaacccatcgcaaggaagctaaaaaccctgaaaaaagattagatgaatggctaactagaataaacagtaaagagaagaccttaaatgacctgatggagctgaaaaccatggcatgagaacttcgtgaagcatgcacaagcttcaatagctgaatcaatcaagtggaagaaagggtatcagtaactgaagatcaaattaatgaaataaagcaagaagacaaggttagagcaaaaagagtaaaaagaaatgaatgaaacctccaagaaatatgggactatgtgaaaagaccaaatctacatctgattggtgtacctgaaagtgatgggcggatgaagccaagttggaaaacactcttcaggatattatccaggagaacttccctaacctagcaaggcaggccaacattcaaattcgggaaatacagagaacaccacaaagatattccttaagaagagcaaccccaagacacataattgtcagattcaacaaggttgaaatgaaggaaaaagtataagggcagccagaaagaaaggtcgggttacccacaaagggaagcccatcagactaacagcagatctctcagcggaaagcctaaaagccagaagagagtgggggccaatattcaacattcttaaagagaagaaatttcaacccagatttcatatccagccaaacaaagcttcatacgtgaaggagaaataaaatcctttacaggcaagcaaatgctgagagattttgtcaccaccaggcctgctttacaagagctcctgaaggaggcactaaacatggaaaggaacaaccagtaccagccactgcaaaaatatgccaaattgtaaagaccatcgatgctaggaagaaactgcatcaattaacaggcaaaataaccagcaaacatcataatgacaggatcaaattcacacataacaataataactttaaatgtaaatgggctaaataccccaattaaaagacacagactggcaaattggataaagagtcaagacccatcagtgtgctgtattcaggagacccatctcacatgcaaagactcacatagactcaaaataaagggatggaggaagatctaccaagcaaatagaaagaaaaagaaaaagcaggggttgcaatcctagtctctgataaaacagactttaaaccaacaaagatcaaaggagacaaagaacaccattacataatggtaaagggatcaattcaaccagaagagctaactatcctaaatatatacgcacccaatacaagagcacccaggttcataaaacaagtccttagagatctacaaagagacttagactcccacacaataataatgggagattttaacaccccactgtcaatattagacagatcaacaagacaagttaacaaggatatccaggacctgaactcagctctgcaccaagcagacctaatagacagctgcagaactctccaccccaaatcaacaggatatacattcttctcagcaccacgtcgcacttattccaaaattgaccacatagttggaagtaaagcactcctcagcaaatgtaaaagaacagaaatcacaacaaactgtctctcagaccacactgcaatcaaattagaactcaggattaagaaactcactcaaaaccacacaactacatggaaactgaacaacctgctcctgaatgactactgggtaaataatgaaatgaaggcagaaataaagatgttctttcaaatcaatgagaacaaagacacaacgtgtcagaatctctgggacacatttaaagcagtgtgtagagggaaatttatagcactaactgcccacaagagaaagcaggaaagatctaaaattgacaccctaacatcaaaattagaagaactacagaagcaagagcaaacaaattaaaatgctagcagaaggcaagaaataactaagatcagagcagcactgaaagagatagagacacaaaaaacccttcaaaaaattaatgaattcaggagctggttttttgaaaagattaacaaaattgatagactgctagcaagactaataaagaagaaaaaagagaagaagactcaaatagatgcaataaaaaatgacaaagtggatatcaccatcgatcccacagaaatacaaactaccatcagagaatactataaacacctctacaaaaataaactggaaagtctagaagaaatggataaattcctggacacacacaccctcccaagactaaactaggaagaagttgaatctctgaatagaccaataacaggctctgaaattgaggcaataattaatagcctaccaaagaaaaaaattccaggaccagaaggattcacagccaaattctattagaggtacaaagaggagctgttaccattccttctgaaagtattctaatcaatagaaaaagagggaatcctccctaactcattttatgaggccaacatcatcctgataccaaaggctggcagagacacaacagaaaaagagaattttagatgaatattcccaatgaacatcaatgcaaatatcctcaataaaatactggcaaaccaaatacaacagcacatcaaaaagcttatgcactacgatcaagtcagcttcatccctagcatgcaaggctgtttcaacatacacaaatcaataaatgtaatccatcacataaacagaaccaatgacagaaaccacatgattatctcaacagatgcagaaaaggccttcggcaaaattcaacagctttcttgctaaaaacacgcaataaactaggtattgatggaacgtatctcaaaataataagaactatttatgacaaacccacacccaatatcatagtgaatgagcaaaaactggaagcattcgctttgaaaaccagcacaagaaaacgatgccctctcacaccactcctgtgcaacatattgttggaagttatggccaaggcaatcaggcaagagaaagaaagaaagggtattcaattaggaaaagaggaagtcaaattgtccctttttgaagatgacatgattgtatatttagaaaaccccatcatgtcagcccaaatctccttaagctgataagcaacttcagcaaaatctcaggatacaaaatcaagtgcaaaaattacaagcattcctatacactaacagacaaacagagagccaaatcatgagtgaactcccattcacaattgctacaaagagaataaaatacctagaaatccaacttacaagggatgtgaaggacctcctcaaggagaactacaaaccactgtacaacgaaagaaaagaggacacaaacaaatggaagaatattccatgctcatggataggaagaatcaatatcatgaaaatggccacactgcccagggtaatttatagattcaaggccatccccttaagctaccaatgaccttctttgcagaattggaaaactactttaaagttcatatgaagcaaaaaagagcccgcattgccaagtaaatcctaagcaaaaagaacaaagctggaggcatcatgctacctgacttcaaactatactacaaggctacagtaaccaaaacagcatgatactggtaccaaaacagatatatagaccaatggaacagaacagaggcctcagaaataacaccacacatctacaatcatctgatctttgacaaacctgacaaaaacaagaaatggggaaagaattccctatttaataaatggtgttgggaaaactggctagccatatgtagaaagctgaaattggatcccttccttataccttatacaaaaattaattcaagatggattaaagacttaaatgttagacctaaaaccataaaaaccctagaagaaaacctaggcgatacctttcaggacataggcatgggcaaggacttcatgactaaaacaccaaaagtgatggtaacaaaagccaaaagccaaaatagacaaatgggatctaattaaactaaagagcttccgcacagcaaaagaaactatcatcagagtgagcagacaacctaaagagtgggagaaaatttttgcaatctacacatttgacaaagggctaatttccagaatctacaaagaacttaaacaaatttacaagaagaaaacaaacaaccccatcaaaaagtgtgcaaagatatgaacagacacttctcaaaagaagacatctatgcagccaacagacacatgaaaaaatgctcatcatcactggttattagagaaatgcaaatcaaaaccaccatgagataccatctcaccccagttagaatggcaatcattaaaaagtcaggaaacaatagatgctagaggatgtggagaaataggaacacttttacactgttggtgggagtgtaaattagttcaaccattgtggaagacagtgtggtgattcctcaaggatctagaactagaattaccatttgacccagcaatcccattactgggtatatacccaaaggattataaatcatgctactataaagacacatgcacacgtatgtttattgtggcactattcacaatatcaatgacttggaaccaatccaaatgtccatcagtgatagactagattaagaaaatgtggcacatatacaccatggaatactctgcagccataaaaaaataaaggatgagttcatgtcctttgtagggacatggatgtgactggaaaccatcattctgagcaaactatcccaaggacagaaatccaaacaccacatgttctcactcataggtgggaattgaacaatgagatcagttggacacagggcaagggaacatcacacactggggcctgttgtggagtgggggactgggggagggatagcattaggagaaatatctaatgtaaatgatgagttgatgggtgcagcaaaccaacatggcatgtgtatacctatgtatcaaacctgcaccttgtgcacatgtaccctagaacttaaagtataataataaaagcaaataaacaaataaacaaaatcaataataagaaaatttttaaaaagtagctattacaattcaataatacaaagacaaataactcaattttaaaatgagcaaaggatttcaaccaacatttctccaaagaagatataaaatgttagccaaacacacgagaagattttcagcgtcattcatcattagggaaatgcaaatccaaatcacagtgagatatcatttgacaccagttaggttggctatattcaaaaagacaaaaaataacaagtgttggcaaggatgtgggaaaattggaaccctcatacgttgctggtcagaatgcaaaatgttgcaacctctttgaaaagcagcctggctgtttctcaaacgattaagaatagagttaccatgtggtccaacaattctaccacttgatatctacccaagagaaatgaaaacatgtccacacaaaagcttttgtatgaatgttcatagcagcaccagacacaacagcccaacagtggaaaaaacccaaatgtccataaattgatgaatagattaataaaatgtagtaacccatataatggaatattcatcagcaataaaaataaatgaagtacttgatgcttttgcctcacaactcttaagattctttcctttgtcctgactttagataatctgatgactatgtgcctaggtgatgatctttttgcgaagaacttcccagtgttcttagagcttgttgtatgtggacgtctagatctctagtaaagccaaggaagttttcttcgattagtccctcaaatatgttttccaaacttttagatttctcttcttccttagaaacaccaattattcttaggtttggatgtttaatatagtcccaaacttcttggaagcctttttcattaaaaaaatttttttttctttgtctttgacagattgggttaatttgaaagctttgtcatcaagctctgagattctttcttctgcttctttgattctattgctgagactttcctgtgcattttgcatttctttaagtgtgcccttgatttccagaagttgtgactggtttttatttatgctatctacttcactgaaaatttttcctttcatatcctgtatcacgtttttgattctgtcactatcttctgtgtccttgccaatattttaattaaattattcactctatggtcagttatcttcactttgttttctctgtgaagttatatttttgtgctcttattagagcatttatatttttattatattagttatctttatagttataaattgatcttagtcctctggtgtttgtttattcttactagttataactgtgaatattattatatttcttccttttctctccttttatctctggatccagcagcatactgattttagtcaataatttcttttctggtgtttgctttgatataactgtgtttctgatttatgacttgatttgccaactttaaatgaaatcctttgacttccagctgttttaaattaaacagtaaacacattttctcatcatttcaatttctttccctcttctcctctcaatgtttcagttatgttttatctgccactctaactcacatttttctagttttagtggtactgttaaatatatagtctccctcaatcttttccccaaacttattgattgactgaattttctcttttattggttcccacaaaaagacatcaacaaaataatattgctccagtttttgaactcttattaaaactattgtttgtagcccttatacttcaagaagagtttgcatatatattcttatctcaaagtctctttgcttgagaatctcatgggattgtatctggtattcagagttgctgtgtaaaaacaggaaggcagcctgaattcttctttcttgtaaaattgacctagtcttttcacctgtctgccgaaaggattctttatctttgaagcccagcaactttattgggatatgtctcattggtcattctgggtctttctttatttcttctattctatcacaccaactttgccattctcaacctctgtgaatctcctgtgatttttatactatctgattcttttgccccattttgtttttatttccttaattcttctattttttttttcttggactacacctttccttagttgtgcaagctcatatcttatctcttcctgctatgctaccatactttccctgaattattccattactgtgttatatatcatctttcatccaggtgatcactttaatttgaaggattttttttcctccaaattcatggcaagacatttgttcataactttcattggtatggtaatattttacagaaggatatactttattaatacattttttgccttttttcccttttgtcttggagtatagatataatttttattattcatctttgaatggttttcattttcctaagctctgtatttataagggctttcttgaggcaggaccaggtcagctttcctgtctagcatgcttgcccagtgcaaaggttcttcttttccacagtctccacaaaggtagaacgcttctcaaaaaaatgtgccttgtctttccaaatctttatttggccttgcttcttcttttttatgaaattcattatagtcccattagggtagaaggtcacatcctgcttctgccacacctttgccagcaaggggtacagcttctgactctcaagacatacccatcacttgcgggaaggaaattgttagtagtgtgttctgagatctgtcatggctggtctcctacaactgaggtcttgagatctgtctttagcctttcccaaattcttcccagaagaattcagttgcttttagaaaatcttaaaagtattttaagatttaggataaatacttaaaagtatttaaactctctcctgaagtttatttaacaactgagtttttgttctgagttttccattctttatttgccttagggtggttccagggagagaagtttggagaaggctgcatgacgcagccatgagtatacactgggagtttccactccatccccaatctccaccaaaaagacggtgcttctgaaggtatttttttccttctaatgccttagtttctttatacagtggccaaaaatagtacaagaatatcttcatggcaactacaggcattgctcattgtatggcaagctgatttatggaacttttccactacagaattgatggttctgagcatgaactcaaacagcagttacctgaaaatccagacacatgaggtcttatcccccaatctgtcagttctgtcagggtgaaatgtgcgccttctcagccttctgtcttctttggtgctcattgctaaatagttcagtagaaatgcctcagaggaatcatcttggtgctggctccaaggctctgtgcagtcagccaggctatgaaagaaggcagcctgtgccttctccagactcattcctgctccatcctcaacctaatcttcctgaatacactctccattcaagagccgatggaaaaatggatcactgacaaataacgaattattgtatgaattaacctcttgctggcaactgggcagtttgatagcagactcaaactgggtgatttgagaatttaataaagggactactaattcatcctatgctaatatgaaccctcatttagggttgagagagagtagccaagggatagtgcagtagttggggatttattaatggcagagagcctttaccatttcttgacctggaggggctaaatggcacaggaaacacccaagagtattgcatagctagggcttctggaaaggagcttcagccttcagtagtgggctataggctgtagaaggagggaagtagggaaaagaatctcaccctctctgtgtcaccttctcagctcctgccagtgcttctcattggccaaaccaaatcaacagccagatagcaaatggagttacttgattaagtcctcctatgatggggggaagacagtggatatggaggggcagaaagaaaataaacaaccctacagggatccaccaattgcttttattcagaataaaattttattcagaataaaatttcaaagctattttattctgtaccaaacattgcaaatgttggcttgcggaaagcaaatacaagattattctaaagaaaacattaagcctgaggccatatatcaattacaaggtgaattttagggctcaacacagttatatatcatcaagttcaaatgaacaaatgcctggatttgaatgctaaggcataggattatttcaatatgcacactctgagcattttctgaaaatcatcaagcttttattaccattttatcctaaatcccctgaccacttctcattcaatttgcatgaacaggcctcctctttccacccttattttaatcctggagtttcctaactcagccttctcctctgctaattctactccttctcatagacaggtaactttttctattctttgacatcagtttccacatcttctctagtgagatttcatactatttctttagctcagccctcccttatgaattctcagcccacagaacatagctgccaactggacattttcacctggatgctttatagacatcttaaatcatgttgaaaaactaactcattatcttaagcattcccaaacaaccttctaactcacgcgtgtgcgcacacacacacacacacacacacacagacaccctgcctattcctgaattctcaaacttttaaaatatttcatggccttcatttttgttttctaacaaaaatagataaatgtatgaatggaatgtttttttggcagagaaataagtaaatatttttaaaatttcttcagtgttttctacaatgaaaaggaaatcaacaatttctatactctacgtaggggtcagcttcccaaacccatgacccattagtaatcatcaacaccttatccctggtctcccatatcccggtggttataaattcatggttaaggcacatagctcatgtcttccctgcttggaactgtatgcccatgtctggcattaaaacagctatttcttgaatgagtaactctatgtcttttagctctatgctctaactatctccactgccagccctgcttcatctgattttagtcaataatttcttttctggtgtttgctttgaggacctatgtcaagatctgctgccaccaccttcacataggttctcagtgtcttcctcctatagcaccaaagggccttccagaggccttcctgcctccaaatattccctctctaatcctttctcttcactgcagccaattacctttctaaagggcaattgtggtccctctttaatttaattttattttatttgagaccggttctggctctgtcacccagtttggagttcgatggtgcaatctcagctcactgcaacctctgcctcccaggctcaagctgtcctgccacctcagcctcccaggtaactgggactataggtgcatgccaccatgcccagctaatttttctatttctttgtagagatgaattttcaccatgttgccaggctggtctcaaactcctgagctcaagttatctgcccacctcggccttccaaagtgctggtattacaggcatgagccactgagcccataaataataataagaaaactcactacttctgccttgctggctgggccacagacgattcctgtgtatttcccaaaacagtatgcacacacttgcatttgcaggttagagacaaagtatgtccactctaggttcttgctgcccttgagctaccttccagtttgctacctcctatctacaggactaagacccaagttcttagcatggaaatcagttttccttttcagcctcatttcctgccttacccatccactcacttagaacttggattcttcaacctcttacagtcccctaaaatgttttctgtgtgccatgccccttttgccttccccaggagttcctatttatgcttcaagaagcatctcaaatatcactccctccatgatgcctttgcgaactctctagcattagctgctccttcctctgatgttgtcctattttgtctatctctgtgttgtgcaataattacatctttacatttctgttggcccagcacaagccctacaggccagggctgtattgtagttttctttgtcatcctacccatcagtgccaaatttggaaaatagcaagaactcaatcaatagatgctaaactaatgaacactttattagcctacatttatggagcattcttggtacccattaaacagtttcatctctctcatatgtcagtgttatgtttcactgcagctttccctaaggaattttgtgagaaatatggagtattgcagcactattctttggtcacatgggggtttaattcctatttatacttttcttgtattactagaaataatgactgtaactacttatctggcaaatctctgaaatttctttttaaggaaattgttattgttggagaaatttgcaaagcccgactctgccagggctctattcctcatatctaagcagttaattctctactacgttacgtttagctttcggctctggaaacactctttgaatgcctcctttgtgcagatttatccaactctctcctctttctttcattaagcttgccctgtaaagccatattccttctgttttcaattgtgaatttatttcctctggagctttctgacttagaatctatttgaacttctatagaaactttggttgaaaaggaaaaaaagaaaaaaaagggcctatttttaaaggttttctctttcacctaatattagaggggatttctttgtgattaaacaaatttgttataaagtaacacacactgtgaaatatccaaacaactacaatgtcattataaatatatttttcttatcagagaaggcaacaggcaaatcagccactcttgcaaggtcatatttcacagagacagctgaattcacccactgttgaattatgttataaagccagtgatttagtattgtcatctattttgattgacaccaaaagccttccaggacagtaaatgtaaagatgttagaagaaaatcacttacaaaatggcttgatagttcatgttaatgagttttaaaatgcggtataacaacttaatcaaatcagacagctccataaaagaattaatttggtcattggctctctttccaaaatgactttgttgtactgagtaaggtgagaatttttctgtggctgaaacattcacaactagattcgaaatgacatagcctgggataagttatggattaaccaaagtttctcaggagttatttatatttggcctcttgttaaatgagatgcatgtcttttctgaagtttcattttaatgaaagagaaagaagaatatgaatgacatgtattaaagaccccgagcccacacttaaaacctcaattttggataacttgtgtgttaccttttagaaattagagtgtcattgggttgctattatgggtcgccaacagaaggggattcaggaatatctccatactgccccagaccacagcaataattttctgcaatgtcaagagaaaaacacaggacaataaccagttgaaagcagcaaagttctgcattattttttgctgtcctcttgtcccaaactctagaggagattattagaaacgtagtatctgcccctgtagaattatgggcttatgacaagactagagacctaaggagactagtttcttgtctatccgggctcaaacaccaacctctttcatgcacttccagactgaagttgtttctaaggtcagctttaaggagaaaattacatataatcagaattaccctccagaattcataaatcaccttccattggtatagatcactgtctcttggattgagcagcagattaagtagtcagattgcatttaggtttacattatataaaatttaatatgttttggctgggcgcagtggctcacacctgtaatcccagcactttaggaagccaaggtgggaggatggatagaggtcaggagttcaagaccagcttgggcaacatagcaagacctcatctctataaaaactttaagaattagctggacacagtggcacatgcctgtagtcccagatacttgggaggctggggcagaaggatcatttgagcccaggagtttgaggctgcagtgagctatgatcatgacactgcactccagtctgggtgacagaatgagaccgtgtctctttaaatattaggaatcaccttcagaatggcattgaaaggcaggaagtctgccaggcagtgcgtgagggaagagcagagtcatagactctcctcagactatcttattgacggacaagttacaggtacttttaaaatcagtctctccttcctctctctctctccttttctcagctttctgtctctctcctagagttaaattttaatgaaaaaaaataatgtgaattatttgtgtgttatatatgtgtaacatttctatgtatttatattattaatatgacataataatataatatttgtattattaatatttatttaaaaccatcagcacacacttagaacctccgttttgggtaatgtagttattaccaacattcctacctgacatttatttgtgtatttgttcagtgtatatctgtgtcttctgtgagactgtggggtttatgaagaaagggactatgtatcttttggctcaccatttcattcccacgactagcatggagccgaagaggagatgaaaacatttttatcaaatgaatggctaaaggagagagaccattagacattactacctttggaagttctcttagtaactgtggctcaatcatgttgcagtgttatagacacctttataatttacaaagaactttcacaaacatggcctcattataaaggtgacaagcatgattgtcccccataccagtctgtagaagaagaaactgagacttggagaggctaaccaacttgtgcaaagttgcacagctaacttatgacagaactaggtcttgaacccctgtcttctaacccttagccagaccagttggagttccccatccccagtgacctctcctacatttatggggactcttgtgtatcagagtttgtgactctgtgcccgtgtaaggcagtgatcacatcttgtccctcacaacagagatgtattaagtgcctactatgcgccagacatgcaaaaaacttccaggacgcaaacaagaatgagatgtatgtatttcttgccatcaaaacaactcacaatctaatgcagcatagtgttaaacatgtacatttctaatatactgttgaatatgtttgtggatgaaatcctatcctgcttgcagttgcaataatctgcaggttaaatggaaggaaaagcaaggcttgctggtttgcacaaacgttaacaactattagctcaagttcgaaacaagattgtaaccattctgcacaagtgttaaggagtgcatatttgcagagctgaggccaggaggcttaaattttagaaacagctgtggaactcctttcagtatgtacagttggaaggaggctggcattgtcagggagtcgctctggaaaatacaggcactgaatatattttatcttttcccttattccagtgttagtgtccccatagaattccaagtgagaaaataacctgcaaaggtgtgaggtgggaatcatattacaacattcaagcaggtgagatcctcagagatgaaaggggaagaaaatggcactttaatgcatgagagtaatcttccaggatttgtaccaggatgtgttatattttaacaagaagagttctcagaagggtcagtttcaggaacatcacatgaacccctggagaaaagtaaatggttgattggctgtcacacttactgtttcaatatgctgggtaaagcaaagcgaggaaaggtgaggtctcaccaagtgcagattacaaaacaaatgcattctttgtgtgcttttttcatagtagatgattttgaaacaaaaagagaaaaataaacctgttgagtagaaacttgggaagtaaaactgagtgatagaggattagttttcacatgtaggcggtacacagagtttgtacagtttcgtagttacaagacagggtagaatgaatatttaaagagaagactgttaggaacaatggttcagaaggatgaaggaactcaataaggttgtgagggattgagaaggaatgttttgcttgaaacatggagtatggcaacaatgaatgagcctagttttgaatcaaaatgacctgaaaaacttctgtagaaagtttccaacaaagcagtgctgtattatggaagatcctgccatatggattgaaacttttctagaacttttaatagacgagccctcataagtaagatccaggcaaccaaattactactctttgaatgctattgtgggtatcatgtcaagatccaatgttttctttccatgttatactaaagaaataaaacttaatgtctatagttcaggttatatttgaaactttaatagttctagattgaagctagcataaaaacactgtatactgagcatggtggctcacacctgtaatctcaatgctttgagaggccaaggccagaggatcacttgaggccaggagttcaagaccaacctgagcaacatagcgagaccccatctgatatggtttggctctgtgttcccacccaaatctcacctcaaattgtaataattcccatgtgttaagagcgagaccaggtggagataattgaatcatggtggcagtttcctctatgctgttctcatgatagtgacttctcatgagatctgatggttttataaggggcttcccccttttctcagcactcatcctccctcctgctgccctgcgaagaggtgctttctgccatgattgtcagtttcctgaggccttcacagctatgcggaactacgagtcaattaaacctcttttctttataaattacccagtcttgggtatttcttcatagcagcatgaaaacagactaatacagtaaattggtaccaggagtagtggatcactgctgaaaacatacccaaaaaatgaaaataaaaaattagccagacatgatggcatgctcctgaggtctagctattcaggaggctaaggcaggaggatcgcttgagcccagaagtttgaggttacagtgagctatgattgtgccactgcactgtagcctgggtgacagggtgagactttgtctctaaaaaagtgaaattaaaaaaaagaaagactccataaatgacattttaaagggaaaaaatgtttatgacaattatattgtatattcaaacaaaatgtattcttatttcataaccaatgaaaatctgtgttgactggaaaagagattaattatggtcactgagaagcagaatgtaaagcattatttgcaggaaaagaaagcctagtttcctttacatgccactcacatattggtattttctcattattagaacttacatttttttaagttcagagttttaaaattccccagagacttctgcaaaacctgaaccatcattgagtaatccatcaaaaatccagaggcattaaaagttccatgactaatatgtgtgaaatgtttgaagatgaaactctcttttgtaattatagaccgcagaatgtggaatagtttctgccgtttgaattacctacctgaggatactacttgaaagttccatcttccgtaaataacagccagcctgttatagaagacaggcagtgttttcatacctggaatagaaattattttagaatcatttccatgcaacattttttcattattactaagatctggtgactatgaaagggagtaaacttacacagctggctcttttcagacagagagattcaatttattcttgttccaatactgtaggaaaataaaaaggttaaaattaccttttggattcaatgtgatattttccctagatacctaaacaaatggaagacaggcagctttcccagctttggaataggggacagtaagggatttcccttgtagcgtgttgtgttttatctgaaatctggcccttttctgtaattaaaaaagggatttaggtactgaatttaatcctttaaatggccaatatcttgtaacttttccagatatttccctggttcatcaagaggcaagagacttactttaattctgatctaatatgtacctgccttttaattatgtgctaaaacaatttgggagatgggatggtttggtacaaacttgctcctgctgtggaaatggtgacttggttgatctaggttctggtccagaaatgtgcaggtttgggtttgttttttttttttcaattattatactttaagttttagggtacatgtgcacattgtgcaggttagttacatatgtatacatgtgccatgctggtgcgctgcacccactaactcatcatctagcattaggtatatctcccaatgctatccctcccccctgcccccaccccaccacagtccccagagtgtgatattccccttcctgtgtccatgtgatctcattgttcaattcccacctatgagtgagaatatgcagtgtttggttttttgttcttgcgatagtttactgagaatgatgatttccaatttcatccatgtccctacaaaggacatgaactcatcactttttatggctgcatagtattccatgctatatatgtgccacatttacttaatccagtctatcattgttggacatttgggttggttccaagtctttgctattgtgaataatgccgcaataaacatacgtgtgcatgtgtctttatagcagcatgatttatagtcctttgggtatatacccagtaatgggatggctgggtcaaatggtatttctagttctagatccctgaggaatcgccacactgacttccacaatggttgaactagtttacagtcccaccaacagtgtaaaagtgttcctatttctccacatcctctccagcacctgttgtttcctgactttttaatgattgccattctaactggtgtgagatggtatctcactgtggttttgatttgcatttctctgatggccagtgatgatgagcattttttcatgtgttttttggctgcataaatgtcttcttttgagaagtgtctgttcatgtcctttgcccacttttcgatggggttgtttatttttttcttgtaaatttgtttgagttcattgtagattctggatattagccctttgtcagatgagtaggttgcgaaaattttctcccattttgtaggttgcctgttcactctgatggtagtttcttttgctgtgcagaagctctttagtttaattagatcccatttgtcaattttgtcttttgttgccattgcttttggtgttttggacatgaagtccttgcccatgcctatgtcctgaatggtaatgcctaggttttcttctagggtttttatggttttaggtctaacgtttaagtccttaatccatcttgaattgatttttgtataaggtgtaaggaagggatccagtttcagctttgtacatatggctagccagttttcccagcaccatttattaaatagggaatcctttccccattgcttgtttttctcaggtttgtcaaagatcagatagttgtagatatgcggcgttatttctgagggctccgttttgttccattgatctatatctctgttttggtaccagtaccatgctgttttggttactgtagccttgtaatatagtttgaagtcaggtagcgtgatgcctccagctttgttcttttggcttaggattgccttggcgatgcgggctcttttttggttccatatgaactttaaagtagttttttccaattctgtgaagaaagtcattggtagcttgatggggatggcattgaatctgtacgttaccttggccagtatggtcatgttcacgatattgattcttcctacccatgagcatggaatgttcttccatttgtttgtatcctcttttatttccttgagcagtggtttgtagttctccttgaagaggtccttcacatcccttgtaagttggattcctaggtattttattctctttgaagcaattgtgaatgggagttcactcatgattttgctctctgtttgtctgttgttggtgtataagaatgcttgtgatttttgtacattgattttgtatcctgagactttgctgaagttgcttatcagcttaaggagattttgggctgagacaatggggttttctagatatacaatcatgtcgtctgcaaacagggacaatttgacttcctcttttcctaattgaataccctttatttccttctcctgcctaattgccctggccagaacttccaacactatgttgaataggagtggtgagagagggcatccctgtcttgtgccagttttcgaagggaatgcttccagtttttgcccattcagtatgatattggctgtgagtttgtcgtagatagctcttattttgaaatacctcccatcaatacctaatttattgagagtttttagcatgaagggttgttgaattttgtcaaaggctttttctgcatctattgagataatcatgtggtttttgtctttggctctgtttatatgctggattacatttattgatttgcgtatattgaaccagccttgcattccaggaatgaagcccacttgatcatggtggataagctttttgatgtgctgctggattcgttttgccagtattttattgaggatttttgcatcaatgttcatcaaggatattggtctaaaattctcttttttggttgtgtctctgcccggctttgctatcaggatgatgctggcctcataaaatgagttaggaaggattccctctttttctattgattggaatagtttcagaaggaatggtaccagttcctccttgtacctctggtagaattcggctgtgaatccatctggtcctggactctttttggttggtaaactattgattattgtcacaatttcagttcctgttattggtctattcagagattcaatttcttcctggtttagtcttgggagagtgtatgtgtcgaggaatttatccatttcttctagattttctagtttatttgcatagaggtgtttgtagtattctctgatggtagtttgtatttctgtgggatcagtggtggtatcccctttatcattttttattgtgtctatttgattcttctctctttttttctttattagtcttgatagcggtctgtaaattttgttgctcctttcaaaaaaccagctcctggattcattaattttttgaacggttttttgtgtctctatttccttcagttctgctctgattttagttatttcttgccttctgctagcttttgaatgtgtttgctcttgcttttctagttcttttaattgtgatgttagggtgtcaattttggatctttcctgctttctcttgtgggcatttagtgctacaaatttccctctacacactgctttgaatgcgtcccagagattctggtatgttgtgtctttgttctcattggtttcaaagaacatctttatttctgccttcatttcgttatgtacccagtagtcattcaggagcaggttgttcagtttccacgtagttgagtggttttgagtgagattcttaatcctgagttctagtttgattgcactgtggtctgagagatagtttgttataatttctgttcttttacatttgctgaggagagctttacttcccagtatgtggtcaattttggaataggtgtggtgtggtgctgaaaaaaatgtatattctgttgatttggggtggagagttctgtagatgtctattaggtccgcttggtgcagagctgagttcaattcctgggtatccttgttgactttctgtctcgttgatctgtctaatgttgacagtggggtgttaaagtctcccattattaatgtgtgggagtctaagtctctttgtaggtcactcaggacttgctttatgaatcttggtgctcctgtattgggtgcatatatatttaggatagttagctcttcttgttgaattgatccctttaccattatgtaatggccttctttgtctcttttgatctttgttggtttaaagtctgttttatcagagactaggattgcaacccctgcctttttttgttttcctttggcttggtagatcttcctccatccttttattttgagcctatgtgtgtctctgcacgtgagatgggtttcctgaatacagcacactgatggctcttgactctttatccaatttgccagtctgtgtcttttaattggagcatttagtccatttacatttaaagttaatattgttatgtgtgaatttgatcctgtcattatgatgttagctggttcttttgctcattagttgatgcagtttcttcctagtctcgatggtctttacattttggcatgattttgcagcggctggtactggttgttcctttccatgtttagcgcttccttcaggagctcttgtaaggcaggcctggtggtgacaaaatctctcagcatttgcttgtctgtaaaggattttatttctccttcacttatgaagcttagtttggctggatatgaaattctgggtggaaaattcttttctttaagaatgttgaatattggcccccactctcttctggcttgtagggtttctgccgagagatctgctgttagtctgatgggcttccctttgagggtaacccgacctttctctctggctgcccttaacattttttccttcatttcaactttggtgaatctgacaattatgtgtcttggagttgctcttctcgaggagtatctttgtggtgttctctgtatttcctgaatctgaacgttggcctgccttgctagattggggaagttctcctggataatatcctgcagagtgttttccaacttggttccattctccccatcactttcaagtacaccaatcagacgtagatttggtcttttcacatagtcccatatttcttggaggcttttctcatttctttttattcttttttctctaaacttcccttctcacttcatttcattcatttcatcttccatcgctgataccctttcttccagttgatcgcatcagctcctgaggcttctgcattcttcacgtagttctcgagccttggttttcagctccatcagctcctttaagcacttctctgtattggttattctagttatacattcttctaaattttttcaaagttttcaacttctttgcctttggtttgaatgtcctcccgtagctcagagtaatttgatcgtctgaagccttcttctctcagctcgtcaaagtcattctccatccagctttgttccattgctggtgaggaactgcgttcctttggaggaggagaggcgctctgtgttttagagtttccagtttttctgttctgttttttccccatctttgtggttttatctacttttggtctttgatgatggtgatgtacagatgggtttttggtgtggatgtcctttctgtttgttagttttccttctaacagacaggaccctcagctgcaggtctgttggaataccctgccgtgtgaggtgtcagtgtgcccctgctggaggggtgcctcccagttaggctgctcgggggtcaggggtcagggacccacttgaggaggcagtctgcccgttctcagatctccagctgcgtgctgggagaaccactgctctcttcaaagctgtcagacagggacatttaagtctgcagaggttactgctgtctttttgtttgtctgtgccctgcccccagaggtggagcctacagacgcaggcaggcctcctggagctgtggtgggctccacccagttcgagcttcctggctgctttgtttacctaatcaagcctgggcaatggcgggcgcccctcccccagcctcgctgccaccttgcagtttgatctcagactgctgtgctagcaatcagcgagactccgtggggtagtaccctccaagccaggtgcgggatataatctggtggtgcgccattttttaagctggtccgaaaagcgcaatattcaggtgggagtgacccgattttccaggtgcgtctgtcacccctttctttgactcagaaagggaactccctgacccttgcgcttcccaagtgaggcaatgcctcgccctgcttcggctcgcgcacggtgcgcacacccactgacctgcacccactgtctggcactccctagtgagatgaacccggtacctcagatggaaatgcagaaatcacccgtcttctgcgtcgctcacgctgggagctgtagaccggagctgttcctattcagccatcttggctcctcctctc

SEQ ID NO: 10330 - DNA, 5068 bp, Homo sapiens
aggcaccacattttcttttttttattattattatactttaagttttagggtacatgtgcacaatgtgcagttttgttacacatgtatacatgtgccatgttggtgtgctgcacccatcaactcggcatttagcattaggtatatctcctaatgctatccctcccccctccccccaccccacaacagtccctggtgtgtgatgttccccttcctgtgtccatgtgttctcattgctcaattcccacctatgagtgaggacatgcagtgtttggttttttgtccttgcgatagtttgctgagaatgatggtttccagcttcatccatgtccctacaaaggtcatgaactcatcattttgtatggctccatagtattccatggtgtatatgtgccacattttcttaatccagtctatcattgttggacatttgggttggttccaagtctttgctattgtgaacagtgccgcaataaacatacgtgtgcatgtgtctttatagcagcatgatttataatcctttgggtatatacccagtaatgggatggctgggtcaaatggtatttctgtttctagatccctgaggaatcgccacactgacttccacaatggttgaactggtttacagtcccaccaacagtgtaaaattgttcctatttctccacatcctctccagcacctgttgttgcctgactttttaatgatcaccattctaactggtgtgagattgtatctcattgtggttttgatttgcatttctccgatggccagtgatgatgggcattttttcatgtgtctgttggctgcatagatgccttcttttgagaagtgtctgttcatgtccttcgcccaatttttgatggggttgtttgtttttttcttgtaaatttgtttgagttcattgtagattctggatattagccctttgtcagacgagtaggttgcgaaaattttctcccattttgtaggttgcctgttcactctggtggtagtttctttcgctgtgcagaagctctttagtttaattagatccgatttgtcaattttgtcttttgttgccattgcttttggtgttttagacatgaagtccttgcccatgcgtatgtcctgaatggtattgcctaggttttcttctagggtttttatggttttaggcctaacatgtaagtctttaatccatcttgaattaatttttgtataaggtgtaaggagggatccagtttcagctttctacataaggctagccagtttccccagcaccatttattaaatagggaatcctttccccattgcttgtttttctcaggtttgtcaaagatcagatagttgtggatatgcggcattatttctgagggctctgttctgttccattggtctatatttctgttttggtaccagtaccatcctgttttgtttactgtagccttgtagtatagtttgaagtcaggtagcatgatgcctccagctttgttcttttggcttagaattgacttgacaatgcaggctcttttttggttccatatgaactttaaagtagttttttccaattatgtgaagaaagtcatttgtagcttgatggggatggcattgaatctgtaaattaccttgggcagtatggccattttcacgatattgattcttcctacccacgagcatggaatgttcttccatttgtttgtatcctcttttatttcattgagcagtggtttgtagttctcctcgaagaggtccttcacatcccttgtaagttggattcctaggtattttattctctttgaagcaattgcgaatgggagttcactcatgatttggctctctgtttgtctgttattggtgtataagaatgcttgtgatttttgcacattgattttgtatcctgagactgcagaagttgcttatcagcttaaggagattttgggctgagagaatggggttttctagatatacaatcatgtcatctgcaaacagggacaatttgacttcctctttccctaattgaatgccctttatttccttcttctgcctgattgccctggccagaacttccaacactatgttgaataggagtggtgagagagggcatccctgtcttgtgccagtattcaaagggaatgcttccagtttttgttcattcagtatgatattggctgtgggtttgtcatagatagctcttattattttgagatacgtcccatcaatacctaatttattgagagtttttagcatgaaggattgttgaattttgtcaaaggccttttctgcatctattgagataatcatgtggtttttgtctttggttctgtttacatgctggattacgtttcttgattttcgtatgttgaaccagccttgcatcccagggatgaagcccacttgatcatggtggataagctttttgatatgctgctggattcggtttgcacagtattttattgaggatttttgcatcaatgttcatcaaggatattggtcgaaaattctctttttttgttgtgtctctgccaggctttggtatcaggatgatgctggcctcatgaaatgagttagggaggattccctctttttctattgattggaatagtttcagaaggaattgaaccagctcctccttgtacctctggtagaattcagctgtgaatccatctggtcctggacgttttttggttggtaagctattaattattgcctcaatttcacagcctgttattggtctattcagagattcaacttcttccttgtttagtcttggaagggtgtatgtgttgaggaatttatccatttcttctagattttctagtttatttgcatagaggtgtttatagtattctctgatggtagtttgtttttctgtgggattggtggtgatatcccctttgtcatttttgattgtgtctatttgattcttctctcttttcttctttattagtcttgctagcagtctttcaattttgtagatcttttcaaaaaaccagctcctggattcattgattttttgaagggtttttcatgtctctatttccttcagttctgctctgatcttagttatttcttgccttctgctagatttggaatgtgtttgctcttgcttctctagttcttttaattgtgatgttaggctgtccattttagatttttcctgctttctcttgtgggcatttagtgctataaatttccatctacacactgctttgaatgtgtcccagagattctggtatgttgtgtctttgttctcgttggtttcaaagaatatctttatttctgccttcattttgttatgtacccagtagtcattcaggagcaggttgttcagtttccatgtagttgagcagttttgagtgagtttcttaatcctgtgttctggtttgattgcactgtggtctgacagacagtttgttataatttctgttcttttacatttgctgaggagtgctttacttccaactatgtggtgaattttggaataggtgtggtgtggtgctgagaagaatgtatattctgttgatttggggtggagagttctgtagatgtctattaggtctgcttggtgcaggaattgcaccaaggaattgaactcctgggtatccttgttaactttctgtctcattgttctgtctaatgttgatagtggggtgttagtctcccattattattgtgtgggagtctatgtctctttgtaggtcactaaggacttgctttatgaatctgggtgcatatatatttaggatagttagttcctcttgttgaattgatccctttaccattatgtaatggccttctttgtctcttttgatctttgttggtttaaagtctgttttatctgagagtaggattgcaactcctgcctttttttgttttccatttgtttggtagatcttcctccatccctttattttgagcctatgtgtgtctctgcacgtgagatgggtttcttgaatacagcacactgatggatcttgactctttatccaatttaccagtctgtgccttttaattggagcatttagcccatttacatttatggttagtattgttatgtgtgaatttgatcctgtcattatgatgttaggtagttattttgcttgttagttgatgcagtttcttcctagcctcgatgatctttacaatttgtcatgtttttgcagtggctggtaccggttattcctttccatgtttagtgcttccttcaggagctcttttagggcaggcgtggtggtgacaaaatctctcagcatttgtttgtctgtaaagtatgttatttctccttcacttatgaagcttagtttggctgtatatgaaattctgggttgaaaattcttttcttgaagaatgttgaatattggcccccactctcttctggcttgtagactttctgccaagagatcagctgttagtctgatgggcttccctttgggggtaacccgacctttctctctggctgcctttaacattttttccttcatttcatctttggtgaatctgataattatgtgtcttagagttgctcttcttgaggagtatctttgtggcattctctttatttcctgaatttgaatgctggcctgcgttgctagattggggaagttctcctggataatatcctgcagagtgttttccaacttggttccattctccccgtcactttcaggtacaccaattagacgtagatttggtcttttcacatagtcccatatttcttggaggctttgttcatttctttttattcttttttctctaaacttctcttcacgcttcatttcattcctttagtcttccatcactgataccctttcttccagttgattgcatcagttactgaggcttgtgcattcatcacgtagttctcgtgccatggttttcagctctatcaggtcctttaaggacttctctgcatcggttattctagttatccattcatctaatattttttcaaagtttttaacttctttgtcattggttcgaacttcctcctttagttcagagtagtttgatcttctgaagccttcttctctcaattcgtcaaagtcattctccgtccagctttgttccgttgctggtgaggagctgcgttcct

SEQ ID NO: 10331 - DNA, 6620 bp, Homo sapiens
tggccagttatagaattttcttttcttttttttttttttttattatactttaagttttagggtacatgtgcacattgtgcaggttagttacatatgtatacatgtgccatgctggtgcgctgcacccactaactcgtcatctagcattaggtatatctcccaatgctatccctcccccctccccctaccccaccacagtccccagagtgtgatattccccttcctgtgtccatgtgatctcattgttcaattcccacctatgagtgagaatatgcggtgtttggttttttgttcttgtgatagtttactaagaatgatgatttccaatttcatccatgtccctacaaaggacatgaactcatcattttttatggctgcatagtattccatggtgtatatgtgccacattttcttaatccagtctatcattgttggacatttgggttggttccaagtctttgctattgtgaataatgccgcaataaacatacgtgtgcatgtgtctttatagcagcatgatttatagtcatttgggtatatacccagtaatgggatggctgggtcaaatggtatttctagttctagatccctgaggaatcgccacactgacttccacaatggttgaactagtttacagtcccaccaacaatgtaaaagtgttcctatttctccacatcctctccagcacctgttgtttcctgactttttaatgattgccattctaactggtgtgagatggtatctcattgtggttttgatttgcatttctctgatggccagtgatgatgagcattttttcatgtgttttttggctgcataaatgtcttcttttgagaagtgtctgttcatgtcctttgcccactttttgatggggttgtttgtttttttcttgtaaatttggttgagttcattgtagattctggatattagccctttgtcagatgagtaggttgcgaaaattttctcccattttgtaggttgcctgttcactctgatggtagtttcttttgctgtgcagaagctctttagtttaattagatcccatttgtcaattttgtcttttgttgccattgcttttggtgttttggacatgaagtccttgcccatgcctatgttctgaatggtaatgcctaggttttcttctagggtttttatggttttaggtctaacgtttaaatctttaatccatcttgaattgatttttgtataaggtgtaaggaagggatccagtttcagctttctacatatggctagccagttttcccagcaccatttattaaatagggaatcctttccccatttcttgtttttctcaggtttgtcaaagatcagacagttgtaggtatgcggcgttatttctgagggctctgttctgttccattgatctatatctctgttttggtaccagtaccatgctgttttggttattgtagccttgtagtaaagtttgaagtcaggtagtgtgatgcctccagctttgttcttttggcttaggattgacttggcgatgtgggctcttttttggttccatatgaactttaaagtagttttttccaattctgtgaagaaagtcattggtagcttgatggggatggcattgaatctgtaaattaccttgggcagtatggccattttcacaatattgattcttcctacccatgagcatggaatgttcttccatttgtttgtatcctcttttatttccttgagcagtggtttgtagttctccttgaagaggtccttcacatcccttgtaagttggattcctaggtattttattctctttgaagcaattgtgaatgggagttcactcatgatttggctctctgtttgtctgttgttggtgtataagaatgcttgtgatttttgtacattgattttgtatcctgagactttgctgaagttgcttatcagcttaaggagattttgggctgagacaatggggttttctagatatacaatcatgtcatctgcaaacagggacaatttgacttcctcttttcctaattgaataccctttatttccttctcctgcctaattgccctggccagaacttccaacactatgttgaataggagtggtgagagagggcatccctgtcttgtgccagttttcaaagggaatgcttccagtttttgcccattcagtatgatattggctatgggtttgtcatagatagctcttattattttgaaatacgtcccatcaatacctaatttattgagagtttttagcatgaagggttgttgaattttgtcaaaggctttttctgcatctattgagataatcatgtggtttttgtctttggttctgtttatatgctggattacatttattgatttgcgtatattgaaccagccttgcatcccagggatgaagcccacttgatcatggtggataagctttttgatgtgctgctggattcggtttgccagtattttattgaggatttttgcatcaatgttcatcaaggatattggtctaaaattctctttttttgttgtgtctctgcccggctttggtatcagaatgatgctggcctcataaaatgagttagggaggattccctctttttctattgattggaatagtttcagaaggaatggtaccagttcctccttgtacctctggtagaattcggctgtgaatccatctagtcctggactctttttggttggtaagctattgattattgccacaatttcagctcctgttattggtctattaagagattcaacttcttcctggtttagtcttgggagagtgtatgtgtcgaggaatttatccatttcttctagattttctagtttatttgcgtagaggtgtttgtagtattctctgatggtagtttgtatttctgtgggatcggtggtgctatcccctttatcattttttattgtgtctatttgattcttctctctttttttctttattagtcttgctagcggtctatcaattttgttgatcctttcaaaaaaccagctcctggattcactgattttttgaagggttttttgtgtctctattttcttcagttctgctctgattttagttatttcttgccttctgctagcttttgaatgtgtttgctcttgctttctagttcttttaattgtgatgttagggtgtcaattttggatctttcctgctttctcttgtgggcatttagtgctaaaaatttccctctacacactgctttgaatgcatcccagagattctggtatgttgtgtctttgttctcgttggtttcaaagaacatctttatttctgccttcatttcgttatgtacccagtagtcattcaggagcaggttgttcagtttccatgtagttgagcggctttgagtgagattcttaatcctgagttctagtttgattgcactgtggtctgagagatagtttgttataatttctgttcttttacatttgctgaggagagctttacttccaagtatgtggtcaattttggaataggtgtggtgtggtgctgaaaaaaatgtatattctgttgatttggggtggagagttctgtagatgtctattaggtccgcttggtgcagagctgagttcaattcctgggtatccttgttgactttctgtctcgttgatctgtctaatgttgacagtggggtgttaaagtctcccattattattgtgtgggagtctaagtctctttgtaggtcactcaggacttgctttatgaatctgggtgctcctgtattgggtgcatatatatttaggatagttagctcttcttgttgaattgatccctttaccattatgtaatggccttctttgtctcttttgatctttgttggtttaaagtctgttttatcagagactaggattgcaacccctgcctttttttgttttccatttgcttggtagatcttcctccatccttttattttgagcctatgtgtgtctctgcacgtgagatgggtttcctgaatacagcacactgatgggtcttgactctttatccaatttgccagtctgtgtcttttaattggagcatttagtccatttacatttaaagttaatattgttatgtgtgaatttgatcctgtcattatgatgttagctggtgattttgctcgttagttgatgcagtttcttcctagtctcgatggtctttacattttggcatgattttgcagtggctggtacgggttgttcctttccatgtttagcgcttccttcaggagctcttttagggcaggtctggtggtgacaaaatctctcagcatttgcttgtctgtaaagtattttatttctccttcacttatgaagcttagcttggctggatatgaaattctgggttgaaaattcttttctttaagaatgttgaatattggcccccactctcttctggcttgtagggtttctgctgagagatccgctgttagtctgatgggcttccctttgagggtaacccgacctttctctctggctgcccttaacattttttccttcatttcaactttggtgaatctgacaattatgtgtcttggagttgctcttctcgaggagtatctttgtggcgttctctgtatttcctgaatctgaacgttggcctgccttgctaaattggggaagttctcctggataatatcctgcagagtgttttccaacttggttccattctccccatcactttcaggtacaccaatcagatgtagatttggtcttttcacatagtcccatatttcttggaggctttgctcatttctttttactcttctttctctaaacttcccttctcgcttcatttcattcatttcatcttccattgctgacaccctttcttccagttgatcgcatcggctcctgaggcttctgcattcttcacgtagttctcgagccttggttttcagctccatcagctcctttaagcacttctctgtattggttattctagttatacattcttctaaatttttttcaaagttttcaacttctttgcctttggtttgaatgtcctcccgtagctcagagtaatttgatcgtctgaagccttcttctctcagctcgtcaaagtcattctccatccagctttgttctgttgctggtgaggagctgcgttcctttggaggaggagaggcgctctgatttttggagcttccagtttttctgttctgttttttccccatctttgtggttttatctacttttggtctgtgatgatggtgatgtacagatgggtttttggtgtggatgtcctttctgtttgttagttttccttctaacagacaggaccctcagctgcaggtctcagatggaaatgcagaaatcaccggtcttctgcgtcggtcacgctgggagctgtagaccggagctgttcctattcggccatcttggctcctccccgaatgtatccagttatagaattttctatctgtcccagtggccactgagcatagtttggttgcactgtatctaatggatttcagaaaattggaatgaattgaagaatcctgataccacatttcatactcagcttccagataatttctctttattgtttttattttgttttgttttgctttggtggcagtagaatttattagaatgtgccttttaaaaattatttgaaatagagatggagtcttgctttgttgctcaggatggtcttgaattcatagcctaaaatgatcctcacaccttggcctcccaaagtgctgaggttacaggcatgagcctagaatgtggcttaatacaggcacgtgggcttgcccacggtgctctcagtatataaagcttgaatgtcttggcaatttttcttgagtaatgacactaggaagttgacagccaggtgaatgttatgtacaagctcatcgtctgtcatcttcacatggccaacagccacagccagacatagcaccttcttcatctgaaactgggttgtggacttcacctcatccactttggccaccatgtttttgttgtgtgtcagcaggggagggaacttacccaccttatttaggcctgggccaaggattcatgggatctgcttgatcagagactctgaggctaaaaagacattatactttttgacagctgtttgaccgattattattcttattgagcttttcagcaccttgatgtccctgtggaggatatccacagccttgagccattttttttttttttggagacagggtctcactttgtcatccaggctggagtgcagaggctcgaacatagctcactgcaacctcgacttcccaggctcaagcagtcctcccacctcagcctcctgagtagctgggactacaggcgtacatcaccatgtccagctaattttgtgtattttttgtagagacagggtttcaccatgttgcccaggttggtcctgagctcctggaatcaagcgatcctcctgccttggcctcccaaagtgctgggattacaggcatgaatcactgtgcctggcccatcttatttttctttaataaattattttctgtttgtagaaataggatctggctatgttgcccaggctgtctcaaactcctggcctcaaacaatcctctccactcagcctctcaaagtgctgggattacaggtgtgagccaccttgcttgccctcttttttttctttaaatcagagtattttg

SEQ ID NO: 10332 - DNA, 6057 bp, Homo sapiens
ttttacttttttttttttttttattatactctaagttttagggtacatgtgcacattgtgcaggttagttacatatgtatacatgtgccatgctggtgcgctgcacccactaatgtgtcatctagcattaggtatatctcccaatgctatccctcccccctcccccgaccccaccacagtccccagagtgtgatattccccttcctgtgtccatatgatctcattgttcaattcccacctatgagtgagaatatgcggtgtttggttttttgttcttgtgatagtttactgagaatgatggtttccaatttcatccatgtccctacaaaggatatgaactcatcattttttatggctgcatagtattccatggtgtatatgtgccacattttcttaatccagtctatcattgttggacatttgggttggttccaagtctttgctattgtgaatagtgccgcaataaacatacgtgtgcatgtgtctttatagcagcatgatttatagtcctttgggtatatacccagtaatgggatggctgggtcaaatggtatttctagttctagatccctgaggaatcgccacactgacttccacaatggttgaactagtttacagtcccaccaacagtgtaaaagtgttcctatttctccacatcctctccagcacctgttgtttcctgactttttaatgattgccattctaactggtgtgagatgatatctcatagtggttttgatttgcatttctctgatggccagtgatgatgagcatttcttcatgtgttttttggctgcataaatgtcttcttttgagaagtgtctgttcatgtccttcgcccactttttgatggggttgtttgtttttttcttgtaaatttgtttgagttcattgtagattctggatattagccctttgtcagatgagtaggttgcgaaaattttctcccatgtggtaggttgcctgttcactctgatggtagtttcttttgctgtgcagaagctctttagtttaattagatcccatttgtcaattttggcttttgttgccattgcttttggtgttttggacatgaagtccttgcccacgcctatgtcctgaatggtaatgcctaggttttcttctagggtttttatggttttaggtctgacgtttaaatctttaatccattttgaattgatttttgtataaggtgtaaggaagggatccagtttcagctttctacatatggctagccagttttcccagcaccatttattaaatagggaatcctttccccattgcttgtttttctcaggtttgtcaaagatcagatagttgtagatatgcggcattatttctgagggctctgttctgttccattgatctatatctctgttttggtaccagtaccatgctgttttggttactgtagccttgtagtatagtttgaagtcaggtagtgtgatgcctccagctttgttcttttggcttaggattgacttggcgatgcgggctcttttttggttccatatgaactttaaagtagttttttccaattcagtgaagaaagtcattggtagcttgatggggatggcattgaatctgtaaattaccttgggcagtatggccattttcacgatattgattcttcctacccatgagcatggaatgttcttccatttgtttgtgtcctcttttatttccttgagcagtggtttgtagttctccttgaagaggtccttcacatcccttgtaagttggattcctaggtattttattctctttgaagcaattgtgaatgggagttcacccatgatttggctctctgtttgtctgttgttggtgtataagaatgcttgtgatttttgtacattgattttgtatcctgagactttgctgaagttgcttatcagcttaaggagattttgggctgagacgatggggttttctagataaacaatcatgtcgtctgcaaacagggacaatttgacttcctcttttcctaattgaataccctttatttccttctcctgcctgattgccctggccagaacttccaacactatgttgaataggagcggtgagagagggcatccctgtcttgtgccagttttcaaagggaatgcttccagtttttgcccattcagtatgatattggctgtgggtttgtcatagatagctcttattattttgaaatacgtcccatcaatacctaatttattgagagtttttagcatgaagggttgttgaattttgtcaaaggctttttctgcatctattgagataatcatgtggtttttgtctttggctctgtttatatgctggattacatttattgatttgcgtatattgaaccagccttgcatcccagggatgaagcccacttgatcatggtggataagctttttgatgtgctgctggatttggtttgccagtattttattgaggatttttgcatcaatgttcatcaaggatattggtctaaaattctctttttttgttgtgtctctgcccggctttggtatcagaatgatgctggcctcataaaatgagttagggaggattccctctttttctattgattggaatagtttcagaaggaatggtaccagttcctccttgtacctctggtagaattcggctgtgaatccatctggtcctggactctttttggttggtaaactattgattattgccccaatttcagaacctgttattggtctattcagagattcaacttcttcctggtttagtcttgggagagtgtatgtgtcgaggaatgtatccatttcttctagattttctagtttatttgcgtagaggtgtttgtagtattctctgatggtagtttgtatttctgtgggatcggtggtgatatcccctttatcattttttattgtgtctatttgattcttctctctttttttctttattagtcttgctagtggtctatcaattttgttgatcctttcaaaaaaccagctcctggattcattgattttttgaagggttttttgtgtctctatttccttcagttctgctctgattttagttatttcttgccttctgctagcttttgaatgtgtttgctcttgcttttctagttcttttaattgtgatgttagggtgtcaattttggatctttcctgctttctcttgtaggcatttagtgctataaatttccctctacacactgctttgaatgcgtcccagagattctggtatgtggtgtctttgttctcgttggtttcaaagaacatctttatttctgccttcatttcgttatgtacccagtagtcattcaggagcaggttgttcagtttccatgtagttgagcggctttgagtgagatttttaatcctgagttctagtttgattgcactgtggtctgagagatagtttgttataatttctgttcttttacatttgctgaggagagctttacttccaactatgtggtcaattttggaataggtgtggtgtggtgctgaaaaaaatgtatattctgttgatttggggtggagagttctgtagatgtctattaggtctgcttggtgcagagctgagttcaattcctgggtatccttgttgactttctgtctcgttgatctgtctaatgttgacagtggggtgttaaagtctcccattattaatgtgtgggagtctaagtctctttgtaggtcactgaggacttgctttatgaatctgggtgctcctgtattgggtgcataaatatttaggatagttagctcctcttgttgaattgatccctttaccattatgtaatggccttctttgtctcttttgatctttgttggtttaaagtctgttttatcagagactaggattgcaacccctgcctttttttgttttccattggcttggtagatcttcctccatccttttattttgagcctatgtgtgtctctgcacgtgagatgggtttcctgaatacagcacactgatgggtcttgactctttatccaacttgccagtctgtgtcttttaattgcagaatttagtccatttatatttaaagttaatattgttatgtgtgaatttgatcctgtcattatgatgttagctggtgattttgctcattagttgatgcagtttcttcctagtctcgatggtctttacattttggcatgattttgcagcggctggtaccggttgttcctttccatgtttagcgcttccttcaggagctcttttagggcaggcctggtggtgacaaaatctctcagcatttgcttgtctataaagtattttatttctccttcacttatgaagcttagtttggctggatatgaaattctgggttgaaaattcttttctttaagaatgttgaatattggcccccactctcttctggcttgtagggtttctgccgagagatccgctgttagtctgatgggctttcctttgagggtaacccgacctttctctctggctgcccttaacattttttccttcatttcaactttggtgaatctgacaattatgtgtcttggagttgctcttctcgaggagtatctttgtggcgttctctgtatttcctgaatctgaacgttggcctgccttgctagattggggaagttctcctggataatatcctgcagagtgttttccaacttggttccattctccccatcactttcaggtacaccaatcagacgtagatttggtcttttcacatagtcccatatttcttggaggctttgctcatttctttttattcttttttctctaaacttcccttctcgcttcatttcattcatttcatcttccattgctgataccctttcttccagttgattgcatcggctcctgaggcttctgcattcttcacgtagttctcgagccttggttttcagctccatcagctcctttaagcacttctctgtattggttattctagttatacattcttctaaatttttttcaaagttttcaacttctttgcctttggtttgaatgtcctcccgtagctcagagtaatttgatcgtctgaagccttcttctctcagctcgtcaaaatcattctccatccagctttgttctgttgctggtgaggaactgcgttcctttggaggaggagaggcgctctgcgttttagagtttccagtttttctgttctgttttttccccatctttgtggttttatctacttttggtctttgatgatggtgatgtacagatgggtttttggtgtagatgtcctttctggttgttagttttccttctaacagacaggaccctcagctgcaggtctgttggaataccctgccgtgtgaggtgtcagtgtgcccctgctggggggtgcctcccagttaggctgctcgggggtcaggggtcagggacccacttgaggaggcagtctgcccgttctcagatctccagctgcgtgctgggagaaccactgctctcttcaaagctgtcagacagggacacttaagtctgcagaggttactgctgtctttttgtttgtctgtgccctgcccccagaggtggagcctacagaggcaggcaggcctccttgagctgtggtgggctccacccagttcgagcttcccggctgctttgtttacctaagcaagcctgggcaatggcgggcacccctcccccagcctcgttgccgccttgcagtttgatctcagactgctgtgctagcaatcagcgagattccgtgggcgtaggaccctctgagccaggtgtgggatatagtctcgtggtgcgccgtttcttaagccggtctgaaaagcgcaatattcgggtgggagtgacccgattttccaggtgcgtccgtcacccctttctttgactcggaaagggaactccctgaccccttgcgcttcccaggtgaggcaatgcctcgccctgcttcggctcgcgcacggtgcgcacacacactggcctgcgcccactgtctggcactccctagtgagatgaacccggtacctcagatggaaatgcagaaatcacccgtcttctgcgtcgctcacgctgggagctgtagaccggagctgttcctattcggccatcttggctcctcctccacaatttttttttttt

SEQ ID NO: 10333 - DNA, 10960 bp, Homo sapiens
ggtgtatatgtgtcacattttctttatccagtctaacgttgatgggcatttgggttggttctaagtctttgctattgtgaatagtgctgcaataaacataggtgtgcatgtgtctttatagaagaatgatttataatcctttgagtatatactcagtaataggattgctgggtcaaatggtatttctagttctagatccttgaggaattgccacactgtcttccacaatggttgaactaatttacactcctaccaacagtgtaaaagcgtttctatttctccacatcctctgcagcatctgttgtttcctgactttttattgatcgccattctaactggtgtgagatggtatctcattgtggttttgatttgcatttctgtaatgaccagtgatgatgagcattttttcatgtgtctgttgactgcataaatgtcttcttttgagaagtgtctgttcgtatcctttgcccactttttgatggggttggttttttcttgtaaatttgtttaagttatttgtagattctggatattagccctttgtcagatggctatattgcaaaatttttctccaattctgtaggctgcctgttcactctgatggtagtttcttttgctgtgcagaagctcttaagtttcattagatcccatttgtcaattttggcttttattgccattgcttttggtgttttagtcatgaagtccttgcccatgcctgtgtcctgaatggtattgcctaggttttcttctagggtttttatggttttaggtcttacatttacatctttagtgcatcttgaattaatttttgtatacggtgtaaggaagggatccagtttcagctttctacatatggctagccagctttcccagcagcatttattaaatagggaattctttccccatttcttgtttttgtcaggattatcaaagatcagatggttgtagatgtgtggtgttatttctgaggcctccgttctgctccattggtctatctctctgttttggtaccagtaacatgctgttttggttactgtagccttgtagtatagtttgaagtcaggtagcatgatgcctccagctttgttctttttgcttaggattgtcttggcaatttgggctcttttttggttccatatgaactttaaagtaggttttttcaattctatgaaggaagtcattggtagcttgatggggatggcattgaatctataaattaccttgggcagtatggttattttcacaatactgttcctcctatccatgagcatggaatgtttttccatttgtttgtgtcctctcttatttccttgagcagtggtttgtagttctccttgaagagttccttcacattccttgttagttggattcctaggtattttattctctttgtagcaactgtgaatgggagttcactcatgatttggctctctgtctgctattggtgtgtagaaatgcttgtgatttttgcacattgattttgtatcctgagattttgctgaagttgcttatcagcttaaggagattttgggctgagacaatggggttctctaaatatacaatcatgtcatctgcaaacagggacaatttgatttcctcttttcctaactgaataccctttatttctttctcctgcctgattgccctggctagaacttccaacaccatgttgaataggagtggtgagagagggcatccctgtcttgtgccagttttcaaagggaatgcttccggtttttgtccattcagtatgatattgcctgtgggtttgtgataaatagttcttattattttgagatacgttccatcaatacctagtttattgagagtttttagcatgaagggctgctgaattttgtcgaaggccttttctgcatctattgagataatcgtgtggtttttgtcattgattctgtttatgtgatggattatgtttattgatttacatatgttgagccagcctcgcatcctggggatgaagccgacctgattgtggtggataagctttttgatgtgctgctggattcagtttgccagtattttattgagaattttcacattggtgttcatcagggatattggtctaaaattctctttttttttgtcgtgtctttgccaggctttggtatcaggatgatgctggcctcatataatgagttaaggaggattctctctttttttgtttggaatagtttcagaaggaatggtaccagctcctttttgtacctgtggtagaattcggctgtgaatccctctggtcctggacttgttttggttggtaggatattaattattgcctcaattttagagcctgttaattggtctattcagagattcaacttcttcctggtttagtcgtgggaggatgtatgtgttcagaaatttatccatttcttctacattttctagtttatttgcatagaggtgtttatagttttctctgatggtagtttgtatttctgtggtattggtggtgatatcccctttatcattttttattgcatctatttgattcttctctcttttcttctttattagtcttgctagcagtctaccagttttgttgatcttttcaaaaaccagctcctggattcattgactttttgaagggttttttttttgtttttttttgtttttttggtctctctttcagttctgctctgatattagttatttcttttctgctagcttttgaatttgtttgctctttcttctctagttcttttaatactgacattagggtgtggattttagatctttcctgctttctcttctggacatttagtgctataaatttccctctacacactgctttgaatgtgtcccatagattctgatacattgtgtccttgttctcattggtttcaaagaacatctttatttctgccttcattttgctatttacccagtagtcattcaggagcaggttgttcagtttgcatgtagttgtgcagttttgagtgagtttcttaatgctgagctctaatttgattgcactgtggtcttagagacagtttgttctgatttcttttcttttacatttgctgagaagtgctttactttcaactatgtggtcaattttggaataagtgcaatgtggtgctgagaagaatgtatattctgtttatttggggtggagagttctgtagatgtctattaggtccgcttggtgcagagctgagttcaagtcctggatatccttcttaaccttctgtctcattgatctaatactgatggtggtgtgttaaagtctcccattattattgtgtgggagtctaagtctctttttaggtctctaaggacttgctttatgaatctgattgctcctgtattgagtgcatatatatttaggatagttagctctttttgatgcattgatccttttatcattatgtaatggccttctttgtcaatggccttctgtgtctcttctgatctttgttggtttaacgtctgttttatcagagagtaggattccaacccctggtttttttgctttccatttgcttggtaggtcttcctccttctctttattttgagcctatatgtgtctctgcacaagagatgggtctcctgaatacagcacactgatggttcttgactctacccaatttgccagtctgtgtcttttaattggagtatttagtccatttacatttaaggttaatattgttatgtgtgaatttgatcatgtcattatgatgttagctggttattttgctcattagttgatgcagtttcttcctagtatcaatggtctttacaatttggcatgtttttgcagtggttggtactgtttgttcctttccatgtttcgtgcttccttcaggagcccttgtaaggcaggcctggtggtgacaaaatctctcagcatttgcttggctgtaaaggattttatttctccttcacttatgaagcttagtttggctggatatgaaattctgggttgaaaattcttttctttaagaatgttgaatattggccccactctcttctggcttgtagagtttctgtggagagatccactgttagtctgatgggcttccttttgtgggtaaccctacatttttctgtggctgccccaacattttttccttcatttcaaccttggtgaatctgataattatacatcttggggttgctgttctcaaagagtatctgtcgtgttctctgtatttcctgaatttgaatgtcggcctgccttgctagattggggaagttctcctggataatatcgtgcagagtgttttccagcttggttccattatccctgtcactttcagatacaccaatctaacgtagatttggtcttttcacatagtcccatatttcttggaggctttgttcgtttctttttacttttttctctaaacttctcctcttgctttatttcattaatttgatcttcaatcactgataccctttcttccacttgattgagttggctattgaagcttgtgcatgcatcacgtagttcttgtgccatggtgttcagctctatcaggtcatttaatgtcttctctacactgtttaatctagttagccattcatctaatctttttttcaatgtttttagcttccttgcaatgggttccaacatcctcctttagcttggagaagtttgttattaccgaccttctgaagtctacttctgccagcttgtcaaattcattctccatccagttttgttccgttgctggtaaggatctgcgatcctttggaggagaagaggtggtctggtttttagaattttcagcttttctgccatggtttctccccatctttctggttttttaaaattattattattataccttaagttttagggtacatgtgcacaatgtgcaggttagttaacatatgtatacatgtgccatgctggtgtgctgcacccattaactcatcatttagcattaggtatatctcctaatgctatcccttccccctccccccacaccacaacagtccccagagtgtgatgttccccttcctgtgtccatgtgttctcattgttcaattcccacctatgagtgagaatatgctgtgtttggttttttgttcttgcgatagtttactgagaatgatgatttccaatttcatccatgtccctacaaaggacatgaactcatcattttttatgtctgcatagtattccatggtgtatatgtgccacattttcttaatccagtctatcattgttggacatttgggttggttccaagtctttgctattgtgaatagtgccacaataaacatacgtatgcatgtgtctttatagcagcatgatttatagtcctttgggtatatacccagtaatgggacagctgggtcaaatggtatttctagttctaaatctctgaggaattgccacattgacttccacaatggttgaactagtttacagtcccaacaacagtgtaaaagtgttcttatttctccacatcctctccagcacctgttgtttcctgactttttaatgattgccattgtaactggtgtgagatggtatctcattgtggttttgatttgcatttctctgatggccagtgatggtgagcattttttcatgtgttttttggctgcataaatgtcttcttttgagaagtgtctgttcatgtccttcgcccactttttgatggggttgtttgtttttttcttgtaaatttgattgagttcattgtagattctggatattagccctttgtcagatgagtaggctgcaaaaattttctcccattttgtaggttgcctgttcactctgatggtagtttctgttgctgtgcagaagctctttagtttaattatatcccatttgtcaattttgtcttttgttgccattgcttttggtgttttagacatgaagtcctttcccaagcctatgtcctgaatggtaatgcctaggttttcttctagggtttttatggttttaagtctaacatttaagtctttaatccatcttgaattaatttttgtataaggtgtaaggaagggatccaatttcggctttctacatatggctagccagtttccccagcaccatttattaaatagggaatcctttccccatggcttgtttttctcaggtttgtcaaagatcagatagttgtagatatgcggcgtcatttctgagggctctgttctgttccattgatctatatctctgttttgataccccagtaccatgttgttttggttactgtagccttgtagtatagtgtgaagtcaggtagtgtgatgcctccagctttgttcttttggcttaggactgacttggcgttgcgggctcttttttggttccatatgaactttaaagtagttttttccaattctgtgaagaaagtcattggtagcttgatggggatggcattgaatctataaattaccttgggcagtatggccattttcacgatattgattcttcctacccgtgagcatggaatgttcttccatttgtttgtatcctcgtttatttcattgagcagtggtttgtagttctccttgaagaggtccttcacgtcccttgtaagttggattcctaggtattttattctctttgaagcaattgtgaatgggagttcactcatgatttggctgtttgtctgttattggtgtataagaatgcttgtgatttttgtacattgattttgtatcctgagaccttgctgaagttgcctgtcagcttgaggagattttgggctgagacaatggggttttctagatatacaatcatgtcatctgcaaacagggacaatttggcttcctcttttcctaattgaataccctttatttccttctcctgcctaattgccctggccagaacttccaacactatgttgaataggagtggtgagagagggcatccctgtcttgtgccagttttcaaagtgaatgcttccagtttttgcccattgagtatgatattggctgtgggtttgtcataggtagctcttattattttgagatacgtcccatcaatacctaatttattgagagtttttagcaagaagggttgttgaattttgtcaaaggcctttactgcatctattgagataatcatgtggtttttgtctttggttctgtttatatgctggattacatttattgatttgcgtatattgaaccaaccttgcatcccagggatgaagcccacttgatcatggtggataagctttttaatgtgctgctgggttcggtttgccagtattttattgaggatttttgcatcaatgttcatcaaggatattggtctaaaattctcttttttggttgtgtctctgcccggctttggtatcaggatgatcctggcctcataaaatgagttagggaggattccctctttttctattgattggaatagtttcagaaggaatggtaccagttcctccttgtacctctggtagaattcagctgtgaatccatctggtcctggactctgttaggttggtaagctattgattgttgccacaatttcagctcctgttattggtctattcagagattgaatttcttcctggtttagtcttcggagggtgtatgtgtcgaggaatatatccatttcttctagattttctagtttattttcatagaggtgtttgtaatgttctctgatggtagtttgtatttctgtgggatcagtggtgatatcccctttatcgttttttattgcgtctatttgattcttctctcttttcttctttattagtcttgctagtggtctatcaattttgttgatcctttcgaaaaaccagctcctggattcattaattttttgaagggttgtttgtgtctctatttcctgcagttctgctctgattttagttatttcttgccttctgctagcttttgaatgtgtttgctcttgcttttctagttcttttaattgtgatgttagggtgtcaattttggatctttcctgctttctcttgtgggtatttagtgctataaatttccctctacacactgctttgaatgtgtcccagagattctggtatgttgtgtctttgttctcgttggtttcaaagaacatctttatttctgccttcattttgttatgtacccagtagtaattcaggagcaggttgttcagtttccatgtagttgagtggttttgagtgggtttcttaatcgtgagttctagtttgattgcactgtggtctgagagacagtttgttataatttctgttcttttacatttgctgaggagagctttacttcccagtatgtggtcaattttggaataggtgtggtgtggtgctgaaagaaatgtgtattttgttgatttggggtggagagttctgtagatgtccattaggtctgcttggtgcagagctgagttcaattcctgggtatccttcttaactttctgtctcgttgatctgtctaatgttgacagtggggtgttaaagtctcccattattattgtgtgggagtctaagtctctttgtaggtcactcaggacttgctttatgaatctgggtgctcctgtattgggtgcatatatatttaggatagttagctcttcttgttgatttgatccctttaccactatgcaatggccttctttgtctcttttgttctttgttggtttaaagtctgttttatcagagactaggattgcaaccctgcctttttttgttttccatttgcttggtagatcttcctccatccttttgttttgagcctatctgtgtctctgcacgtgagatgggtttcatgaatacagcacactgatgggtcttgactctttatccaatttgccagtctgtgtcttttatttggagcatttattccatttacatttaaagttaatattgctttgtgtgaatttgatcctgtcattatgatgttagctggttattttgctcgttagttaatgcagtttcttcctagccttgatggtctttacaatttggcatgattttgcagtggctgttaccggttgttcctttccatgtttagtgcttccttcaggagctcttttagggcaggcctggtggtgacaaaatctctcaacatttgcttttctgtaaagtattttatttctccttcacttatgaagcttagtttggctggatatgaaattctgggttgaaaattcttttctttaagaatgttgaatgttggccctcactgtcttctggcttgttgagtttctgtgaagggatcagcagttagtctcatgggcttccctttgtgggtatcccgacctttctctctggcttcccttaacattttttccttcatttcaactttggtgaacctgacaattatgtgtcttggagttgctcttctcgaggagtatctttgtggtattctctgtatttcctgaatctgaatgctggcttgccttgctagattgggtaagttctcctggataatatcctgcagagcgttttccaacttggttccattctccccatcactttcaggtacaccagtcagatgtagatttggtcttttcacatagtcccatatttcttggaggctttattcatttctttttattgttttttctctaaacttcccttctcgcttcatttcattcatttcatcttccatcactgataccctttcttccatttgattgcatcggctcctgaggcttctgcattcttcacgtagttcttgagccttggctttcagcatcttcagctcctttaagcacttctctgtattggttattctagttatacattcgtcttaatttttttcaaagtttttaacttctttgcctttggtttgaatttcctcctgtagctcagagtagttttgtcatctgaagctttcttctctcaactcatcaaagtcattctccgtccagctttgtttcattgctggtgaggaactgcattcctttggaggaggagaggtgctctgctttttagagtttccagtttttccaatttttctgctctgttttttccccatctttgtggttttatctgcttttggtctttgatgatggtgatgtacagatgggtttttgatgtggatgtcctttctgtttgttagttttccttctgacagacaggaccctcagctgcaggtctgttggagtttgctagaagtccactccagaccttgtttgcctgggtaccagcagcggtggctgcagaatagcagattttcgtgaaccgtgaatgctgctgtctgatctttcctctggaagttttgtctcagaggagtacccggccgtgtgaggtgtcagtctgcccctactgggggtgtctcccagttaggctgctcgggggtcagggttcagggacccacttgaggagtcagtctgcccgttctcagatctccagctgtgtgctgggagaaccactgctctcttcaaagctgtcagacagggacatttaagtctgcagaggttcctgctgtctttttgtttgtctgtgccctgcccccagaggtggagcctacagaggcaggcaggcctccttgagctgtggtgggctccacccagttcgagtttcctggctgctttgtttgcctaagcaagcctgggcaatggcaggcgctcctcccccagcctcactgtcgccttgcagtttgatctcagactgctgtgctagcaatcagcgagactccatgggcataggaccctccaagccaggtgtgggatataatcttctgttgtgccgttttttaagcctgtccgaaaagtgcagcattagggtgggagtgacccaattttccagatgccatctgtcacccctttctttgactaggaaagggaactccttgaccctttgcgcttcccaagtgaggcaatgcctcgccctgcttcagctcgtgcacggtgcactgcacccattgtcctgtgcccactctctggcactccctagtgagatgaacccggtacctcagatggaaatgcagaaatcacccatcttctgcatcgctcacgttgggagctgtagaccagagctgttcctgttcagtcatcttggctccatcc

SEQ ID NO: 10334 - DNA, 11002 bp, Homo sapiens
tggatctttttttttttttgagacggagtctcgctctgtcgcccaggctggagtgcagtggcgcgatctcggctcactgcaagctccgcctcccgggttcacgccattctcctgcctcagcctcccgagtagctgggactacaggcgcccgctaccacgcccggctaattttttgtatttttagtagagacggggtttcaccgtgttagccaggatggtctcgatctcctgacctcgtgatccgcccgcctcggcctcccaaagtgctgggattacaggcgtgagccaccgcgcccggcccagttgtggatcttttaccacctatgtctcccctttcatttggtcttccctcagaagtgcacgcaaagagtattctttttcagtatcctgcttcactgatattgccagaatcattacctgtgttgcttaatcaaagagaatttatcgttgtctggtttctgttagaaaccactgtatcagattttggccttaggtacacctgagcaacatcaccaagaaaatggttgcagaggagacaatgataccttgggagctgtacatgatctagccaacagccctgcctctttcttgttgcagtcagcttcatcatcagatagaaacaatgctacaccacttgaaaaggacaggaagatgagaactcccaaagagaaaaataaaacaatttctaagaaaataccagattttgaagtggaagattctccattatcagatgtcgcaaagaacagagagtagtgcatttggagggtctctgccagctaaaaaaaagtggtcagttccaaaaaaaagcaagatcatctgctagaaggggttgttggagcagttttatttggttcaccacagctctgtgagagaaaataagtaaatttaggggaactaattgactctctaggttctaacctcttctgaacaaggaaccagatttcccatacccataaaacttgacaatggaaattaggagctcatggagaaaaactattgaaatggaagaaaacagaactacagaaccaattcaaacggatactgagcacagagaagtattgctgggatcattacctgatttgtgtaatcaaagaggatttagcatagtcggttttctcttaaaccactgtatgagatttcggccagtctcatttgactgaaatgagactgcaagtgtgtgcctcagaaatacatggtgatcaatcatatgggtgaaccaccaatacaaaatcagtctgatttgttgagtaagaaaataatttgcgcccagcaaggtggctcacgcctgtaatcccagcactctgggaggccgaggcgggcggatcacgaggtcaggagatagagaccatcctggctaacacggtcaaaccctgtctctactaaaaatacaaaaaattagcagggcatggtggtgggcgcctgttgaggcaggagaatggcatgaacccaggaggcggagcttgccgtaagccaagatcatgccactgcactccagcctgggtgacagagccagactgtgtctcaaaaaaaaaaaaataataataatttgcaagcaagatttggaatgtacagctttaccaaccaagctttcagaaactagccaagaagacattctcccctgccatcagcaatgggatagatgagctgggtagcagtaaagaggagtatatgaaaatattggaccattcacaggattcctgtaacaaaccttccatgaataacactacattatggaactcttttcagatatcaagcggaattagttctaagagttgtaaggatattgattttagcatatttacatttggcatgaaacttttccggaggaaggtggtcccctaagtgttaaaagttccagtagcttagagtccagtttaaactagagccaaatagtcctgtggacagtggcatttttctaggagatattatggtagatggacaaactactccagaatcagacttcaatctataggctgtttgcagtagatatgaggctctgaagaaatctttttccaagaaaagggaagaattttacctgtctaatcttgaaacacttgaaagacacaaaccagaattgagccctactccccaaaatgtgcaaacagatgatatgcttaactatttggacactcatgatgtgcacattgaatatgcaaaaccacatttacacatgtcccttggtgaaagaaaagtctctttcaccactaattaagtttcctccagtggaacaaagattgaccacaataccatgtagttttggagaacttctacctaattcaaacgaagaagacatcttgaataagagccttgatgcaacagaatctttgtctgacttgacaagatgaagcaatacggagttaatataactatgatgtacttagactgaagctatgcaacagaatagaaactgatttataagttaaatacatgttggaagtgtaacattattcttcaaggtctaaaaaattctaaatgccttttagcctcctgtagtatttttaggtaaggaaagtatgttgaattatttctctttgtagggatatagggttgaaatgtgaagtatttggaaagcaaatgtcaagcaatgggaagccattttgatttcttgagtacccttgcaaacattaagtgacaaaagtagcttaactaatttattataatttcagttagttaacataaggatgtgtagtttttgttgtacctttactaagtggttaatataatagccattgaagttactgatctttcattttaaagaaatatacaacttttattgttttttgtttctgtttttttttgagacagagtctcgccctgttgcccaggctggagtgcggtggtgcgatctcagctcactgcagcctctgcctccggggttcaagtgatgcttatgcctcagccacctgagtagctgggactacaggcgcacatcaccatgctcatccaatttttgtattttcagtagagatggggttttaccatgttggccaggctggtctcgaactcctggtctcaagtgatccacccgccttggactcccaaagtgctggagttacaggcatgacccactgcacctgaccttttattctttctttatgggacattctgtattaaccagaaaaagtgagaaaggccttgggatgtgtagtcacacatgacatcacacacgttgtgtgtgatgacaaattttaagactgggaaagctctaaacgggcttaatgattattcaaatagattgattttgagaaatgatgtttggtggagtaaagtgcatgtgatgataagtgaagactggggcagaatgattttaaagaagaaaaaagatggaactctcatcttttccttttaagaaggtgcttaaaaggaaccgtcaaactacaaatccattcagtgggtggtgtaacgtttatattgagtctaatttagtctaatatttagtctcatatttaaactaaatataaatcctagttttacattttaacaaaaatataaatcaaaaatttcattagtttgtttaaaaatatattgtatatatacacatatgtacatatcaagatctattgaagctaatgaaaacaataaatttgaactaaatagaggagaaaagattgatagatcagagaaaagaaagttaaacttaagatatatactatgttctcaatatgccgtagcaaatacttctttgctttctgtatactttgtacaggtagtcaacattttacccttgagaaattgtgttttttcatatctcaaaagagctttgactctcattatgcacttaaccttaagtgcattttataatgtagacaattataaaaagaataacaattcccttgcctctggagtagctaaaatttctaatgatccttcttttaacatctacagtgttgattataaggtaccaaaacttcagttattcacccaggctagatggtgaccttctcttgatctcatgtacctatgctcctgtgttcaactggtagtgctcacagatattccccttgtccaatatcaggactcaaatttagaccttcagagagtgacaggcatctcttgcatgcagactagcgttggccttcacaagtagctgctcttttgcaccaaatatttgctgtcttactttgcttatgtaatctctggcacgacacacatacagaaagaaagacagcattttagtaataattagcctcgattagtatgctttagagtctttcagaattactctacaatattgtaaaagagatttcattttatggtgttcaggtaaagaaagtagcttatacttccatttggaggcctattgtaactatttagatagatttttatatgtgtgaaatgtggtctagataaatatatttcaatgattctgtgcatgttgttaggaagggcagaaccatgcccacgtgtaaatatgtatgcaatgactgtctgcagaaggacttgtatataccttgcctcttgatggtatttgggccacactgtacaaaacaatgccttcacagccttcactgtgaaatattaatggttaaagctctgctacctcttcagggaccaatcatgggagaagaagaattgtgttaggtaatcttgagctagattattgcaaggcactcaggaagtgtgccaatgcttcttcacaagaagccctctaattgatccagaatggcatgtcgttgaataagcttggcaatggatttcatatcaagtttagtcagtggatatttgctcaaacctctctggaaagggccccaccaagagccaacttcaaacatggtgtccagccctgaggtatctgcctcccactgtaaggaaatgtgttcctcacatatttaacaacatcttgtttttttttattttattattattatactttaagttttagggtacatgtgcacaatgtgcaggttaattacatatgtatacatgtgccatgctggtgtgctgaacccattaactcgtcatttagcattaggtatatctcctaaagctatccctcccccctccccccaccccacaacagtccccagagtgtgatgttccccttcctgtgtccatgtgttctcattgttcaattcccacctatgagtgagaatatgcggtgtttggttttttgttcttgcgatagtttactgagaatgatgatttccaatttcatccatgtccctacaaaggacatgaactcatcattttttatggctgcatagtattccatggtgtatatgtgccacattttcttaaaccagtctatcattgttggacatttgggttggttccaagtctttgctattgtgaatagtgccgcaataaacatacatgtgcatgtgtctttatagcagcatgatttaagtcctttgggtatatacccagtaatgggatggccgggtcaaatggtatttctagttctagatccctgaggaatcgccacactgacttccacaatggttgaactagtttacagtcccaccaacagtgtaaaagtgttcctatttgtccacatcctctccagcacctgttgtttcctgactttttaatgattgccattctaactggtgtgagatggtatcttattgtggttttgatttgcttttctctgatggccagtgatggtgagcatgttttcatgtgttttttggctgcataaatgtcttcttttgagaagtgtctgttcatgtccttcacccactttttgatggggttgttcgttttttccttgtaaatttgtttgtgttcattgtagattctggatattagccctttgtcagataagtaggttgtgaaaattttctcccattttgtaggttgcctgttcactctgatggtagtttcttttgctgtgcagaagctctttagtttaattagatcccatttgtcaattttgtcttttgttgccattgcttttggtgttttagtcatgaagtccttgcccatgcctatgtcctgaatggtaattcctaggttttcttctagggtttttatggttttagatctaacgtttaagtctttaatccgtcttgaattaatttttgtataaggtgtaaggaagggatccagtttcagctttctacatatggctagccagttttcccagcaccatttattagatagggaatcctttccccattgcttgtttttctcaggtttgtcaaagatcagatagttgtagatacgcagcgttatttctgagggctctgttctgttccattgatctatatctctgttttgataccagtaccatgctgttttggttactgtagccttgtagtatagtttgaagtcaggtagcatgatgcctccagctttgttcttttggcttaggattgacttggcgatgcgggctctttattggttccatatgaactttaaagtagttttttccaattctgtgatgaaagtcattggtagtttgatggggatggcattgaatctataaattacctcggacagtatggccattttcatgatattgattcttcctacccatgagcatggaatgttcttccatttatttgtatcctcttttatttccttgagcagtggtttgtagttctccttgaagaggtccttcacatcccttgtaagttggattcctaggtattgtattctctttgaagcaattgtgaatgggagttcactcatgatttggctctctgtttgtctgttaattggtttataagaatgcttgtgatttttgtacattgattttgtatcctgagactttgctgaagttgcttatcagcttaaggagattttgggctgagacaatggggttttctagatatacaatcatgtcatctgcaaacagggacaatttgacttcttcttttcctaattgaataccctttatttccttcttctgcctaattgccctggccagaacttccaacactatgttgaataggagtggtgagagagggcatccctgtcttgtgccagttttcaaagggaatgcttccagtttttgcccattcagtatgatattggctgtgggtttgtcacagatagctcttattattttgagatatgtcccatcaatacctaatttattgagagtttttagcatgaagcgttgttgaattttgtcaaaggccttttctgcatcttttgagataatcatgtggtttttgtcgttggttctgtttatatgctggattacatttattgatttgcgtatattgaaccagccttgcatcccagggatgaagcccacttgatcatggtggataagctttttgatgtgctgctggattctgtttgccagtattttattgaggatttttgcatcaatgttcatcaaggatattggtctaaaattctcttttttggttgtgtctctgcccggctttggtatcaggatgatgctggcctcataaaatgagttagggaggattccctctttttctattgattggaatagtttcagaaggaatggtaccagttcctccttgtacctctggtagaattcggctgtgaatccatctggtcctggactctttttcattggtaagctattgattattgccacaatttcagagcctgttattggtctattcagagattcaacctcttcctggtttagtcttgggagggtgtatgtgtcaaggaatttatccatttcttctagattttctagtttatttgcgtagaggtgtttgtagtattctctgatggtagttcgtatttctgtgggatcagtggtgatatcccctttatcattttttattgcatctatttgattcttctctcttttcttctttattagtcttgctagcagtctatcaattttgttgatcctttcaaaaaaccagatcctggattcattaattttttgaagggtttttttgtctctatttccttcagttctgctctgattttagttatttcttgccttctgctagcttttgaatgtgtttgctcttgcttttctagttcctttaattgtgatgttagggtgtcaattttggatctttcctgctttctcttgtgggcatttagtgctataaatttccctctacacactactttgaatgtgtcccagagattttggtatgttgtgtctttgttctcgttggtttcaaagaacatctttatttctgccttcatttcgttatgtacccagtagtcattcaggagcaggttgttcagtttccatgtagttgagcggttttgagtgagtttcttaatcctgagttctagtttgattgcactgtggtctgagagacagtttgttataatttctgatcttttacatttgctgaggagagctttacttccaagtatgtggtcaattttggaataggtgtggtgtggtgctgaaaaaaaatgtatattccgttgatttggggtggagagttctgtagatgtctattaggtctgcttggtgcagagctgagttcaattcctgggtatccttgttaactttctgtctcgttgatctaatgttgacagtggggtgttaaagtctcccattattattgtgtgggagtctaagtctctttgtaggccactcaggacttgctttatgaatctgggtgctgctgtattgggtacatatatatttaggatagttagttaggtcttcttgttgaattaatccctttaccattatgtaatggccttctttgtttcttttgatctttgttggtttaaagtctgttttatcagagactaggattgcaacccctgcctttttttgttttccatttgcttggtagatcttcctccatccttttattttgggcctatgtgtgtctctgcatgtgagatgggtttcctgaatacagcacactgatgggtcttgactctttattcaatttgccagtctgtgtcttttaattggagcatttagtccatttacatttaaagttaatattgttatgtgtgaatttgatcctgtcattatgatgttagctggttattttgctcgttagttgatgcagtttcttcctagcctcgatggtctttacaatttggcatgattttgcagtggctggtaccagttgttcctttccatgtttagtgcttccttcaggagctcttttagggcaggcctggtggtgacaaaatctctcagcatttgcttgtctgtaaagtattttatttctccttcacttatgaagcttagtttggctggatatgaaattctggattcaaaattcttttctttaagcatgttgaatattggcccccactctcttctggcttgtagagtttctgccgagagatccgctgttagtctgatgggcttcactttgtgggtaacccgacctttctctctggctgcccttaacattttttccttcatttcaactttggtgaatctgacaattatgtgtcttggagttgctcttctcgaggagtatctttgtggcattctctgtatttcctgattctgaatgttggcctgccttgctagattggggaagttctcctggataatatcctgcagagtgttttccaacttggttccattctccccatcactttcaggtacaccagtcagacgtagatttggtcttttcacatagtcccatatttcttggaggctttgttcgtttctttttattcttttttctctaaacttcccttctcgcttcatttcattaatttcatcttttatcactgataccctttcttccagttgatcgcatcggctcctgaggcttctacattcttcacatagttctcgagccttgcctttcatctccatcagctcctttaggcacttctctgtattggttattctagttatacattcgtctaaatttttttcaaagttttcaacttgtttgcctttggtttgaatttcctcctgtagctcggagtagtttgatcgtctgaagccttcttctctcaactcgtcaaagtcattctccgtccagctttgttctgttgctggtgaggaactgtgttcctttggaggaggagaggcgctctgctttttagagtttccagtttttctgctctgttttttccccatctttgtggttttatctacttttggtctttgatgatggtgatgtacagatgggtttttggtggatgtcctttctgtttgttagttttccttctaacagacaggaccctcagctgcaggtctgttggagtttgctagaggtccactccagaccctgtttgcctgggttccagcagcggtggctgcagaacagtggattttcgtgaacctcgaatgctgctgtctgatcattcctctggaagttttgtctcagaggagtacccggtggtgtgaggtgtcagtctgcccctactggggggtgcctcccagttaggctgctcgggggtcaggggtcagggacccacttgaggaggcagtctgcctattctcagatctccagctgtgtgctgggagaaccgctgctctcttcaaagctgtcagacagggacatttaagtctgaagaggttactgctgtcttttcatctgtgccctgcccccagaggtggagcctatagaggcaggcaggcctccttgagctgtggtgggctccacccagttcgagcttcccggctgctttgtttacctaagcaagcctgggcaatggcgggcacccctcccccagcctcactgccgccttacagtttgatctcagactgctgtgctagcaatcagcgagactccgtgggcgtaggaccctctgagccaggtgtgggatataatctcctggtgtgccattttttaagcccattggaaaagcgcagtattcgggtgggagtgacccgattttccaggtgccgtctgtcacccctttctctgactaggaaagggaactccctgaccccttgcacttcctgagtgaggcaatgcctcaccatgctttggcttgcgcatggtgcgctgcatccactgtcctgcacccaccgtctggcactccctagtgagatgaacccggtacctcagatggaaatgcagaaatcagccatcttctgcattgctcatgctgggagctgtagaccggagctgttcctatttggccatcttggctcccg

SEQ ID NO: 10335 - DNA, 5310 bp, Homo sapiens
atatattgttattttattttattttattttattattattatactttaagttttagggtacacgtgcacaatgcgcaggttagttacatatgtatacatgtgccatgctggtgtgctgcacccattaactcgtcatttagcattaggtatatctcctaaagctataccccctcccctcaccccacaacagtccccagagtgtgatgttccctttcctgtgtccatgtgttctcattgttcaattcccacctatgagtgagaatatgcggtgtttggttttttgttcttgcaatagtttactgagaatgatgatttccaaattcatccatgtccctacaaaggacatgaactcatcattttttatggctgcatagtattccatggtgtatatgtgccacattttcttaatccagtctatcattgttggacatttgggttagttccaagtcgttgctattgtgaatagtgctgcaataaacatacgtgtgcatgtgtctttatagcagcatgatttatagtcctttgggtatatacccagtaatgggatggctgggtcaaatggtatttctagttctagatccctgaggaatcaccacactgacttccacaatggttgaactagtttacagtcccaccaacagtgtaaaagcgttcctatttctccacatcctctccagcacctgttgtttcctgactttttaatgattgccattctaactggtgtgagatggtatctcattgtggttttgatttgcatttttctgatggccagtgatggtgagcattttttcatgtgttttttggctgcataaatgtcttcttttgagaagtgtctgttcatgtccttcgcccactttttgatggggttgtttgatttttcttgtaaatttgtttgagttcattgtagattctggatattagccctttgtcagatgagtaggttgcgaaaattttctcccattttgtatgttgcctgttcactctgatggtagtttcttttgctgtgcagaagctctttagtttaattagatcccatttgtcaattttggcttttgttgccattgcttttggtgttttagacatgaagtccttgcccatgcctatgtcctgaatgctattgcctaggttttcttctaggggttttatggttttaggtctaacatttaagtctttaatccatcttgaattaatttttgtataaggtgtaaggaagggatccagtttcagctttctacatatggctagccagttttcccagcaccatttattaaatagggaatcctttccgcattgcttgtttttgtcaggtttgtcaaagatcagatagttgtagatatgcggtcttatttctgagggctttgttttgttccattgatctataactctgttttggtaccagtaccatgctgttttggttactgtagccttgtaggatagtttgaagtcaggtagcgtgatgcctccagctttgttcttttggcttagggttgacttggcgatgcgggctcttttttggttccatatgaactttaaagtagttttttccaattctgtgaagaaagtcattggtagcttgatggggatggcattgaatccgtaaattaccttgggcagtacggccattttcatgatattgattcttcctacccatgagcatggaatgttcttccatttgtttgtatcctcttttatttcattgagcagtggtttgtagttctccttgaagaggtccttcacatcccttgtaagttggattcctaggtattttattctctttgaagcatttgtgaatgggagttcactcatgatttggctctctgtttgtctgttattggtgtataagaatgcttgtgatttttgcacattgattttgtatcctgagactttgatgaagttgcttaccagcttaagaagattttgggctgagacaatggggttttctagatatacaattatgtcatctgcaaacagggacaatttgacttcctcttttcctaattgaataccctttatttccttctcctgcctaattgccctggccagaacttccaacactatgttgaataggagtggtgagagagggcatccgtgtcttgtgccagttttcaaagggaatgcttccagtttttgcccattcagtatgatattggctgcgggtttgtcatagatagctcttattattttgagatatgtcccatcaatacctaatttattgagagtttttagcatgaagggctgttgaattttgtcaaagaccttttctgcatctattgagataatcatgtggtttttctcattggttctgtttatatgctggattacatttattgatttgcatatattgaaccagccttgcatcccagggatgaagcccacttgatcatggtggataagctttttgatgtgctgctggatttggtttgccagtattttattgaggatttttgcatcaatattcatcaaggatattggtctaaaattctctgttttggttgtgtctctgcctggcttttgtatcaggatgatgctggcctcataaaatgagttaggaaggattccctctttttctattgattggaatagtttcagaaggaatggtgccagttcctccttgtacctctggtagaattcagttgtgaatccatctggtcctggactctttttggttgataagctattgattattgccacaatttcagagcctgttattcgtctattcagagagtcaacttcttcctggtttagtcttgggagggtgtatgtgtcgaggaatttatccatttcttctagattttctagtttatttgtgtacaggtgtttgtagtattctctgatggtactttgtatttctgtgggattggtggtgatatcccctttatcattttttattgtgtctatttgattcttctctcttttcttctttattagtcttgctagaggtctatcaattttgttgatcctttcaaaaaaccagctcctggattcattaattttttgaagggttttttgtgtctctatttccttcagttctgctctgattttagttatttcctgccttctgctagcttttgaatgtgtttgctcttgcttttctagttcttttaattctgatgttagggtgtcaattttggatctttcctgctttctcttgtgggcatttagtgctataaatttccctctacacactgctttgaatgtgtcccagagattctggtatgttgtgtctttgttcttgttggtttcaaagaacatctttatttctgccttcatttctttatgtacccagtagtcattcaggagcaggttgttcagtttccatgtagttgtgcagttttgagtgagtttcttaatcctgagttctagtttgattgcactgtggtctgagagacagtttgttataatttctgatcttttacatttgctgaggagagctttacttccaaatatgtggtcaattttggaataggtgtgatgtggtgctgaaaaaaatgtatattctgttgatttggggtggagagttctgtagatgtctattaggtccgcttggtgcagagctgagttcaattcctggatatccttgttaacttcctgtctcgttgatctgtctaatgttgacagttgggtgttaaagtctcccattattattgtgtgggagtctaagtctctttgtaggtcactcaggacttgctttatgaatctgggtgctcctgtattgagtgcatatatatttaggatagttagctcttcttgttgaattgatccctttaccattatgtaatggccttctttgtctcttttgatctttgttggtttaaagtctgttttatcagagaccaggattgcaacccctgccttttttgttttccatttgcttggtagatcttcctccatccttttattttgagcctatgtgtgtctctgcatgtgagatggatttcctgaatacagcacactgatgggtcttgactctttatccaatttgccagtctgtgtcttttaatttgagcatttagtccatttacatttaaagttagtattgttatgtgtgaatttgatcctgtcattatgatgttagctggttattttgctcgttagttgatgcagtttcttcctagcctcaatggtctttacaatttggcatgattttgcagtggctggtaccggttattcctttccatgtttagtgcttccttcaggagctcttttagggcaggcctggtggtgacaaaatctctcagcatttgcttgtctgtaaaggattttatttctcctccacttatgaagcttagtttggctggatatgaaattctgggttgaaaattcttttctttaagaatgttgtatattggcccccactctctgctggcttgtagggtttctgccaagagatccgctgttaatctgatgggcttccctttgtgggtaacccaacctttctctctggctgccttaacattttttccttcatttcaactttggtgaatctgacaattatgtgtcttggagttgctcttctcgaggagtatctttgtggcattctctgtatttcctgaatctgaatgttggcctgccttgctagattggggaagttctcctggataatatcctacagagtgttttccaacttggttccattctccctgtcactttcaggtacaccaatcagacgtagatttggtcttttcacatagtcccatatttcttggaggctttgttcgtttctttttattcttttttctctaaacttcccttctcgcttcatttcattcatttcatcttccgtcactgatagcctttcttccagttgatcgcattggctcctgaggcttctgcattcttcacgtagttctcgagccttggctttcagctccatcagctcctccaagcacttctctgtattggttattctagttatacattcgtctaattttttttcaaagttttcaacttctttgcctttggtttgaatttcctcctgtagcttggagtagtttgatcgtctgaagccttcttctctcaactcatcaaagtcattctccgtccagctttgttcctttgctggttaggagttgggttcctttggaggaggagaggagctctgctttttagagtttccagtttttcttctctgttttttccccatctttgtggttttatctacttttggtctttgatgatggtgatgtacagatgggtttttggtgtggatgtcctttctgtttgttagttttccttctaacagacacgaccctcagctgcatgtctgttggagtttgctagaggtccactccataccctgtttgcctggttt

SEQ ID NO: 10336 - DNA, 7799 bp, Homo sapiens
cccattaactggtcatttacactaggtatatctcctaatgctatcccttctccctccccccaccccacaacaggccccaatgtgtgatgtcccccttcctgtgtgcttgtgttctcattgttcaattcccacctatgagtgagaatatgcgatgtttggttttttgtccttgcgatagtttgctgagaatgatggtttccagcttcatccatgtccctacaaaggacatgaactcatcattttttatggctgcctagtattccatggcatatatatgccacattttcttaatccagtctgcattgttggacatttgggttggttccaggtctttgctattgtgaatagtgctgcaataaacatacgtgtgcatgtgtctttacaacagcatgatttataatcccttgggtatatacccagtaatgggatggctgggtcaaatggtatttctagttctagatccctgaggaatcgccacactgtcttccacgatggttgaaccagtttacagtcccaccaacagtgtaaaagtgttcctatttctccacatcctcttcagcacctgttgtttcctgacttttttttttttattgtactttaagttttagggtacatgtgcacaatgtgcaggttagttacatatgtatacatgtaccatgctggtgtgctgcacccactaactcaccatctagcattaggtatatctcccaatgctatccctcccccttccccccaccccacaacagaccccagagtgtgatgttccccttcctgtgtccatgtgttctcattgttcaattcccacctatgagtgagaatatgtggtgtttggttttttgttcttgtgatagtttactgagaatgatgatttccaatttcatccatgtccctacaaaggacatgaactcatcattttttatggctgcatagtattccatggtgtatatgtgccacattttcttaatccagtctatcattgttggacatttgggttggttccaagtctttgctattgtgaataatgccgcaataaacatacatgtgcatgtgtctttatagcagcatgatttatagtcctttgggtatatacccagtaatggcatggctgggtcaaatggtatttctagttctagatccctgaggaatagccacactgacttccacaatggttgaactagtttacagtcccaccaacagtgtaaaagtgttcctatttctccacatcctctccagcacctgttgtttcctgactttttaatgattgccattctaactggtgtgagatggtatctcattgtgcttttgatttgcatttctctgatggccagtgatgatgagcattttttcatgtgttttttggctgcataaatgtcttcttttgagaagtgtctgttcatgtcctttgcccactttttgatggggttgtttgtttttttcttgtaaatttgttggagttcattgtagattctggatattagccctttgtcagttgagtaggttgcgaaaattttctcccattttgtaggttgcctgttcactctgatggtagtttcttttgctgtgcagaagctctttagtttaattagatcccatttgtcaattttggcttttgttgccattgcttttggtgttttagacatgaagtccttgcccatgcctatgtcctgaatggtaatgcctaggttttcttctagggtttttatggttttaggtctaacatttaagtctttaatccatcttgaattaatttttgtataaggtataaggaagggatccagtttcagctttctacatatggctagccagttttcccagcaccatttattaaatagggaatcctttccccatttcttgtttttctcaggtttgtcaaagatcagatagttgtagatatgcggtgttatttttgagggctctgttctgttccattgatctatatctctgttttggtaccagtaccatgctgttttggttactgtagccttgtagtatagtttgaagtcaggtagtgtgatgcctccaactttgttcttttggcttaagattgacttggcgatgcgggctcttttttggttccatatgaactttaaagtagttttttccaattctgtgaagaaagtctttggtagctttatggggatggcattgaatctgtaaattaccttgggcagtatggccattttcatgatattgattcttcctacccatgagcatggaatgttcttccatttgtttgtatcctcttttatttccttgagcagtgatttgtagttctccctgaagaggtccttcacatcccttgtaaattggattcctaggtgttttattctctttgaagcaattgtgaatgggagttcactcatgatttggctctctgtctgttgttggtgtataagaatgcttgtgatttttgtacattgattttgtatcctgagactttgctgaagttgcttatcagcctaaggagattttgggctgagacaatggggttttctagatatacaatgatgttatctgcaaacagggacaatttgacttcctcttttcctaattgaataccctttatttccttctcctgcctaattgccctggccagaacttccaacactatgttgaataggagtggtgagagagggcatccctgtcttgtgccagttttcaaagggaatgcttccagtttttgcccattcagtatgatattggctgtgggtttgtcatagatagctcttattattttgagatatgtcccatcaatacctaatttattgagagtttttagcatgaagggttgttgaattttgtcaaaggccttttctgcatctattgagataatcatgtggtttttgtctttggttctgtttatatgctggattacatttattgatttgtgtatgttgaaccagccttgcatcccagggatgaagccaccttgatcttggtggataagctttttgatgtgctgctggattcggtttgccagtattttattgaggatttttgcatcaatgttcatcaaggatattggtctgaaattctcttttttggttgtgtctctgccaggctttggtatcaggatgatgctggcctcataaaatgagttagggaggattccctctttttctattgattggaatagtttcagaaggaatggtaccagttcctccttgtacctctggtagaattcggctgtgaatccatctggtcctggactcattttggttggtaagctattgattattgccacaatttcagagcctgttattggtctattcagagattcaacttcttcctggtttagtcttgggagagtgtatgtgtcgaggaatttatccatttcttctagattttctagtttatttgcgtagaggtatttgtagtattctgtcatggtagtttgtatttctgtgggatcggtggtgatatcccctttatcattttttattgcatctatttgattcttctctctttttttctttattagtcttgctagcggtctatcaattttgttgatcctttcaaaaaaccagctcctggattcattagttttttgaaggtttttttgtgtctctatctccttcagttctgctctgattttagttatttcttgccttctgctagcttttgaatgtgtttgctcttgcttttctagttcttttaattgtgatgttagggtgtcaattttggatctttcctgctttctcttgtgggcatttagtgctataaattttcctctacacactgctttgaatgcatcccagagattctggtatgttgtgtctttgttctcattggtttcaaagaacatctttatttttgccttcatttcgttatgtacccagtagtcattcatgagcaggttgttcagtttccatgtagttgagcagttttgagtgagtttcttaatcctgagttctagtttgattgcactgtggtctgagagatagtttgttataatttctgttctttcacatttgctgaggggaactttacttccaagtatgtggtcaattttggtataggtgtgatgtggtgctgaaaaaaatgtatattctgttgatttggggtggagatttctctagatgtctattaggtcctcttggtgcagagctgagttcaattcctgggtatccttgttgactttctctcttgttgatctgtctaatgttgacagtggggtgttaaagtctcccattattaatgtgtgggagtctaagcctctttgtaggtcactcaggacttgctttatgaatctgggtgctcctgtattgggtgcatatatatttaggatagttagctcttcttgttgaattgttccctttaccattatgtaatggccttctttgtctcttttgatctttgttggtttaaagtctgttttatcagagactaggattgcaacccctgccttttttttgttttccatttgcttggcagatcttcctccatgcttttattttgagcctatgtgtgtctctgcacatgagatgggtttcctgaatacagcacactgatgggtcttgactctttatccaatttgccagtctgtgtcttttaattggagcatttagtccatttacatttaaaattaatattgttatgtgtgaatttgatcctgtcattatgatgttagctgggtattttgctcgttagttgatgcagtttcttcctagtctcgatggtctttacattttggcatgattttgcagcagctggtaccggttgttcctttccatgtttagcacttccttcaggagctcttttagggcaggcctggtggtgacaaaatctctcagcatttgcttgtctgtaaagtattttatttctccttcaattatgaagcttagtttggctggatatgaaattctgggttgaaaattcttttctttaagaatgttgaatattggccccaactctcttctggcttgtagagtttctgccaagagatttgctgttagtctgatgggcttccctttgaggttaacccgacctttctctctggctgcccttaacattttttccttcatttcaactttggtgaatctgacaattatgtgtcttggagttcctcttctcgaggagtatctttgtggcgttctctgtatttcctgaatctgaatgttggcctgccttgctagattggggaagttctcctggataatatcctgcagagtgttttccaacttggttccattctccccgtcactttcaggtacaccaatcagacatagatttggtcttttcacatagtcccatatttcttggaggctttgttcatttctttttattcttttttctctaaacttcccttctcgcttcatttcattcatttcatcttccatcgctgataccctttcttccagttgatcgcatcaggtcctgaagcttctgcattcttcacgtagttcttgagccttggttttcagctccatcagctcctttaagcacttctctgtattggttattctagttatacattcttccaaatttttttcaaagttttcaacttctttgcctttggtttgaatgtcctcccatagctcggagtgatttgatcatctgaagccttcctcactgagctcgtcaaagtcattctccgtccagctttgttccgttgctggtgaggaactgcgttcctttggaggaggagaggcactctgctttttagagtttccagtttttctgctctgttttttccccatctttgtggttttatctacttttggtctttgatgatggtgatgtgcacatgggtttttggtgtggatgtcctttctgtttttcagttttccttctaacagacaggaccctcagttgcaggtctgttggagtacctggccgtgtgaggtgtcagtgtgcccctgctggggggtgcctcccagttaggctgctcgggggtcaggggtcagggacccacttgaggaggcagtctgcccgttctcagatctccagctgcatgctgggagaaccacttctctcttcaaagctgtcagacagggacatttaagtctgcagaggttactgctgtctttttgtttgtctgtgccctgcccccagaggtggagcctacagaggcaggcaggcctccttgagctgtggtgggctccacccagttcgagcttcccggctgctttgtttacctaggcaagcctgggcaatggtgggcgcccctcccccagcctcgctgccaccttgcagtttgatctgagactgctgtgctagcaatcagcaaagactccgtgggcgtaggaccctccgagccacgtgcgggatataatctcctggtgcgccgtttttttaagcccgtcagaaaagcgcagtattcgggtggaagtgacccgattttccagttgccgtctgtcactgctttctttgactagcaaagggaactccctgaccccttgtgcttcccgagtgaggcaatgccttgccctgcttcagctcatgcacggtgcgcacatccactgacctgcgcccactgtctggcactccctagtgagatgaacccggcacctcagatggaaagcagaaatcacccatcttctgtgtcgctcatgctgggagctgtagactggaactgttcctattcggccatcttggctcctgtttcctgactttttaatgatcgccattctaactggtgtgagatggtatctcattgtggttttgatttgcatttctctgacggccagtgatgatgagcattttttcatgtgtctgttggctgcataaatgtctgcttttgagaagtgtctgttcatgtcctttgcccacttgttgatggggttgtttttttcttgtaaatgtgttgagttctttgtagattctggatattagccctttgtcagatgagtaggttgcaaacattttctcccattctgtaggttgcgtgttcactctgatggtagtttcttttgctgtacagaagctctttagtttaattagatcccatttgtgaattttggcttttgttgccattgcttttggtgttttagacatgaagtccttgcccatgcatatgccctgaatggtattgcctaggttttcttctagggtttttatggttttaggtctaacatttaagtctttaatccatcttgaattaatttttgtataaggcataaggaagggatccagtttcagcttcctatatatggctagccagttttcccagcaccatttcttaaatagggaatcctttccccatttcttgtttttgtcaggtttgtcaaagatcagatagttgtagatgtgtggtattatttctgagggctccgttctgttccattggtctatatcaatgttttggtaccagtatcatgctgttttggttactgtagccttgtagtatagtttgaagtcaggtagtgtgatgcctccagctttgttcttttggcttaggattgacttggcaatgtgggctcttttttgattccatatgaactttaaagtagtttttttccaattctatgaagaatgtcattggtagcttgatgggaatggcattgaatctataaattaccttgggcagtatggccattttcacgatattgattcttcctatccatgagcatggaatgttcttccatttgtttgtgtcctcttttatttcatcgagcagcggtttgtagttctccttgaagaggtccttcacatcccttgtaagttggattcctaggtattttattctctttgaagcaattgtgaatgggagttcactcatgatttggctctctgtttgtctgctattggtgtataagaatgcttgtgatttttgcatattgattttgtatccttaatac

SEQ ID NO: 10337 - DNA, 10014 bp, Homo sapiens
tattttttttaaattttattattattatactttaagttttagggtacatgtgcacaaggtgcaggtttgttacatatgtatacatgtgcaatgctggtttgctgcacccattaactcgtcatttagcattaggtatatctcctaatgctatccctccccctcccccaccccaaaacaatccccagtgtgtgatgttccccttcctgtgtccatgtgctctcatcgttcaattcccacctatgagtgagaacatgtggcgtttggtttcttgtccttgcgatagtttgctgagaatgatggtttccagtttcatccatgtccctaaaaaggacatgaacttatcattttttttttattatactttaagttttagggtacatttgcacattgtgcaggttagttacatatgtatacatgtgccatgctggtgcgctgcacccactaactcatcatctagcattaggtatatctcccgatgctatccctcccccttcccaccaccccataacagtccccagagtgtgatattccccttcctgtgtccatgtgatctcattgttcagttcccacctatgagtgagaatatgtggtgtttggttttttgttcttgtgatagtttactgagaatgatgatttacaatttcatccatgtccctacaaaggacatgaactcatcattttttatggctgcatagtattccatggtgtatatgtgccacattttcttgatccagtctatcattgttggacatttgggttggttccaagtctttgctattgtgaataatgccgcaataaacatacgtgtgcatgtgtctttatagcagcttgatttatagtcctttgggtatatacccagtaatgggatggctgggtcaaatggtgtttccagttctagatccctgaggagtcgccacactgacttccacaagggttgaactagtttacagtcccaccaacagtgtaaaagtgttcctatttctccacatcctctccagcacctgttgtttcctgactttttaatgattgccgttctaactggtgtgagatggtatctcattgtggttttgatttgcatttctctgatgaacagtgatgatgagcattttttcatgtgttttttggctgcataaatgtcttcttttgagaagtgtctgttcatgtccttcacccactttttgatgagtttttttttttttcttgtaaattagtttgagttcattgtagattctagatattagccctttgtcagatgagtaggttgcaaaaattttctcccattttttaggttgcctgttcactctgatggtagtttcttttactatgcagaagctctttagtttaattagatcccatttgttaattttggcttttgttgccattgcttttggtgttttagacatgaagtccttgcccatgcctatgtcctgaatggtaatgcctagggtttcttctagggtttttatggttttaggtctaacgtttaagtctttaatcaatcttgaattgatttttgtataaggtgtaaggaagggatccagtttcagctttctacatatggctagccacttttcccagcaccatttattaaatagggaatcctttccccattgcttgtttttctcaggtttgccaaagatcagatagttgtagatatgcggcattatttctgagggctctgttctgttccattgatctatatctctgttttggtaccagtaccatgctgttttggttactgtagccttgtagtatagtttgaagtcaggtagtgtgatgcctccagctttgctcttttcgtttaggattgacttggcgatgcgggctcttttgtggttccatatgaacttgaaagtagttttttccaattctgtgaagaaagtcattggtagcttgatggggatggcattgaatctgtaaattaccttgggcagtatggccattttcacgatattgattcttcttacccatgagcatggaatattcttccatttgtttgtatcctcttttatttcattgagcagtggtttgtagttctccttgaagaggtccttcacatcccttgtaagttggattcctaggtattttattctctttgaagcaattgtgaatgggagttcactcatgatttggctctctgtttgtctgttgtctgtgtataagaatgcttgtgatttttgtacattgattttgtatcctgagtctttgctgaagttgcttatcagcttaaggagattttgggatgagacaatggggttttctagatatacaatcatgttgtctgcaaacagggacaatttgacttcctcttttcctaattgaataccctttatttccttctccagcctgattgccctggccagaacttccaacactatgttgaataggagtggtgagagagggcatccctgtcttgtgccagttttcaaagggaatgcttccagtttttgcccattcagtatgatattggctgtgggtttgtcacagatagctcttattattttgaaatacgtcccatcaatacctaatttattgagagtttttatcatgaagggttgttgaattttgtcaaaggctttttctgcatctattgagatattcatgtggtttttgtctttggctctgtttatatgctggattacgtttattgatttgcgtatattgaaccagccttgcatcccagggatgaagcccacttgatcatggtggataatctttttgatgtgctgctggatttgttttgccagtattttattgaggatttttgcatcaatgttcatcaaggatattcgcataaaattatctttttttgttgtgtctctgcctggctttggtatcaggatgatactggcctcataaaatgagttagggaggattccctctttttctattgattggaatagtttcagaaggaatggtagcagctcctccttgtacctctggtagaattcggctgtgaatccatctggtcctggactctttttgattggtaagctattgattattgccacaatttcagatcctgttattggtctattcagagattcaacttcttcctggtttagtcttggaaaagtgtatgtgtccaggaatttatccatttcttctagattttctagtttatttgcgtagaggtgtttgtagtattccctgatggtagtttgtatttctgtgggatcggtggtgatatcccctttatcattttttattgcgtctatttgattcttctctctttttttctttattagtcttgctagcagtctatcaattttgttgaccctttcaaaaaaccagctcctggattcattgattttttgaagggtttttgtgtctctatttccttcagttctgctctgatcttagttatttcttgccttctgctagcttttgaatgtgtttgctcttgcttttctagttcttttaattgtgatgttagggtgtcaattttggatctttcctgctttctcttgtgggcatttagtgctataaatttccctctacacactgctttgaatgtgtcccagagattctggtatgttgtgtcattgttctccttggtttcaaagaacatctttatttctgccttcctttcgttatgtacccagtagtcactcaggagcaggttgttcagtttccatgtagttgagcggttttgagtgagtttcttaatcctgagttctagtttgattgcactgtggtctgagagatagtttattataatttctgttcttttacatttgctgaggagagctttacttcccagtatgtggtcaattttggaataggtgtggtgtggtgctgaaaaaaatgtatattctgttgatttggggtggagagttctgtagatgtctattaggtctgcttggtgcagagctgagttcaattcctgggtatccttgttgaatttctgtctcgttgatctgtctaatgttgacaatggggtgttaaagtctcccattattaatgtgtgggagtctaagtctctttatagttcactcaggacttgttttatgaatcttggtgctcctgtattgggtgcatatatatttaggacagttagctcttcttgttgaattgatccctttaccattatgtaatggccttctttgtctcttttgatctttgttggtttaaagtctgttttatcagagactaggattgcaacccctgcctttttttgtttttcatttgcttggtagatcttcctccatccttttattttgagcttatgtgtgtctctgcccgtgagatgggtttcctgaatagagcacactgacgggtcttgactctttatccaatttgccagtctgtgtcttttaattggagcatttagtccattgacatttaaagttaatattgttatgtgtgaatttgatcctctcattatgatgttagctggttattttgctagttagttgatgcagtttcttcctagtctcgatggtctttacattttggcatgattttgcagcggctggtaccggttgttcctttccatgtttaatgcttccttcaggagctcttgtaaggcaggcctggtggtgagaaaatctctcagcatttgcttgtctgtaaagtattttatttctccttcacttatgaagcttagtttggctgtatacgaaattctggtttgaaaattcttatctttaagaatgttgaatattggcccccactctcttctggcttgtagggtttctgctgagagatccactgttagtctgatgggcttccctttgagggtaacccgacctttctctctgactgcccttaacattttttccttcatttcaactttggtgaatctgacaattatgtgtcttggagttgctcttctcgaggagtatctttgtggcgttctctgtatttcctgaatctgaacgttggcctgccttgctagattggggaagttctcctgaataatatcctgcagagtgttttccaacttggttacatcctccccatcactttcaggcacaccaatgagacgtagatttggtcttttcacatagtcccatatttcttggaggctttgctgatttctttttattcttttttctctaaacttcccttctcgcttcatttcattcatttcatcttccatcactgatgccctttcttccagttgatcgcattggctcctgaggcttctgcattcttcacgtagttctcgagccttggttttcagctccatcagctcctttcagcacttctctgtattggttattctagttatacattcttctaaattttttttcaaagttttcaacttctttgcctttggtttgaatgtcctcccgtagctcagagtaatttgatcgtctgaaggcttcttctctcagctcgtcaaagtcattgtccgtccagctttgttccgttgcttgtgaggaactgcgttcctttggaggaggagaggtgctctgctttttagagtttccggtttttctgttctgttttttccccatctttgtggttttatctatttttgttctttgatgatggtgatgtacagatgggtttttggtgtggatgtcctttctgtttgttagttttccttctaacagagaggaccctcagttgcaggtctgttggagtaccctccgtgtgtggtgtcagtgtgcccctgctggggggtgactcccagttaggctgctcaggggtcaggggtcagggacccacttgaggaggcagtctgcccattctcagatctccagctgcgtgctgggagaaccactgctctcttcaaagctgtcagacagggacatttaagtctgcagaggttactgctgtctttttgtttgtctgtgccctgcccccagaggtggagcctacagaggcagacaggcctccttgagctgtgttgggctccacccagttcgaggttccaggctgccttgtttacctaatcaagcctgggcaatggtgggcgcccctcccccagcctcgctgccaccttgtagtttgatctcagactgctgtgctagcaatcagcaagactccttgggcgtaggaacctccgagccaggtgcgggatataatctcgtggtgcgccgttttttaagcctatcagaaaagcacagtattcgggtgggagtgacccgattttccaggtgccgtccatcaccaatttctttgactcagaaagggaactccctgaccccttgcgcttccctggtgagacaatgccttgccctgcttcgtctcacgcatggtgcgcacacccactgacctgcgtccactgtctggcactccctagtgagatgaacccggtacctcagatggaaatgcagaaatcacccgtcttcttcgtcgctcatgctgggagctgtagactggagctgttcctattcggccatcttggctcctccccccgaaatccgaactcatcattttttatggctgcatagtattccatggtgtatatgtgccacattttcttaatccagtttttcgttgttggacatttaggttggttccaagtctttgctattgtgaatagtgccgcaataaacatacgtttgcacgtgtctttataccagcatgatttaaaatcctttgggtatatacccagtaatgggatggctgggtcaaatggtatttctaattctagatccctgaggaatcgccacactgacttccacaatggttgaactagtttacagtcccaccaacagtgtaaaagtcttcctatttctccacatcctctctagcacctgttgtttcctgactttttaatgatcaccattcgaactggtgtgagattatatctcattgtggttttgatttgcatttctctgatggccagtgatgatgagcatttcttcatgtctttttcggctgcataaatgtcttcttttcagaagtgcctgttcatatactttgtccactttttgatggggttgtttgtttttttcttataaatttgtttgagttcattgtagattctggatattagccctttgtcagatgagtaggttgcaaaaattttctcccattttgtaggttgcctgttcactctgatggtagtttcttttgttgtgcagaagctcttgagtttaattagatcccatttgtcaattttggcttttgttgccattgcttttggtgtttcagacatgaagcacttgcacatgcttatgtcctgaatggtattgcctaggtttgttctagggttttcatggttttaggtctaacatttaagtctttaactcatcgtgccttaatttttgtataaggtataaggaagtgatccagtttcagctttctacatatgtctagccagttttcccagcaccatttattaaatagggaatcctttccccattgcttgtttttctcaggtttgtcaaagatcagatagttgtagatatgcagcattatttctgagggctccgttctgttccattggtctatatctctgttttggtaccagtaccatgctgttttggttactatagccttgtagtatagtttgaagtcaggtagcgtgatgtctccagctttgttcttttggcttaggattgacttggtgatgcgggctttttttggtgccatatgaacttgaaagtagttttttgcaattctgtgaagaaagtcattggtagctagatggggatagtattaaatctataaattaccttgggcagtatggcctttttcacgatattgattcttcctacccatgaacatggaatgtccttccatttgtttgtatcctcttttatttcattgtgcagtggtttgtagttctccttgaagaggtccttcacatcccttgtaagttggattcctaggtattttatttttttgaagcaattgtgaatgggtgttcactcatgatttggctctctgtttgtctgttattggtgtataagaatgcttgtgatttttgtacattgattttgtatgctgagactttgctgaagttggttaccagcttgagaagattttgggctgagatgatggggttttctagatatacaatcatgtcacctgcaaacagggacaatttgacttcctcttttcctaattgaataccttttatttccttctcctgcctgattgccctggccagaacttccaacactatgttgaataggagtcgtgagagagggcatccctgtcttgtgcccgttttcaaagggaatgcttccagtttttgtccattcagtatgatattggttttgggtttttcatagatagctcttattattttgagatacgtcccattgatacttaatttattgagagattttatcatgaggggttgttgaattttgtcaaaggccttttctgcatctattgagacaatcatgtggtttttgtctttggttctctttataggctggattacatttattgatttacatatgttgaatcagccttgcatcccagggatgaagcccacttgattatggtggataagcattttgaagtgctgctggatttggtttgcctttattttattgaggatttttgcattgatgttcatcaaggatattggtctaaaattctcttttttggttgtgtctctgccaggctttggtatcaggatgatgctgtcctcagaaaatgagttaaggaggattccctctgtttctatcaatcagaatagtctcagaaggaatggtaccagctcctctttgtacctctggtagaattcggctgtgaatccatctggtcctggactttttttggttggtaagctgttgattattgcctcaatttcagagcctgttattggtctattcagagactcaacttcttcctggtttagtcttgggtggatgtatgtgtccaggaatttatgcatttcttctagattttctaatttatttgcatagaggtgtttatagtattctctgatggtagattgtatttctgtggtgatatgccctttatcaatttttaatgcgtctatttgagtcttctctcttttcttctttattaatcttgctagtggtctgtcaattttgttgatcttttcagaaaactagctcctggattcattgattttttgaaggattttttgtgtctctatttccttcagttctgctctgatcttagttatttcttgccttctgctagcttttgaatgtgtttgctcttgcttttctagttattttaattgtgatgttagggtgtcaattttagatctttcctcctttctcttgtgggcatttattgctataaatttccctctacacactgctttgaatgtgtcccagagattctggtatgttgtgtctttgttctccttggtttcaaagaacatctttatttctgccttcatttcattatgtacctggaagtcattcaggagcacgttgttcagtttccatttagttgagcagttttgaatgagttccttaatcctgagttctagtttggtagcaatgtggtctgagagacagtttgttataatttctgttcttttacattaactgaggagtgctttacttccaactatgtgtgcaattttggagtaggtgtggtgtggtgatgaaaagaatgtatattctgttgatttggggtggagagttctgtagatgtctattaggtctgcttggtgcagagctgagttcaattcctgggtatccttcttaactttctgtatcgttgatctgtctaatgttgacaatggggtgttaaagtctcccattattattgtgtgggagtctaagtctctttgtaggtcactcaggacttgctttatgaatctgggtgctcctgtattgggtgcatatatatttagggtagttagctcttcttgttgaattgatccctttaccattatgtaatggccttgtctcttttgatctttgttggtttaaagtctgttttatcagaaactaggattgcaacccctgcctttttttgttttccatttgctttgtagatcttcctccatccctttattttgagcctatgtgtggctctgcacatgagatgggtttcctgaatacaacccactgatggttcttgactctatccaacttgccagtctttgtcttt

SEQ ID NO: 10338 - DNA, 9781 bp, Homo sapiens
tttatttatttatttattattattatgctttaagttttagggtacatgtgcacaatgtgcaggttagttacatatgtatacatgtgccatgctggtgcgctgcacccactaactcgtcatctagcattaggtatatctcccaatgctatccctcccccctccccccaccccaccccacaacatgctgctataaagacacatgcacacgtatgtttattgcggcactatttacaataacagagacttggaaccaacccaaatgtccaacaatgatagactggattaagaaaatctggcacatatacaccatggaatactatgcagccataaaaaatgatgagttcatgtcctttgtagggacatggatgaaattggaaatcatcattctcagtaaactatcgcaagaacaaaaaaccaaacaccgcatattctcactcataggtgggaattgaacaatgagaacacatggacacaggaaggggaacatcacactctgagaactgcatttcttgcagccacaactccaacatgcccatagcactcatgatcagccttgaatatgtaagacagtgttgcagtgtcctggccttgctggtggcagctgtgggcatggtcctctctaaactgaatcttttgttccacattatggtcatgttattccagaacctagatccttttttttttttttgagagggagtctcgttctgtctcccaggctggcggcagtagcgtgatcttggctcactgcaacctccacttcccggtttcaagcaattctcatgtctcagcctctcaagtaactgggactacagctgcacgccaccacgcctagataatttttgtatttttagtagagatagggtttcaccatattggtcaggctggtcccgaactcctaacctcaggtgatccacccacctcagcttcccaaagtgctgggattacaggcatgagtaactgcacccagccagatccgtttttaaaactatcttccttagtgcttcttttttattggattcaaatgccagtagctagaagctactaatttattgaggctttaccctgatactgtttacaatgcatcttttcaggcatatatcatatttgtggatcagacattgacaattacaaggcactgaaatgattatattcaattgccacaattgaagcccttgaaataggatacctgagataatgcattccacattcgtgtctcatttgatgatcaatgtattaatcagaatcagagatgatagcatattatatacttgtcaaaataaacttattagaaatatattagttctaactaaaatcttgcattgatttatcatttgttttattaatagtaagcattacacctgctctcaaatcttctaattaaaagaaatctgtttcctagacagattgaagttaaatggttagcataattcctgtgtgtgtgtggagagaaaagatagtagctcactggcatactccattggcatgccttactttcaggaaaacagagaagaacagctacaggaagcaattgatatccctacacaggttggggttgatatgcaaatttataaacacaatgtttccattctgggtaagctatacagaatcacaccagcaggggtttgatactgtattttcttctgttttagctgtgttgtcatttcagaagctgtgaaactaagaatctctaaaagatgtgttaagagattcaaaaccccagcagagaactatgtaacaataagcaatcatacaaaaagtaaacaataaaacattcaacaatacaaggagggttttacaaaatggatttacaaatttggggtagtatcagtttaatatgacttttgttactccttattgttaacatagtgcttaaggaacttttaaaggtagtgtacaaattggattagtccagagctagttagggaatagtttattattattattattattattttttattttttatttttgagacagttttgctcttgtcacccaggctggagtgcagtggtgcaatctcagctcactgtaacctctgcctcccgggttcaagagattatcctgcctcagcctcccaagtcgttgggattacaggtgcctgccaccatggccagctaattttttgtatttttagtagagatggggtttcaccgtgttggccacgttgctctcaaactcctgacctctggtgatctgcccgccttggcctcccaaagtgttaggattataggcgtgagccaccgctcctggccgggaatagtttttgtctttaattaagctctgttttacttctatataggcataactcagagatatcacaggtttggttccagaccaccacaataaagcaaatatcatagtaaaacaagtcacacatttgttttttggtttctaaatgcacataaaggttacactataccatatatactcatattaagtttacactataccgtatatagtctattacactatgccatacatactctataagtttacactataccgtatatactctattaagtttatactataccatatatactctattaagtgtgcaatagcattatggcttaaaaaacttgcataatttaaaaatactttgttgctaaaaattgccagcaatcatctgagacttcagtgagtcataatctttctgctggtggagagtcttgtctggatgtggatggctgctgactggttaggttggtggttgctgaaggttgaggtggctgtggcaatttgttaaggcaacactgaaggttgccacattggttgacacttcctttcacgaacgatttctctgtagcattcaatgctgtctgatagcattttactcacatagaacttctttcaaaattggtgtcaatcctctcaaaccccggcactgcttaatcaactaggtttatttaatattttaaattcctctttgtcattcaacattgttcatagcaccttcatcaggaaaagattccatctccagagactgctttctttgttcatccataagaagcaacttcttatgcgttcaagttttattgtgagattacagcaattgtcacatcttcagactccacttcttttttttttttttgaaacggagtctcgctctgtcgcccaggctggagtacagtggcaccatttcggctcactgcaagctccgcctcctgggttcatgcccttctcctgcctcagcctccacgcccccgccaccacgcctggctaattttttttttttgtattttttgtagagatggggtatcaccgtgttagccaggatggtctcgatctcccgaccttgtcatccgcccgccttggtctcccaaagtgctgggattacaggcgtgagctaccgcgcccagcccagactccacttctaactctagttctcttgttatttttaccacatctgtgattctttcctcccctgaagcctagaacccctcaaagtcacccattaggtttggaatcaacttcttccaaactcctgttaatggtgatatttgacttccttccattaatcatgattcttttttttttttttttttttttttttttagagacagggtctcactctgttgcccaggttggaatgcagttgcatgattatggctcactgcagccagccttgaaatcccgggctcagtcgatcctcccacctcagccttccaagtcactgggactacaggcacatgccaccatacccagttagtttttttttcttttttttttttttttttttttattttttttttatttttttttttttttattatactctcagttttagggtacatgtgcacattgtgcaggttagttacatatgtatacatgtgccatgctggtgcgctgcacccactaatgtgtcatctagcattaggtatatctcccaatgctatccctcccccctcccccgaccccaccacagtccccagagtgtgatattccccttcctgtgtccatgtgatctcattgttcaattcccacctatgagtgagaatatgcggtgtttggttttttgttcttgcgatagtttactgagaatgatggtttccaatttcatccatgtccctacaaaggatatgaactcatcattttttatggctgcatagtattccatggtgtatatgtgccacattttcttaatccagactatcattgttggacatttgggttggttccaagtctttgctattgtgaatagtgccgcaataaacatacgtgtgcatgtgtctttatagcagcatgatttatagtcctttgggtatatacccagtaatgggatggctgggtcaaatggtatttctagttctagatccctgaggaatcgccacactgacttccacaatggttgaactagtttacagtcccaccaacagtgtaaaagtgttcctatttctccacatcctctccagcacctgttgtttcctgactttttaatgattgccattctaactggtgtgagatgatatctcatagtggttttgatttgcatttctctgatggccagtgatgatgagcattttttcatgtgttttttggctgcataaatgtcttcttttgagaagtgtctgttcatgtccttcgcccactttttgatggggttgtttgtttttttcttgtaaatttgtttgagttcattgtagattctggatattagccctttgtcagatgagtaggttgcaaaaattttctcccatgttgtaggttgcctgttcactctgatggtagtttcttttgctgtgcagaagctctttagtttaattagatcccatttgtcaattttggtttttgttgccattgcttttggtgttttggacatgaagtccttgcccacgcctatgtcctgaatggtaatgcctaggttttcttctagggtttttatggttttaggtctaacgtttaaatctttaatccatcttgaattgatttttgtataaggtgtaaggaagggatccagtttcagctttctacatatggctagccagttttcccagcaccatttattaaatagggaatcctttccccattgcttgtttttctcaggtttgtcaaagatcagatagttgtagatatgcggcattatttctgagggctctgttctgttccattgatctatatctctgttttggtaccagtaccatgctgttttggttactgtagccttgtagtatagtttgaagtcaggtagtgtgatgcctccagctttgttcttttggtttaggattgacttggcaatgcgggctcttttttggttccatatgaactttaaagtagttttttccaattctgtgaagaaagtcattggtagcttgatggggatggcattgaatctgtaaattaccttgggcagtatggccattttcacgatattgattcttcctacccatgagcatggaatgttcttccatttgtttgtgtcctcttttatttccttgagcagtggtttgtagttctccttgaagaggtccttcacatcccttgtaagttggattcctaagtattttattctctttgaagcaattgtgaatgggagttcacccatgatttggctctctgtttgtctgttgttggtgtataagaatgcttgtgatttttgtacattgattttgtatcctgagactttgctgaagttgcttatcagcttaaggagattttgggctgagatgatggggttttctagataaacaatcatgtcgtctgcaaacagggacaatttgacttcctcttttcctaattgaataccctttatttccttctcctgcctgattgccctggccagaacttccaacactatgttgaataggagcggtgagagagggcatccctgtcttgtgccagttttcaaagggaatgcttccagtttttgcccattcagtatgatattggctgtgggtttgtcatagatagctcttattattttgaaatacgtcccatcaatacctaatttattgagagtttttagcatgaagggttgttgaattttgtcaaaggctttttctgcatctattgagataatcatgtggtttttgtctttggctctgtttatatgctggattacatttattgatttgcgtatattgaaccagccttgcatcccagggatgaagcccacttgatcatggtggataagctttttgatgtgctgctggattcggtttgccagtattttattgaggatttttgcatcaatgttcatcaaggatattggtctaaaattctcttttttggttgtgtctctgcccggctttggtatcagaatgatgctggcctcataaaatgagttagggaggattccctctttttctattgattggaatagtttcagaaggaatggtaccagttcctccttgtacctctggtagaattcggctgtgaatccatctggtcctggactctttttggttggtaaactattgattattgccacaatttcagagcctgttattggtctagtcagagattcagcttcttcctggtttagtcttgggagagtgtatgtgttgaggaatgtatccatttcttctagattttctagtttatttgcgtagaggtgtttgtagtattctctgatggtagtttgtatttctgtgggatcggtggtgatatcccctttatcattttttattgtgtctatttgattcttctctctttttttctttattagtcttgctagcggtctatcaattttgttgatcctttcaaaaaaccagctcctggattcattgattttttgaagggttttttgtgtctctatttccttcagttctgctctgattttagttatttcttgccttctgctagcttttgaatgtgtttgctcttgcttttctagttcttttaattgtgatgttagggtgtcaattttggatctttcctgctttctcttgtaggcatttagtgctataaatttccctctacacactgctttgaatgcgtcccagagattctggtatgtggtgtctttgttctcgttggtttcaaagaacatctttatttctgccttcatttcgttatgtacccagtagtcattcaggagcaggttgttcagtttccatgtagttgagcggctttgagtgagattcttaatcctgagttctagtttgattgcactgtggtctgagagatagtttgttataatttctgttcttttacatttgctgaggagagctttacttccaactatgtggtcaattttggaataggtgtggtgtggtgctgaaaaaaatgtatattctgttgatttggggtggagagttctgtagatgtctattaggtctgcttggtgcagagctgagttcaattcctgggtatccttgttgactttctgtctcgttgatctgtctaatgttgacagtggggtgttaaagtctcccattattaatgtgtgggagtctaagtctctttgtaggtcactcaggacttgctttatgaatctgggtgctcctgtattgggtgcataaatatttaggatagttagctcctcttgttgaattgatccctttaccattatgtaatggccttctttgtctcttttgatctttgttggtttgaagtctgttttatcagagactaggattgcaacccctgcctttttttgttttccatttgcttggtagatcttcctccatccttttattttgagcctatgtgtgtctctgcacgtgagatgggtttcctgaatacagcacactgatgggtcttgactctttatccaacttgccagtctgtgtcttttaattgcagaatttagtccatttatatttaaagttaatattgttatgtgtgaatttgatcctgtcattatgatgttagctggtgattttgctcattagttgatgcagtttcttcctagtctcgatggtctttacattttggcatgattttgcagcggctggtaccagttgttcctttccatgtttagtgcttccttcaggagctcttttagggcaggcctggtggtgacaaaatctctcagcatttgcttgtctataaagtattttatttctccttcacttatgaagcttagtttggctggatatgaaattctgggttgaaaattcttttctttaagaatgttgaatattggcccccactctcttctggcttgtagggtttctgccgagagatccgctgttagtctgatgggctttcctttgagggtaacccgacctttctctctggctgcccttaacattttttccttcatttcaactttggtgaatctgacaattatgtgtcttggagttgctcttctcgaggagtatctttgtggcgttctctgtatttcctgaatctgaacgttggcctgccttgctagattggggaagttctcctggataatatcctgcagagtgttttccaacttggttccattctccacatcactttcaggtacaccaatcagacgtagatttggtcttttcacatagtcctatatttcttggaggctttgctcatttctttttattcttttttctctaaacttcccttctcgcttcatttcattcatttcatcttccattgctgataccctttcttccagttgatcgcatcggctcctgaggcttctgcattcttcacgtagttctcgagccttggttttcagctccatcagctcctttaagcacttctctgtattggttattctagttatacattcttctaaatttttttcaaagttttcaacttctttgcctttggtttgaatgtcctcccgtagctcagagtaatttgatcgtctgaagccttcttctctcagctcgtcaaaatcattctccatccagctttgttctgttgctagtgaggaactgcgttcctttggaggaggagaggtgctctgcgttttagagtttccagtttttctgttctgttttttccccatctttgtggttttatctacttttggtctttgatgatggtgatgtacagatgggttttcggtgtagatgtcctttctggttgttagttttccttctaacagacaggaccctcagctgcaggtctgttggaataccctgccgtgtgaggtgtcagtgtgcccctgctggggggtgcctcccagttaggctgctcgggggtcaggggtcagggacccacttgaggaggcagtctgcccgttctcagatctccagctgcgtgctgggagaaccactgctctcttcaaagctgtcagacagggacacttaagtctgcagaggttactgctgtctttttgtttgtctgtgccctgcccccagaggtggagcctacagaggcaggcaggcctccttgagctgtggtgggctccacccagttcgagcttcccggctgctttgtttacctaagcaagcctgggcaatggcgggcgcccctcccccagcctcgttgccgccttgcagtttgatctcagactgctgtgctagcaatcagcgagattccgtgggcgtaggaccctctgagccaggtgtgggatatagtctcgtggtgcgccgtttcttaagccggtctgaaaagcgcaatattcgggtgggagtgacccgattttccaggtacgtccgtcacccctttctttgactcggaaagggaactccctgaccccttgcgcttcccaggtgaggcaatgcctcgccctgcttcggcttgcgcacggtgcgcacacacactgacctgcgcccactgtctggcactccctattgagatgaacccggtacctcagatggaaatgcagaaatcacccgtcttctgcgtcgctcacgctgggagctgtagaccggagctgttcctattcggccatcttggctcc

SEQ ID NO: 10339 - DNA, 9701 bp, Homo sapiens
cctaactgggaggcaccccccagtaggggcagactgacacctcacacggcccagtactcctctgagtcaaaacttccagaggaacgatcagacagcagcattcacggttcatgaaaatctgctgttctgcagacaccactgctggtacccaggcaaacagggtctggagtggacctctagcaaactccaacagacctgcagctgagggtcctgtctgttagaaggaaaactaacaaacagaaaggacatccacaccaaaaacccatctgtacatcaccatcatcaaagaccaaaagtagataaaaccacaaagatggggaaaaaacagagcagaaaaactggaaactctaaaaagcagagtgcctctcctcctccaaaggaacgcagttcctcaccagcaacggaacaaagctggacggagaatgactttgacgagttgagagaagaaggcttcagataatcaaactactccgagctacaggaggaaattcaaaccaaaggcaaagaagttgaaaactttgaaaaaaatctagacgaatgtataactagaataaccaatacagagaagtgcttaaaggagctgatggagctgaaaaccaaggctcgagaactacgtgaagaatgcagaagcctcaggagccgatgcgatcaactggaagaaagggtatcagtgatggaagatgaaatgaatgaaatgaagtgagaagggaagtttagagaaaaaagaataaaaagaaatgaacaaagcctccaagaaatatgggactatgtgaaaaggccaaatctatgtctgattggtgtacctgaaagtgacagggagaatggaaccaagttggaaaacactctgcgggatattatccaggagaacttccccaatctagcaaggcaggtcaatgttcagattcaggaaatacagagaacaccacaaagatactcctcgagaagagcaactccaagacacataattgtcagattcaccaaagttgaaatgaaggaaaaaatgttaagggcagccagagagaaaggtcgagttacccacaaagggaagcccatcagacaaacagcagatctctcagcagaaactctacaagccagaagacagtgggggccaatattcaacattctttttttttattattatactttaagttttagggtacatgtgcacattgtgcaggttagttacatatgtatacatgtgccatgctggtgcgctgcacccactaactcatcatctagccttaggtatatctcccaatgctatccctccccactccccccaccccaccacagtccccagagtgtgatattccccttcatgtgtccatgtgatctcattgttcaattcccacctatgagtgagaatatgcggtgtttggttttttgttcttgcgatagtttactgagaatgatgatttccaacttcatccatgtccctacaaaggacatgaactcatcattttttatcgctgcatagtattccatggtgtttatgtgccacattttcttaatccaatctatcattgttggacatttgggttggttccaagtctttgctattgtgaataatgctgcaataaacatacgtgtgcatgtgtctttatagcagcatgatttatagtcatttgggtatatacccagtaatgggatggctgggtcaaatggtatttctagttctagatccctgaggaatcgccacactgacttccacaatggttgaactagtttacagtcccaccaacagtgtaaaagtgttcctatttctccacatcctctccagcacctgttgtttcctgactttttaatgattgccattctaactggtgtgagatgatatctcatagtggttttgatttgcatttctctgatggccagtgatgatgagcattttttcatgtgttttttggctgcataaatgtcttcttttgagaagtgtctgttcatatccttcgcccactttttgatggggttgtttgtttttttcttgtaaatttgtttgagttcattgtagattctggatattagccctttgtcagatgagtaggttgcgaaaattttctcccatgttgtaggttgcctgttcactctgatggtagtttcttttgctgtgcagaagctctttagtttaattagatcccatttgtcaattttggcttttgttgccattgcttttggtgttttggacatgaagtccttgcccatgcctatgtcctgaatggtaatgcctaggttttcttctagggtttttatggttttaggtctaatgtttaaatctttaatccatcttgaattgatttttgtataaggtgtaaggaagggatccagtttcagctttctacatatggctagccagttttcccagcaccatttattaaatagggaatcctttccccattgcttgtttttctcaggtttgtcaaagatcagatagttgtaggtatgcggcgttatttctgagggatctgttctgttccattgatctatatctctgttttggtaccagtaccatgctgttttggttactgtagctttgcagtatagtttgaagtcaggtagtgtgatgcctccagcacacttcttttggcttaggattgacttggcgatgcgggctcttttttgcttccatatgaactttaaagtagttttttccaattctgtgaataaagtcattggtagcttgatggagatggcattgaatctgtaaattaccttgggcagtatggccattttcacgatattgattcttcctacccatgagcatggaatgttcttccatttgtttgtatcctcttttatttccttgagcagtggtttgtagttctccttgaagaggtccttcacatcccttgtaagtaggattcctaggtattttattctctttgaagcaattgtgaatgggagttcactcatgatttggctctctgtttgtctgttgttggtgtataagaatgcttgtgatttttgtacattgattttgtatcctgagactttgctgaaggtgcttattagcttaaggagattttgggctgagacaatggggttttctagataaacaatcatgtcgtctgcaaacagggacaatgtgacttcctctcctaattgaataccctttatttccttctcctgcctgattgccctggccagaacttccaacactatgttgaataggagcagtgagagagggcatccctgtcttgtgccagttttcaaagggaatgcttccagtttttgcccattcagtatgatattggctgtgggtttgtcatagatagctcttattattttgaaatacgtcccatcaatacctaatttattgagagtttttagcatgaagggttgttgaattttgtcaaaggccttttctgcatctattgagataatcatgtggtttttgtctttggctctgtttatatgctggattacatttattgatttgcgtatattgaaccagctttccatcccagggatgaagcccacttgatcatggtggataagctttttgatgtgctgctggattcggtttgccagtattttattgaggatttttgcatcaatgttcgtcaaggatattggtctaaaattctcttttttggttgtgtctctgcccggctttggtatcagaatgatgctggcctcataaaatgagttagggaggattccctctttttctattgattggaatagtttcagaaggaatggtaccagttcctccttgtacctctggtagaattcggctgttaatccatctggtcctggattctttttggttggtaaactattgataattgccacaatttcagctcctgttattggtctattcagagattcaacttcttcctggtttagtcttgggagagtgtatgtgtcgaggaatttatccatttcttctagattttctagtttatttgcgtagaggtgtttgtagtattctctgatggtagtttgtatttctgtgggatcagtggtgatatcccctttatcattttttattgtgtctatttgattcttctctctttttttctttattagtcttgctagcggtctatcaattttgttgatcctttcaaaaaaccagctcctggattcattaattttttgaagggttttttgtgtctctatttccttcagttctgctctgattttagttatttcttgccttctgctagcttttgaatgtgtttgctcttgcttttctagttcttttaattgtgatgttagggtgtcaattttggatctttcctgctttctcttgtgggcatttagtgctataaatttccctctacacactgctttgaatgtgtcccagagattctggtatgttgtgtctttgttctcgttggtttcaaagaacatccttatttctgccttcatttcgttatgtacccagtagtcattcaggagcaggttgttcagtttccatgtagttgagcggttttgagtgagtttcttaatcctgagttctagtttgattgcactgtggtctgagagacagtttgttataatttctgatcttttacatttgctgaggagtgctttacttccaactatgtggtcaattttggaataggtgtggtgtggtgctgaaaaacatgtatattctgttgatttggggtggagagttctgtagatgtctattaggtccgcttggtgcagagctgagttcaattcctgggtatccttgtggactttctgtcttgttgatctgtctaatgttgacagtggggtgttaaagtctcccattattattgtgtgggagtctaagtctctttgtaggtcactcaggacttgctttatgaatctgggtgctcctgtattgggtgcatatatatttaggatagttagctcttcttgttgaattgatccctttaccattatgtaatggccttctttgtctcttttgatctttgttggtttaaagtgtgttttatcagagactaggattgcaacccctgcctttttttgttttccatttgcttggtagatcttcctccatccttttattttgagcctatgtgtgtctctgcatgtgagatgggtttcctgaatacagcacactggtgggtcttgactctttatccaacttgccagtctgtgtcttttaattggagaatttagtccatttacatttaaagttaatattgttatgtgtgaatttgatcctgtcattatgatgttacctggtgattttgctcgttagttgatgcagtatcttcctagtctcgatggtctttacaatttggcatgattttgccgcggctggtaccggttgttcctttccatgtttagtgcttccttcaggagctcttttagggcaggcctggtggtgacaaaatctctcagcatttgcttgtctgtaaagtattttatttctccttcacttatgaagcttagtttggctggatatgaaattctgggttgaaaattcttttctttaagaatgttgaatattggcccccactctcttctggcttgtagggtttctgccgagagatccgcttttagtctgatgggcttccctttgagggtaacccgacctttctctctggctgcccttaacattttttccttcatttcaactttggtgaatgtgacaattatgtgtcttggagttgctcttctcgaggagtatctttgtggtgttctctgtatttcctgaatctgaacattggcctgccttgctagattggggaagttctcctggataatatcctgcagagtgttttccaacttggttccattctccgcatcactttcaggtacaccaatcagatgtagatttggtcttttcacatagtcccatatttcttggaggctttgctcatttctttttattcttttttctctaaacttcccttcttgcttcatttcattcatttcgtcttccattgctgataccctttcttccagttgatcgcattggctcctgaggcttctgcattcttcacgtagttctcgagccttggttttcagctccatcagctcctttaagcacttctctgtattggttattctagttatacattcttctaaatttttttcaaagttttcaacttctttgcgtttggtttgaatgtcctcccgtagctcagagtaatttgatcgtctgaagccttcttctctcagctcatcaaagtcattctccatccagctttgttccgttgctggtgaggaactgcgttcctttggaggaggagaggcaccctgcgttttagagtttccagtttttctgttctgttttttccccatctttgtggttttatctacttttggtctttgatgatggtgatgtacagatgggttttcggtgtggatgtcctttctgtttgttagttttccttctaacagacagcaccctcagctgcaggtctgttggaataccctgccatgtgaggtgtcagtgtgcccctgctggggggtgcctcccagttaggctgctcgggggtcagggatcagggacccacttgaggaggcagtctgcccgttctcagatctccagctgcatgctgggagaaccactgctctcttcaaagctgtcagacagggacatttaagtctgcagaggttactgctgtctttttgtttgtctgtgccctgcccccagaggtggagcctacagaggcaggcaggcctccttgagctgtggtgggctccacccagttcgagcttcccagctgctttgtttacctaagcaagcctgggcaatggcgggcgcccctcccccagcctcgctgccgccttgcagtttgatctcagactgctgtgctagcaatcagcgagattccatgggcgtaggaccctccaagccaggtgtgggatatagtctcgtggtgcgccgttttttaagccggtctgaaaagtgcaatattcgggtgggagtgacccgattttccaggtgcgtccgtcacccctttctttgactcagaaagggaactccctgaccccttgcgcttcccaggtgaggcaatgcctcaccctgctttggctcgcgcacggtgcgcgcacccactggcctgcgcccactgtctggcactccctagtgagatgaacccggtacctcagatggaaatgcagaaatcacccgtcttctgcgtcgctcacgctgggagctgtagaccagagcttttcctattcggccatcttggctcctcccaacattcttaaagaaaagaattttcaacccagaatttcatatccagccaaactaagcttcataagtgaaggagaaataaaataccttacagacaagcaaatgctgagagattttgtcaccaccaggcctgccctaaaagagctcctgaaggaagcactaaacatggaaaggaacaactggtaccagctgctgcaaaaccatgccaaattgtaaagaccattgaggctaggaagaaactgcatcaactaacgagcaaaataaccaggtaacatcataatgacaggatcaaattcacacataagaatattaacttaaaatgtaaatggactaaatgctccaattaaaagacacagactggcaaattggataaagagtcaagacccatcagtgtgctgtattcaggaaacccatctcacatgcagagacacacataggctcaaaataaaaggatggaggaagatctaccaagcaaatggaaaacaaaaaaaggcaggggttgcaatcctagtctctgataaaacacactttaaaccaacaaagatcaaaagagacaaagaaggccattacataatggtaaagggatcaattcaacaagaagagctaactatcctaaatatatatgcacccaatacaggagcactcagattcataaagcaagtcctgagtgacctacaaagagacctagactcccacacaataataatgggagactttaacaccccactgtcaacattagacagatcaacaagacagaaagtccacaaggatacccaggaattgaactcagctctgcaccaagcggacctaatagacatctacagaactctccaccccaaatcaacagaatatacatgtttttcagcaccacaccacacctattccaaaattgaccacatagttggaagtaaagcactcctcagcaaatgtaaaagatcagaaattataacaaactgtctctcagaccacagtgcaatcaaactagaactcaggattaagaaactcactcaaaaccgctcaactacatggaaactgaacaacctgctcctgaatgactactgggtacataacgaaatgaaggcagaaataaggatgttctttgaaaccaacgagaacaaagacacaacataccagaatctctgggacacattcaaagcagtgtgtagagggaaatttatagcactaaatgcccacaagagaaagcaggaaagatccaaaattgacaccctaacatcacaattaaaagaactagaaaagcaagagcaaacacattcaaaagctagcagaaggcaagaaataactaaaatcagagcagaactgaaggaaatagagacacaaaaaacccttcaaaaaattaatgaatccaggagctggttttttgaaaggatcaacaaaattgatagaccgctagcaagactaataaagaagaaaagagagatgaatcaaatagacgcaataaaaaatgataaaggggatatcaccaccgatcccacagaaatacaaactaccatcagagaatactacaaacacctctacgcaaataaactagaaaatctagaagaaatggataaattccttgacacatacaccctcccaagactaaaccaggaagaagttgaatctctgaatagaccaataacaggctctgaaattgtgtcaataatcaatagcttaccaaccaaaaagagtccaggaccagatggattcacagccgaattctaccagaggtataaggaggaactggtaccattccttctgaaactattccaatcaatagaaaaagagggaatcctccctaactcattttatgaggccagcatcattctgataccaaagccgggcagagacacaaccaaaaaagagaattttagaccaatatccttgacgaacattgatgcaaaaatcctcaataaaatactggcaaaccgaatccagcagcacatcaaaaagcttatccaccatgatcaagtgggcttcatccctgggatgcaaggctggttcaatatacgcaaatcaataaatgtaatccagcatataaacagaaccaaagacaaaaaccacatgattatctcaatagatgcagaaaaggcctttgacaaaattcaacaacccttcatgctaaaaactctcaataaattaggtattgatgggacgtatttcaaaataataagagctatctatgacaaacccacagccaatatcatattgaatgggcaaaaactggaagcattccctttgaaaactggcacaagacagggatgccctctctcaccgctcctattcaacatagtgttggaagttctggccagggcaattacgcgggagaaggaaataaagggtattcaattaggaaaagaggaagtcaaattgtccctgtttgcagatgacatgattgtatatctacaaaaccccattgtctcagcccaaaatctccttaagctgataagcaccttcagcaaagtctcaggatacaaaatcaatgtacaaaaatcacaagcattcttatacaccaataacagacaaacagagagccaaatcatgagtgaagttgttc

SEQ ID NO: 10340 - DNA, 6058 bp, Homo sapiens
ttttttttttttttaagattttattattattattttttattatactttaagttttagggtacatgtgcacattgtgcaggttagttacatatgtatacatgtgccatgctggtgcgctgcacccactaactcatcatctagcattaggtatatctcccaatgctatccctcccccctccccccaccccacaacagtccccagagtgtgatattccccttcctgtgtccatgtgatctcattgttcaattctcacctatgagtgagaatatgcggtgtttggttttttgttcttgcgatagtttactgagaatgatgatttccaatttcatccatgtccctacaaaggacatgaactcatcattttttacggctgcatagtattccatggtgtatatgtgccacattttcttaatccagtctatcattgttggacatttgggttggttccaagtctttgctattgtgaataatgccgcaataaacatacgtgtgtatgtgtctttatagcagcatgatttatagtcctttgggtatataccgagtaatgggatggctgggtcaaatggtatttctagttctagatccctgaggaatcgccacactgacttccacaatggttgaactagtttacagtcccaccaacagtgtaaaagtgttcctatttctccacatcctctccagcacctgttgtttcctgactttttaatgattgccattctgactggtgtgagatggtatctcattgtggttttgatttgcatttctctgatggccagtgatgatgagcattttttcatgtgttttttggctgcataaatgtcttctcttgagaagtgtctgttcatgtccttcgcccactttttgatgggattgtttgtttttttcttgtaaatttgtttgagttcattgtagattctggatatcagtcctttgtcagatgagtaggttgcgaaaattttctcccattttgtaggttgcctgttcactctgatggtagtttcttttgctgtgcagaagctctttagtttaattagatcccatttgtcaattttggcttttgttgccattgcttttggtgttttggacatgaagtccttgcccatgcctatgtcctgaatggtaatgcctaggttttcttctagggtttttatggttttaggtctaacgtttaaatctttaatccatcttgaattgatttttgtataaggtgtaaggaagggatccagtttcagctttctacatatggctagcgagttttcccagcaccatttattaaatagggaaccctttccccattgcttgtttttctcaggtttgtcaaagatcagatagttgtagatatgcggcgttatttctgagggctctgttctgttccattgatctatatctctgttttggtaccagtaccatgctgttttgggtactgtagccttgtagtatagtttgaagtcaggtagtgtgatgcctccagctttgttcttttggcttaggattgacttggcgatgcgggctgttttttggttccatatgaactttaaagtagttttttccaattctgtgaagaaagtcattggtagcttgatggggatggcattgaatctgtaaattaccttgggcagtatggccattttcacgatattgattcttcctacccatgagcatggcatgttcttccatttgtatgtatcctcttttatttccttgagcagtggtttgtagttctccttgaagaggtccttcacatcccttgtaagttggattcctaggtattttattctctttgaagcaattgtgaatgggagttcactcatgatttggctctctgtttgtctgttattggtgtataagaatgcttgtgatttttgtacattgattttgtatcctgagactttgctgaagttgcttatcagcttaaggagattttgggctgagacaatggggttttctagatatacaatcatgtcgtctgcaaacagggacaatttgacttcctcttttcctaattgaataccctttatttccttctcctgcctaattgccctggccagaacttccaacactaagttgaataggagtggtgagagagggcatccctgtcttgtgccagttttcaaagggaatgcttccagtttttgcccattcagtatgatattggctgtgggtttgtcatagatagctcttattattttgaaatacgtcccatcaatacctaatttattgagagtttttagcatgaagggttgttgaattttgtcaaaggctttttctgcatctattgagataatcatgtggtttttgtctttggctctgtttatatgctggattacatttattgatttgcgtatattgaaccagccttgcatcccagggttgaagcccacttgatcatggtggataagctttttgatgtgctgctggattcgttttgccagtattttattgaggatttttgcatcaatgttcatcaagtatattggtctaaaattctcttttttggttgtgtctctgcctggctttggtatcagaatgatgctggccttataaaatgagttagggaggattccctctttttctattgattggaatagtttcagaaggaatggtaccggttcctccttgtacctctggtagaattcggctgtgaatccatctggtcctggactctttttggttggtaaactattgattattgccacaatttcagctcctgttattggtctattcagagattcaacttcttcctggtttagtcttgggagagtgtatgtgtcaaggaatatatccatttcttctagattttctagtttatttgcgtagaggtgtttgtagtattctctgatggtagtttgtatttctgtgggatctgtgatgatatcccctttatcattttttattgtgtctatttgattcttctctctttttttctttattagtcttgctagcggtctatcaattttgttgatcctttcaaaaaaccagctcctggattcattgattttttgaagggttttttgtgtctctatttccttcagttctgctctgattttagttatttcttgccttctgctagcttttgaatgtgtttgctcttgcttttctagttcttttaattgtgatgttagggtgtcaattttggatctctcctgctttctcttgtgggcatttagtgctataaatttccctctacacactgctttgaatgcgtcccagagattctggtatgtggtgtctttgttctcgttggtttcaaagaacatctttatttctgccttcatttcgttatgtacccagtagtcattcaggagcaggttgttcagtttccatgtagttgagtggctttgagtgagattcttaatcctgagttctagtttgattgcactgtggtctgagagatagtttgttataatttctgttcttttacatttgctgaggagagctttacttccaactctgtggtcaattttggaataggtgtggtgtggtgctgaaaaaaatgtatattctgttgatttggggtggagagttctgtagatgtctattaggtccacttggtgcagagctgagttcaattcctgggtatccttgttgactttctgtctctttgatctgtctaatgttgacagtggggtgttaaagtctcccattattaatgtgtgggagtctaagtctctttgtaggtcactcaggacttgctttatgaatctgggtgctcctgtattgggtgcatatatatttaggatagttagctcttcttgttgaattgatccctttaccattatgtaatggccttctttgtctcttttgatctttgttggtgtaaagtctgttttatcagagactaggattgcaacccctgcctttttttgttttccatttgcttggtagatcttcctccatccttttattttgagcctatgtatgtctctgcacgtgagatgggtttcctgaatacagcacactgatgggtcttgactctttatccaatttgccagtctgtgtcttttaattggagcatttagtccatttacatttaaagttaatattgttatgtgtgaatttgatcctgtcattatgatgttagctggtgattttgctcattagttgatgcagtttcttcctagtctcgatggtctttacattttggcatgattttgcagcggctggtaccggttgttcctttccatgtttagcgcttccttcaggagctcttttagggcaggcctggtggtgacaaaatctgtcagcatttgcttgtctgtaaagtattttatttctccttcacttatgaagcttagtttggctggatatgaaattctgggttgaaaattcttttctttaagaatgttgaatattggcccccactctcttctggcttgtagggtttctgccgagagatccgctgttagtctgatgggcttccctttgagggtaacccgacctttctctctggctgcccttaacattttttccttcatttcaactttggtgaatctgacaattatgtgtcttggagttgctcttctcgaggagtatctttgtggcgttctctgtatttcctgaatctgaacgttggcctgccttgctagattggggaagttctcctggataatatcctgcagagtgttttccaacttggttccattgtccccatcactttcaggtacaccaatcagacgtagatttggtcttttcacatagtcccatatttcttggaggctttgctcatttctttttattcttttttctctaaacttcccttctcgcttcatttcattcatttcatcttccattgctgataccctttcttccagttgatcgcatcggctcctgaggcttctgcattcttcacgtagttctcgagccttggttttcagctccatcagctcctttaagcacttctctgtattggttattctagttatacattcttctaaatttttttcaaagttttcaacttctttgcctttggtttgaatgtcctcccgtagctcagagtaatttgatcgtctgaagccttcttctctcagcttgtcaaagtcattctccatccagctttgttccgttgctggtgaggaactgcgttcctttggaggaggagagacactctgcgttttagagtttccagtttttctgttctgttttttccccatctttgtggttttatgtacttttggtctttgatgatggtgatgtacagatgggttttcggtgtggatgtcctttctgtttgttagttttccttctaacagacaggaccctcagctgcaggtctgttggaataccctgcgatgtgaggtgtcagtgtgcccctgctggggggtgcctcccagttaggctgctcgggggtcaggggtcagggacccacttgaggaggcagtctgcccgttctcagatctccagctgcgtgctgggagaaccactgctctcttcaaagctgtcagacagggacatttaagtctgcagaggttactgctgtctttttgtttgtctgtgccctgccctcagaggtggagcctacagaggcaggcaggcctccttgagctgtggtgggctccacccagttcgagcttcctggctgctttgtttacctaagcaagcctgggcaatggcgggcgcccctcccccagcctcactgccgccttgcagtttgatctcagactgctgtgctagcaatcagcgagattccgttggcgtaggaccctctgagccaggtgtgggatataatctcgtggtgcgccgttttttaagccggtctggaaagggcaatattcgggtgggagtgacccgattttccaggtgcgtccgtcaccgctttctttgactgggaaagggaactccctgaccccttgcgcttcccaagtgaggcaatgcctcgccctgcttcggctcgcgcacggtgcgcgcacccactggcctgcacccactgtctggcactccctagtgagatgaacccggtacctcagatggaaatgcagaaatcacccgtcttctgcgtcgctcatgctgggagctgtagaccggagctgttcctattcggccatcttggctcctcctcgc

SEQ ID NO: 10341 - DNA, 4944 bp, Homo sapiens
ttttgttttttttattttttattttttttaaattatactttaagttttagggtatgtgtgcacaacatgcaggtttgttacatatgtatacatgtgccatgttggtgtctgcacccattaactcgtcatttaacattaggtatatctcctaatgctatccctcccccctccccccaccccacaacaggctcctgtgtgtgatgttccccttcctgtgtccatgtgttctgattgttcagttcccacctatgagtgagaacatgtggtgtttggttttttgtccttgcgatagtttgctgagaatgatggtttccagcttcatccatgtccctacaaaggacgtgaactcatccttttttatggctgcatagtattccatggtgtatatatgccacattttcttaatccagtctatcattgttggacatttgggttggttccaagtctttgctattgtgaatagtgccgcgataaacatacgtgtgcatgtgtctttagagcagcatgatttagaatcctttgggtatatacccagtaacgggatggctgggtcaaatggtatttcccattctagatccctgaggaatcgccacactgacatccacaatggttgaactagtttacagtcccaccaacagtgtaaaagtgttcctatttctccacatcctctccagcacctgttgtttcctgactttttaatgatcgccattctaactggtgtgagatggtatctcattgtggtttcaatttgcatttctctgatggccagtgatgatgagcattttttcatgtgtcttttggctgcataaatatcttcttttgagaagtgtctgttcatatcctttgcccactttttgatggggttgtttgtttttttcttgtaaatttgtttgagttcattgtagattctggatattagccctttgtcagatgagtagattgcaaaaattttctcccattctgtaggttgcctgttcactctgatggtagttgcttttgctgtgcagaagctctttagtttaattagatcccatttgtcaatattggcttttgttgctgttgcttttggtgctttagatatgaagtccttgcccatgcctatgtcctgaatgatattgcctaggttttcttctagggtttttatggttttaggtctaacatgtaagtctttaatccatcttgaattaatttttgtataaggtgtaaggaagggatccagtttcagctttctacacatggctagccagttttcccagcaccatttattaactagggaatcgtttccccattgcttgtttttgtcaggtttgtcaaagatcacatggttgtagatatgtggcattatttctgagggctctgttctgttcccttgatctatacctctgttctggtaccagtaccatgctattttggttactgtagccttgtagtatactttgaagtcaggtagcatgatgcctccagctttgttcttttggcttaggattgacttggcaatgtgggctcctttttggttccatatgaactttaaagtagttttttccaattctgtgaagaaagtcattggtagcttgatggggatggcattgaatctataaattacattgggcagtatggccattttcatgatattgattcttcctacccatgagcatggaatgttcttccatttgtttgtatcctcttttatttcattgagcagtggtttgtaattctccttgaagaggtccttcacgtcccttgtaagttggattcctaggtattttattctctttgaagcaattgtgaatgggagttcactcatgatttggctctctgtttctctgttattggtgtataagaatgcttgtgatttttgcacattgattttgtatcctgagactttgctgaagttgcctatcagcttaaggagattttgtgctgagacgatggggttttctagatatacaatcatgtcatctgcaaacagggacaatttgacttcctcttttcctacttgaataccctttatttccttctcctgcctgattgccctggccagaacttccaacactatgttgaataggagtggtgaaagagggcatccctgtcttgtgccagttttcaaagggaatgcttccagtttttgcccattcagtatgatattggctgtgggtttgtcatggatagctcttattattttgagatacatcccatcaatacctaatttattgagagtttttagcatgaagggttgttgaattttgtcaaaggccttttctgcatctattgagataatcatgtggtttttgtctttggttctgtttatatgctggattacatttattgatttgcgtatattgaaccagccttgcatcccagggattaagccgacttgatcatggtggataagctttttgatgtgctgctggattcagtttgccagtattttattgaggatttttgcatcgatgttcatcagggatattggtctaaaattctcttttttggttgtgtctctgccaggctttgggatcaggatgatgctggcctcataaaatgagttagggaggattccctctttttctattgactggagtagtttcagaaggaatggtaccagctcctccttgtacctctggtagaatttggctgtgaatccatctggtcctggactttttttggttggtaagctattaattattgcctcagtttcagagcctgttattggtctattcagagattcaacttcttcctggtttagtcttgggagggtgtatgtgtctaggaatttatccatttcttctagattttccagtttatttgcatagaggtgtttatagtattctctgatggtagtttgtatttctgtgggatcagtggtgatctcccctttatcattttttattgcgtctatttgattcttctctcttttcttctttattagtcttgctagtggtctatcaattttgttgatcttttcaaaaaaccagctcctggattcactgatttttttgaagggttttttggtgtctctatttccttcagttctgctctgatcttagttatttcttgccttctggtagcttttgaatgtgtttgctcttgcttctctagttcttttaattgtgatgttagggtgtcaattttagatctttcctgctttctcttgtgggcatttagtgctataaatttccctctacacactgctttgaatgtgtcccagagattctggtatgttgtgtctttgttctctttggtttcaaagaacatctttatttctgccttcatttcgttatgtagtcagtagtcattcaggagcagttgttcagtttccatgtagttgagtggttttgagtgagtttcttaatcctgagttctagtttgattgcactgtggtctgagaggcagtttgttttaatttctgttcttttacatttgctgaggagtgctttacatccagctatgtggtcaattttggaataagtgtggtgtggttctgagaagaatgtacattctgttgatttggggtggagagttctgtagatgtctattaggtctgcttggtgcagagctgagttcaattcctggatatccttgttaactttctgtctcgttgatctatctaatgtttacagtggggtgttaaagtctcccattattattgtgtgggagtctaagtctctttgtaggtctctaagaacttgctttatgaatctgggtgctcatgtactgggtgcatatatatttaggatagttagcttttcttgttgaattgatccctttaccattatgtaatggccttctttgtctcttttgatctttgttggtttaaagtctgttttatcagagactaggattgcaacccctgcctttttttgttttccatttgcttggtagatcttcctccatccctttattttgagcctatgtgtgtctgtgcacgtgagatgggtttcctgaatacagcacactgatgggtcttgactctttatccaatttgccagtctgtgtcttttaattggagcatttagcccatttacatttaaggttaatattgttatgtgtgaatttgatcctgtcattatgatgttagctggttattctgctcattagttgatgcagtttcttcctagcctcaatggtctttacaatttggcatgtttttgcagtggctggtatcagttgttcctttccatatttagtgcttccttcaggagctcttttagggcaggcctggtggtgacaaaatctctcagcatttgcttgtctgtaaaggattttatttctccttcacttatgaagcttagtttggctggatatgaaattctgggttgaaaattcttttctttaagaatgttgaatattggcccccgctctcttctggcttgtagagtttctgccgagagatcagctgttagtctgttgggcttccctttgtgggtaacccgacctttctctctggctgcccttaacattttttccttcatttcaactttggtgaatctgacaattatgtgtcttggagttgctcttctcgaggagtatctttgtggcattctctgtatttcctgaatttgaatgttggcctgccttgctagatgggggaagttctcctgtatgatatcctgaagagtgttttccagcttggttccattctccctgtcactttcaggtacaccaatcagacgtagatttggtcttttcatgtagtcccatatttcttggaggctttgttcatttctttttattcttttttctctaaacttctcttttcactgcatttcattcatttgatcttccatcactgatcccctttcttccagttgatcgaatcggctactgaggcttgtgcattcatcacgtagttctcgtgccttggttttcagctccatcaggtcctttaaggacttctctgcatggttattccagttagccattcgtctaattttttttcaaggtttt

SEQ ID NO: 10342 - DNA, 9130 bp, Homo sapiens
ggtgtatatgtgccgcattttcttaatccagcctatcattgatggatatttgggttggttccaagtcgtctttgctattgtgaatagtccgcaataaacatacgtgtgcatgtgtctttatagtaaaatgatttgtaatcctttgggtatatacccagtaatgggattactgggtcaaatggtatttctagttctagatccttgaggaatcaccacactgtcttccacaatggttgaactaatttacacgcccatcaacagtgtaaaagagttcctatttctccacatcctctccagcatctgttgttacctgactttttaatgattgccattctaactggtgtgagatggtatctcattgtggttttgatttgcatttctctgacgacctgtgatgatgagcattttttcatgtgtctgttggctgcataaatgtcttcttttgagatgtgtctgttgatatcctttgcccacttttttgatggggttgtttgattttttcttgtaaatttgtttaagttctttgtggattctggatattagccctttgccaagtgggtagactgcaaaaattttctcccattctgtaggtttcctgttcactctgatgatagtttcttttgctgtgcagaaggtctttagtttaattagattttacttgtctattttggcttttgttgccattgcttttggtgtttcagtcatgaagtctttgaccatgcctatgtcctgaatggtattgcttaggttttcttctagggtttttatggttttaggtcttacatttaggtctttaatccatcttgaattaatttttctataaggtataaggaagggatccagtttcagctttctgcatatggctagccagttttctcaacaccatttattaaatagggaatcctttccccactgcttgtttttgtcaggtttgtcaaagatcagatggttgtagatatgtggtgttacttctgaggcctctgttctgttccattggtctatatatctgttttggtaccagtaccatgctgtttttttaaaatgtagccttgtagtatagtttgaagtcaggtagcatgatgcctccagctttgttctttttgcttaggattgtcttggcaatgcagcctcttttttggttccatatgcattttagagtagttttttccaattctgtgaagaaagtcattggtagcttgatggggatggcattgaatctataaatcaccttgggcagtatggccattttcatgatattgaggcttcctatccatgagcatggaatgttcttccatttgtttttgtcctcttttattttgttgaggagtggtttgtagttctccttgaagaggtctttcacatcccttgtaagttggattcctaggtattttattctctttgtagcaatcgtgaatgcgagttcactcatgatttggttctctgtctgttattggtgtacaggaatgcttgtgatttttgcacattgattttgtattctgagactttgctgaagttccttatcagcttaaggagatttggggctgagacgatgggattttctaaatatacaatcatgtcatctgcaaacagggacaatttgacttcttcttttcctacctgaatacgcatcatttctttctcttgcctgattgccctggccagagcttccattaatatgttgaataggagtggtgagagagggcatccttgtcttgtgccggttttcaaagggaatgcttccagtttttgcccattcagtatgatattggctgtgggtctgtcataaatagctcttattattttgagatacattccatcaatacctagtttattgagagtttttagtatgaagagctgttgaattttgtcgaaggtattttctgcatctattgagataatcatgtggtttttgtcattggttctgtttatgcgatggattacatttattgatttgcttatgttaaacaagatttgcatcccagagatgaagccgacttgatcatggtggataagctttttgatgtgctgcgggattcggcttgccagtattttactgaggattttcacatcaatattcatcagggatattggtctaaaattctttttttttgttgtttctctgccaggctttggtatcgggatgatgttggcctcaaaataagttagagagggttccttctttttctattgattggaatagtttcagaaggaatggtaccagctcctctttgtgcctcttgtagaattcggctgtgaatccatctggtcctggactttttttggttggtaggctattaattattgcctcaatttcagaacctgttattggtctattcagagattcaacttcttcctgatttagtcttgggagggtgtatgtgtccaggaatttatccattttttctagattttctagtttctttcatagaggtatttatagtattctctgatggtagtttgtatttctgtgggattagtggtgatatcccctttatcattttttattatgtctatttgattcttctctcttttcttccttattaatcttgctagtggtatattttgttgatcttttcaaaaaaccagctcctggattcgttgatttttttgaaggttttttttttgtgtctctacctccttcagttctgctctgatcttagttattttttgccttctgctagcttttgaatttgtttgctcttgcttctctagttcttttaattgtggtgttagggtgtggattttagatcttttttgctttctcttgtggacatttagtgctataaattcccctctacactttgttttaaatgtgtcccagagattctagaacgttgtgtctttgttctcatttgtttcaaataacttatttctttctttttttttatggcttaacatatttttaatacgtttaggtgaaaatagtgtttcgtttctatgaggctgcatctgttttttgtttttgtttttgtttttaattttattattattatactttaagttttagggtacatgtgtacaatgtgcaggttagttacatatgtatacatgtgccatgctggtgtgctgcacccattaactcatcatttagcattaggtatatctcctaatgctatccctcccccgtccccccaccccacaacagtccccagagtgtgatgttccccttcctgtgtccatgtgttctcattgttcaattcccacctatgagtgagaatatgcggtgtttggttttttgttcttgcgatagtttactgagaatgatgatttccaatttcatccatgtccctacaaaggacatgaacttctcattttttatggctgcatagtattccatggtgtatatgtgccacattttcttaatccagtctatcattgttggacatttgggttggttccaagtctttgctatcgtgaatagtgccgcaataaacatacgtgtgcatgtgtctttatagcagcatgatttatagtcctttgggtatatacccagtaatgggatggctgggtcaaatggtatttctacttctagatccctgaggaatcgccacactgacttccacaagggttgaactagtttacagtcccaccaacagtgtaaaagtgttcctatttctgcacatcctgtccagcacctgttgtttcctgactttttaatgattgccattctaactggtgtgaggtggtatctcattgtggttttgatttgcatttctctgatggccagtgatgatgagcattttttcatgtgtcttttggctgcataaatgtcttcttttgagaagtgtctgttcatatccttcacccactttttgatggggttgtttgtttttttcttgtaaatttgtttgagttcattgtagtttctggatattagccctttgtcagatgagtaggttgtgaaaattttctcccattttgtaggttgcctgttcactctgatggtagtttcttttgctgtgcagaagctcttgagtttaattacatcccatttgtcaattttggcttttgttgccactgcttttggtgttttagacatgaagtccttgcccatgcctatgtcctgaatggtaatgcctaggttttcttctagggtttttatggttttaggtctaacgtttaagtctttagtccatcttgaattagtttttgtataaggtgtaaggaagggatccagtttcagctttctacatatggctagccagttttcccagcaccatttattaaatagggaatcctttccccattgcttgtttttctcaggtttatcaaagatcagatagttgtagatatgtggtgttatttctgagggctctgttctgttccattggtctatatctctgttttgataccagtaccatgctgttttggctactgtagccttgtagtatagtttgaagtcaggtagcgtgatgcctccagctttgttcttttggcttaggattgacttggcgatgcgggctcttttttggttccatatgaacttgaaagtagttttttccaattctgtgaagaaagtcattggtagcttgatggggatggcattgaatctataaattaccttgggcagtatggccattttcatgatattgatccttcctacccatgagcatgggatgttcttccatttgtttgtatcctcttttatttcattgagcagtggtttgtagttctccttgaagaggtccttcccatcccttgtaagttggattcctaggtattttattctctttgaagcaattgtgaatgggagttcactcatgatttggctctctgtttgtctgttgttggtgtataagaatgcttgtgatttttgtacattgattttgtatcctgagactttgctgaagttgcttatagcttaaggagattttgggctgagacaatgaggttttctagatatacaatcatgtcatctgcaaacagggacaatttgacttcctcttttcctaattgagtaccctttatttccttctcctgcctaattgccctggccagaacttccaacactatgttgaataggagcggtgagagagggcatccctgtcttgtgccagttttcaaagggaatgcttccagtttttgcccattcagtatgatattggctgtgggtttgtcatacatagctcttattattttgagatatgtcccatcaatacctaatttattgagagtttttagcatgaagggttgttgaattttgtcaaagcccttttctgcatgtattgagataatcatgtggtttttgtctttggttctgtttctatgctggattacatttattgatttgcgtatattgaaccagccttgcatgccagggatgaagcccacttaatcatggtggacaagctttttgacgtgctgctggattcggtttgccagtattttattgaggatttttgcatcaatgttcatcaaagatattggtctaaaattctcttttttggttgtgtctctgcccggctttggtatcaggatgaagctggcctcataaaatgagttagggaggattccctctttttctatggattggaatagtttcagaaggaatggtgccagttcctccttgtacctctggtagaattcggctgtgaatccatctggtcctggactctttttggttggtaagctattgattattgccacaatttcagagcctgttattggcctattcagagagtcaacttcttcctggtttagtcttgggagggtgtatgtgtcaaggaatttatccatttcttctagatattctagtttatttgcgtagaggtgtttatagtattctctgatggtagtttgtatttctgtgggatcggtagtgatatcccctttatcattttttattgcgtctatttggttcttctctcttttcttctttattagtcttgctagtggtctatcaattttgttgatcctttcaaaaaaccagctcctggattcattaatttttgaagggttttttgtgtctctatttccttcagttctgctcggattttagttatttcttgccttctgctagcttttgaatgtgtttgctcttgcttctctagttcttttaattgtgatgttagggtgtcaattttggatctttcctgctttctcttgtgggcatttagtgctataaatttccctgtacacactactttgaatgtgtcccagagattctggtatgttgtgtctttgttctcgttggtttcaaagaacatctttatttctgccttcatttcgttatgtacccagtagtcattcaggagcaggttgttcagtttccatgtagttgagtggttttgagtgagtttcttaatcctgagttctagtttgattgcactgtggtctgagagatagtttgttataatttctgttcttttacatttgctgagaagagctttactaccaactatgtggtcaattttggaataggtgtggtgtggtgctgaaaaaaatgtatattctgttgatttggggtggagagttctgtagatgtctattaggtctgcttggtgcagagctgagttcagttcctgggtatccttgttaactttctgtctcgttgatctgtctaatgttgacagtggggtgttaaagtctccgattattaatgtgtgggagtctaagtctctttgtaggtcactccggacttgctttatgaatctgggtgctcctgtactgggtgcatatgtatttaggatagttagctcttcttgttgaattaatccctttacgattatgtaatggccttctttgtcttttaggatctttgttggtttaaagtctgttttatcagagactaggattgcaacccctgcctttttctgttttccatttgcttggtagatcttcctccatccttttattttgagcctatgtgtgtctctgcacgtgagatgggttcctgaatacagcacactgatgggtcttgcctctttatccaatttgccagtctgtgtcttttaattggagcatttagtccatttacatttaaagttaatattattatgtgtgaatttgatcctgtcattatgatattagctggttattttgccagttggttgatgcagtttcttcctagcctcgatggtctttacaatttgacatgattttgcagtggctggtaccggtttttcctttccatgtttagtgcttccttcaggagctcttgtagggcaggcctggtggtgacaaaatctgtcagcatttgcttgtctgtaaaggattttatttctccttcacttatgaagcttagtttggctggatatgaaattctgggttgaaaattcttttctttaagaatgttgaatattggcccccactctcttctggcttgtagagtttctgccgagagatccactgttagtctgatgggcttccctttatgggtaacccaacctttctctctggctgcccttaacattttttccttcatttcaactttggtgaatctgacaattatgtgtcttggagttgctcttctcgaggagtatctttgtggcgttctctgtatttcctgaatctgaatgttggcctgccttgctagattggggaagttctcctggataatatcctgcagagtgttttccaacttggttccattctccccgtcactttcatgtacaccagtcagacgtagatttggtcttttcacatagtcccatatttcttggaggctttgttcatttctttttattcttttttctctaaacttcccttctcgcttcatttcattcatttcatcttccatcactgatacactttcttccagttgattgcatcggctcctgaggcttctgcattcttcacgtagttcttgagccttggctttcagctccatcagctcctttaagcacttctctgtattggttattctagttatacattcgtcttaatttttttcagttttcaacttctttgcctttggtttgaatttcctcctgtagcttggagtagtttgatcatctgaagccttcttctctcaactcatcgaagtcattctccgtccagctttgttccgttgctggtgaggagctgcgttcctttggaggaggagaggcactctgctttttagagtttccagtttttctgttctgttttttccccatcttggtggttttatctacttttggtctttgatgatggtgatgtacagatgggtttttggtgtggatgtcctttctgtttgttagttttccttctaacagacaggaccctcagttgcaggtctgttggagtttgctagaggtccactccagaccctgtttgcctgggtaccagcagtggtggctgcagaacagtggattttcgtgaaccgcgaatgctgctgtctgatcattcctctggaagttttgtctcagaggagtacccggcagtgtgagacgtcagtctgcccctactggggggtgcctcccagttaggctgctcaggggtctggggtcagggacccacttgaggaggcagtctgcccgttctcagatctccagctgcatgctgggagaaccactgctctcttcaaagctgtcagacagggacatttaagtctgcagaggttactgctgtctttttgtttgtctgtgccctgcccccagaggtggtgcctactgaggcaggcaggcctccttgagctgtggtgggctccacccagttcgagcttcctggctgctttgtttacctaagcaagcctgggcaatggcaggcacccctcccccagcctcgctgccaccttgcagtttgatctcagactgctgttctagcaatcagcgagactccctgggcataggaccctctgagccaggtgcgggatacaatctcctggtgtgccattttttaaacctgttggaaaagcgcagtattggggtgggagtgacctgattttccaggtgccatctgtcacctctttcttcgactaggaaagggaactccccgaccccttgtgcttcccgagtgaggcaatgcctcgccctgcttcagcttgcgcatggtgcactgcacccactgtcctgagcccactgtctggcactccctagtgagatgaaccccgtacctcagatggaaatgcagaaatcacccatcttctgcgtcactcacactgggaactgtagaccggagctgttcctattcggccatcttgactccagcc

SEQ ID NO: 10343 - DNA, 9130 bp, Homo sapiens
ggtgtatatgtgccgcattttcttaatccagcctatcattgatggatatttgggttggttccaagtcgtctttgctattgtgaatagtccgcaataaacatacgtgtgcatgtgtctttatagtaaaatgatttgtaatcctttgggtatatacccagtaatgggattactgggtcaaatggtatttctagttctagatccttgaggaatcaccacactgtcttccacaatggttgaactaatttacacgcccatcaacagtgtaaaagagttcctatttctccacatcctctccagcatctgttgttacctgactttttaatgattgccattctaactggtgtgagatggtatctcattgtggttttgatttgcatttctctgacgacctgtgatgatgagcattttttcatgtgtctgttggctgcataaatgtcttcttttgagatgtgtctgttgatatcctttgcccacttttttgatggggttgtttgattttttcttgtaaatttgtttaagttctttgtggattctggatattagccctttgccaagtgggtagactgcaaaaattttctcccattctgtaggtttcctgttcactctgatgatagtttcttttgctgtgcagaaggtctttagtttaattagattttacttgtctattttggcttttgttgccattgcttttggtgtttcagtcatgaagtctttgaccatgcctatgtcctgaatggtattgcttaggttttcttctagggtttttatggttttaggtcttacatttaggtctttaatccatcttgaattaatttttctataaggtataaggaagggatccagtttcagctttctgcatatggctagccagttttctcaacaccatttattaaatagggaatcctttccccactgcttgtttttgtcaggtttgtcaaagatcagatggttgtagatatgtggtgttacttctgaggcctctgttctgttccattggtctatatatctgttttggtaccagtaccatgctgtttttttaaaatgtagccttgtagtatagtttgaagtcaggtagcatgatgcctccagctttgttctttttgcttaggattgtcttggcaatgcagcctcttttttggttccatatgcattttagagtagttttttccaattctgtgaagaaagtcattggtagcttgatggggatggcattgaatctataaatcaccttgggcagtatggccattttcatgatattgaggcttcctatccatgagcatggaatgttcttccatttgtttttgtcctcttttattttgttgaggagtggtttgtagttctccttgaagaggtctttcacatcccttgtaagttggattcctaggtattttattctctttgtagcaatcgtgaatgcgagttcactcatgatttggttctctgtctgttattggtgtacaggaatgcttgtgatttttgcacattgattttgtattctgagactttgctgaagttccttatcagcttaaggagatttggggctgagacgatgggattttctaaatatacaatcatgtcatctgcaaacagggacaatttgacttcttcttttcctacctgaatacgcatcatttctttctcttgcctgattgccctggccagagcttccattaatatgttgaataggagtggtgagagagggcatccttgtcttgtgccggttttcaaagggaatgcttccagtttttgcccattcagtatgatattggctgtgggtctgtcataaatagctcttattattttgagatacattccatcaatacctagtttattgagagtttttagtatgaagagctgttgaattttgtcgaaggtattttctgcatctattgagataatcatgtggtttttgtcattggttctgtttatgcgatggattacatttattgatttgcttatgttaaacaagatttgcatcccagagatgaagccgacttgatcatggtggataagctttttgatgtgctgcgggattcggcttgccagtattttactgaggattttcacatcaatattcatcagggatattggtctaaaattctttttttttgttgtttctctgccaggctttggtatcgggatgatgttggcctcaaaataagttagagagggttccttctttttctattgattggaatagtttcagaaggaatggtaccagctcctctttgtgcctcttgtagaattcggctgtgaatccatctggtcctggactttttttggttggtaggctattaattattgcctcaatttcagaacctgttattggtctattcagagattcaacttcttcctgatttagtcttgggagggtgtatgtgtccaggaatttatccattttttctagattttctagtttctttcatagaggtatttatagtattctctgatggtagtttgtatttctgtgggattagtggtgatatcccctttatcattttttattatgtctatttgattcttctctcttttcttccttattaatcttgctagtggtatattttgttgatcttttcaaaaaaccagctcctggattcgttgatttttttgaaggttttttttttgtgtctctacctccttcagttctgctctgatcttagttattttttgccttctgctagcttttgaatttgtttgctcttgcttctctagttcttttaattgtggtgttagggtgtggattttagatcttttttgctttctcttgtggacatttagtgctataaattcccctctacactttgttttaaatgtgtcccagagattctagaacgttgtgtctttgttctcatttgtttcaaataacttatttctttctttttttttatggcttaacatatttttaatacgtttaggtgaaaatagtgtttcgtttctatgaggctgcatctgttttttgtttttgtttttgtttttaattttattattattatactttaagttttagggtacatgtgtacaatgtgcaggttagttacatatgtatacatgtgccatgctggtgtgctgcacccattaactcatcatttagcattaggtatatctcctaatgctatccctcccccgtccccccaccccacaacagtccccagagtgtgatgttccccttcctgtgtccatgtgttctcattgttcaattcccacctatgagtgagaatatgcggtgtttggttttttgttcttgcgatagtttactgagaatgatgatttccaatttcatccatgtccctacaaaggacatgaacttctcattttttatggctgcatagtattccatggtgtatatgtgccacattttcttaatccagtctatcattgttggacatttgggttggttccaagtctttgctatcgtgaatagtgccgcaataaacatacgtgtgcatgtgtctttatagcagcatgatttatagtcctttgggtatatacccagtaatgggatggctgggtcaaatggtatttctacttctagatccctgaggaatcgccacactgacttccacaagggttgaactagtttacagtcccaccaacagtgtaaaagtgttcctatttctgcacatcctgtccagcacctgttgtttcctgactttttaatgattgccattctaactggtgtgaggtggtatctcattgtggttttgatttgcatttctctgatggccagtgatgatgagcattttttcatgtgtcttttggctgcataaatgtcttcttttgagaagtgtctgttcatatccttcacccactttttgatggggttgtttgtttttttcttgtaaatttgtttgagttcattgtagattctggatattagccctttgtcagatgagtaggttgtgaaaattttctcccattttgtaggttgcctgttcactctgatggtagtttcttttgctgtgcagaagctcttgagtttaattacatcccatttgtcaattttggcttttgttgccactgcttttggtgttttagacatgaagtccttgcccatgcctatgtcctgaatggtaatgcctaggttttcttctagggtttttatggttttaggtctaacgtttaagtctttagtccatcttgaattagtttttgtataaggtgtaaggaagggatccagtttcagctttctacatatggctagccagttttcccagcaccatttattaaatagggaatcctttccccattgcttgtttttctcaggtttatcaaagatcagatagttgtagatatgtggtgttatttctgagggctctgttctgttccattggtctatatctctgttttgataccagtaccatgctgttttggctactgtagccttgtagtatagtttgaagtcaggtagcgtgatgcctccagctttgttcttttggcttaggattgacttggcgatgcgggctcttttttggttccatatgaacttgaaagtagttttttccaattctgtgaagaaagtcattggtagcttgatggggatggcattgaatctataaattaccttgggcagtatggccattttcatgatattgatccttcctacccatgagcatgggatgttcttccatttgtttgtatcctcttttatttcattgagcagtggtttgtagttctccttgaagaggtccttcccatcccttgtaagttggattcctaagtattttattctctttgaagcaattgtgaatgggagttcactcatgatttggctctctgtttgtctgttgttggtgtataagaatgcttgtgatttttgtacattgattttgtatcctgagactttgctgaagttgcttatagcttaaggagattttgggctgagacaatgaggttttctagatatacaatcatgtcatctgcaaacagggacaatttgacttcctcttttcctaattgagtaccctttatttccttctcctgcctaattgccctggccagaacttccaacactatgttgaataggagcggtgagagagggcatccctgtcttgtgccagttttcaaagggaatgcttccagtttttgcccattcagtatgatattggctgtgggtttgtcatacatagctcttattattttgagatatgtcccatcaatacctaatttattgagagtttttagcatgaagggttgttgaattttgtcaaagcccttttctgcatgtattgagataatcatgtggtttttgtctttggttctgtttctatgctggattacatttattgatttgcgtatattgaaccagccttgcatgccagggatgaagcccacttaatcatggtggacaagctttttgacgtgctgctggattctgtttgccagtattttattgaggatttttgcatcaatgttcatcaaagatattggtctaaaattctcttttttggttgtgtctctgcccggctttggtatcaggatgaagctggcctcataaaatgagttagggaggattccctctttttctatggattggaatagtttcagaaggaatggtgccagttcctccttgtacctctggtagaattcggctgtgaatccatctggtcctggactctttttggttggtaagctattgattattgccacaatttcagagcctgttattggcctattcagagagtcaacttcttcctggtttagtcttgggagggtgtatgtgtcaaggaatttatccatttcttctagatattctagtttatttgcgtagaggtgtttatagtattctctgatggtagtttgtatttctgtgggatcggtagtgatatcccctttatcattttttattgcgtctatttggttcttctctcttttcttctttattagtcttgctagtggtctatcaattttgttgatcctttcaaaaaaccagctcctggattcattaatttttgaagggttttttgtgtctctatttccttcagttctgctcggattttagttatttcttgccttctgctagcttttgaatgtgtttgctcttgcttctctagttcttttaattgtgatgttagggtgtcaattttggatctttcctgctttctcttgtgggcatttagtgctataaatttccctgtacacactactttgaatgtgtcccagagattctggtatgttgtgtctttgttctcgttggtttcaaagaacatctttatttctgccttcatttcgttatgtacccagtagtcattcaggagcaggttgttcagtttccatgtagttgagtggttttgagtgagtttcttaatcctgagttctagtttgattgcactgtggtctgagagatagtttgttataatttctgttcttttacatttgctgagaagagctttactaccaactatgtggtcaattttggaataggtgtggtgtggtgctgaaaaaaatgtatattctgttgatttggggtggagagttctgtagatgtctattaggtctgcttggtgcagagctgagttcagttcctgggtatccttgttaactttctgtctcgttgatctgtctaatgttgacagtggggtgttaaagtctccgattattaatgtgtgggagtctaagtctctttgtaggtcactccggacttgctttatgaatctgggtgctcctgtactgggtgcatatgtatttaggatagttagctcttcttgttgaattaatccctttacgattatgtaatggccttctttgtcttttaggatctttgttggtttaaagtctgttttatcagagactaggattgcaacccctgcctttttctgttttccatttgcttggtagatcttcctccatccttttattttgagcctatgtgtgtctctgcacgtgagatgggttcctgaatacagcacactgatgggtcttgcctctttatccaatttgccagtctgtgtcttttaattggagcatttagtccatttacatttaaagttaatattattatgtgtgaatttgatcctgtcattatgatattagctggttattttgccagttggttgatgcagtttcttcctagcctcgatggtctttacaatttgacatgattttgcagtggctggtaccggtttttcctttccatgtttagtgcttccttcaggagctcttgtagggcaggcctggtggtgacaaaatctgtcagcatttgcttgtctgtaaaggattttatttctccttcacttatgaagcttagtttggctggatatgaaattctgggttgaaaattcttttctttaagaatgttgaatattggcccccactctcttctggcttgtagagtttctgccgagagatccactgttagtctgatgggcttccctttatgggtaacccaacctttctctctggctgcccttaacattttttccttcatttcaactttggtgaatctgacaattatgtgtcttggagttgctcttctcgaggagtatctttgtggcgttctctgtatttcctgaatctgaatgttggcctgccttgctagattggggaagttctcctggataatatcctgcagagtgttttccaacttggttccattctccccgtcactttcatgtacaccagtcagacgtagatttggtcttttcacatagtcccatatttcttggaggctttgttcatttctttttattcttttttctctaaacttcccttctcgcttcatttcattcatttcatcttccatcactgatacactttcttccagttgattgcatcggctcctgaggcttctgcattcttcacgtagttcttgagccttggctttcagctccatcagctcctttaagcacttctctgtattggttattctagttatacattcgtcttaatttttttcagttttcaacttctttgcctttggtttgaatttcctcctgtagcttggagtagtttgatcatctgaagccttcttctctcaactcatcgaagtcattctccgtccagctttgttccgttgctggtgaggagctgcgttcctttggaggaggagaggcactctgctttttagagtttccagtttttctgttctgttttttccccatcttggtggttttatctacttttggtctttgatgatggtgatgtacagatgggtttttggtgtggatgtcctttctgtttgttagttttccttctaacagacaggaccctcagttgcaggtctgttggagtttgctagaggtccactccagaccctgtttgcctgggtaccagcagtggtggctgcagaacagtggattttcgtgaaccgcgaatgctgctgtctgatcattcctctggaagttttgtctcagaggagtacccggcagtgtgagacgtcagtctgcccctactggggggtgcctcccagttaggctgctcaggggtctggggtcagggacccacttgaggaggcagtctgcccgttctcagatctccagctgcatgctgggagaaccactgctctcttcaaagctgtcagacagggacatttaagtctgcagaggttactgctgtctttttgtttgtctgtgccctgcccccagaggtggtgcctactgaggcaggcaggcctccttgagctgtggtgggctccacccagttcgagcttcctggctgctttgtttacctaagcaagcctgggcaatggcaggcacccctcccccagcctcgctgccaccttgcagtttgatctcagactgctgttctagcaatcagcgagactccctgggcataggaccctctgagccaggtgcgggatacaatctcctggtgtgccattttttaaacctgttggaaaagcgcagtattggggtgggagtgacctgattttccaggtgccatctgtcacctctttcttcgactaggaaagggaactccccgaccccttgtgcttcccgagtgaggcaatgcctcgccctgcttcagcttgcgcatggtgcactgcacccactgtcctgagcccactgtctggcactccctagtgagatgaaccccgtacctcagatggaaatgcagaaatcacccatcttctgcgtcactcacactgggaactgtagaccggagctgttcctattcggccatcttgactccagcc

SEQ ID NO: 10344 - DNA, 8190 bp, Homo sapiens
tttgttttgttttatccttttttttattattatactttaagttttagggtacatgtgcacaacgtgcaggttagttacatatgtatacatgtgccatgttggtgtgctgcacccagtaactcgtcatttaacattaggtatatctccaaaggctattcctcccccgccccccatcccacaacagtccctggtgtgtgatgttccccttcctgtgtccatgtgttctcactgttcaattcccacctatgagtgagaacatgtggtgtttggttttttgtccttgcaatagtttgctgagaatgatggtttccagcttcatccatgtccctacaaaggacatgaactcatcattttttatggctgcatagtattctatggtgtatatgtgccacattttcttaatccagtctatcatttttggacatttgggttggttccaattctttgctattgtgaatagtgtcacaataaacatacatgtgcatgtgtctttatagcaacatgatttataatcctttgggtatatacccagtaatgggatggctgggtcaaatggtatttctagttctagatccctgaggaagcgccacactgacttccacaagggttgaactagtttacagtcccaccaacagtgtaaaagtgttcctatttctccacatcctctccagcacctgttgtttcctgactttttaatgatcaccattctgactggtgtgagatggtatttcattgtggttttgatttgcatttctctgatggccagtgatgatgagcattttttcatgtgtcttttggctacataaatgtcttcttttgagaagtgtgtgttcatatcctttgcccactttttgtgatggggttttttgtttttttcttgtaaatttgttagagttcattgtagattctgggtattagccctttgtcagatgagtagattgcaaaaattttctcccattctgtaggttgcctgttcactctgatggtagtttcttttgctgtgcagaagctctttagtttaattagatcccatttgtcaattttggcttttgttgccattacttttggtgttttagacatgaagtccttgcccatgcctatgtcctgaatggtattgcctaggttttcttctagggtttttatggttttaggtctaacatttaagtctttaatccatcttgaattaatttttgtataaggtataaggaagggatccagtttcagctttctacatatggctagtcagttttcccagcaccatttattaaatagggaatcatttccccattgcttgtttttctcaggtttgtgaaagatcagatggttgtagatatgcggcattatttctgagggctctgttctgttccattggtctgtatctctgttttggtaccagtaccatgctgttttggttactgtagccttatggtatagtttgaagtcaggtagcgtgatgcctccagctttgttcttttgtcttaggattgacttggccatgcgggctcttttttggttccatatgaactttaaagaagttttttccaattctgtgaagaaagtcattggtagcttgatggggatggcattgaatctataaattaccttgagcagtatggccattttcacgatattgattcttcctacccatgagcatggaatgttcttccatttgtttgtatcctcttttgtttcattgagcagtggtttgtagttctccttgaagaggtccttcacgtcccttgtaaattggattcctaggtattttattctctttgaagcaattgtgaatgggagttcactcatgatttggctgtttgtctgttattggtgtttaagaatgcttggatttttgcacattgattttgtatcctgagactttgctgaagttgcctatcagcttaaggagattttgggctgagatgatggggttttctagatatataaatcatgtcatctgcaaacagggacaattcgacttcctcttttcttaattgaataccctttatttccttctcctgcctgattgccctggccagaacttccaacactatgttgaataggagtggtgagagagggcatccctgtcttgtgccggttttcaaagggaatgcttccagtttttgtccattcagtatgatattggctgtgggtttgtcatagatagctcttattattttgagatacgtcccatcaatacctaatttattgagagttttagttgttgaattttgtcaaaggccttttctgcgtctattgagataatcatatggtttttgtcgttggttctgtttatgtgctggattatgtttattgatttgtgtatgttgaaccagccttgcatcccagggatgaagccctcttgatcatggtggataagctttttgatgtgctactggattcggtttgccagtattttattgaggatttttgcatcgatgttcatcagggatattggtctaaaattctctttttttgttgtgtctctgccaggctttggtatcaggatgatgctggcctgataaaatgagttagggaggattccctctttttctattgattggaatagtttcagaaggaatggtaccagctcttccttgtacctctggtagaatttggctgtgaatccatctggtcctggactttttttggttggtaagctattaattattgcctcaatttcagagcctattattggtctattcagagattcaacttcttcctggtttagtcttgggagggtatatgtgtcgaggaatttatccatttcctctagattttctagtttatttgcgtagaggtgtttatagtattctctgatggtagtttgtatttctgtgggatcggtggtgatatcccctttatcattttttattgcttctatttgatccttctctcttttcttctttattagtcttgctagcggtctatcaattttgttgatcttttcaaaaaacaagctcctggattcattgatgttttgaagggttttttgtgtctctatctccttcagttctgctctgatcttagttatttcttgccttctgctagcttttgaatgtgtttgctcttgcttctctagttcttttaattgtgatgttagggtgtcaattttagatctttcctgctttctcttgtgggcatttagtgctgtaaatttccctctacacactgctttgaatgtgtcccagagattctggtatgttgtgtctttgttctcgttggtttcaaagaatatctttatttctgccttcatttcgttatgtacccagtagtcattcaggagcaggttgttcagtttccatgtagttgagcagttttgagtgagtttcttaatcctgagttctagtttgattgcactgtggtctgagagacagtttgtcataatttccattcttttacatttgctgagaagtgctttacttccaactatgtggtcagtttcggaataagtgcggtgtggtgctgagaagaacatatattctgttgatttggggtggagagttctgtaaatgtctattagatccacttagtgcagagctgagttcagttcctggatatccttgttaactttctgtctcgttgatctatctaatgttgacggtggggtgttaaagtctcccattattattgtgtgggagtctaagtctctttgtaggtcactaaggacttgctttatgaatctgggtgctcctgtattgggtgcatatatgtttaggatagttagctgttcttgttgaattgatccctttaccattatgtaatggccttctttgtctcttttgatctttgttggtttaaagtctgttttatgagagactaggattgcaacccctgcctttttttgttttccatttgcttggtagatcttcctccatccctttattttgagcctatgtgtgtctctgcacgtgagatgggtctcctgaatatagcacactgatgggtcttgactctttatccaatttgccagtctgtgtcttttaattggagcatttagtccatttacatttaaggttaatagttatgtgtgaatttgatcctgtgattatgatgttagctggttattttgctcgttagttgatgcagtttcttcctagcttcaatggtctttaaaatttggcatgtttttgcagtggctggtaccggttgttcctttccatgtttagtgcttccttcaggagctcttttagggcaggcctggtgatgacaaaatctctcagcatttgcttgtctgtaaagtattttatttctccttcacttatgaagcttagtttggctggatatgaaattctgggttgaaaattcttttctttttcttttcttttttttttttgagacagagtttcgctcttattgcccaggctggagtgcagtggtgtgatctgggctcactgcaacctccgccttctggtttcaagcgattctcctgcctcagcctcctgagtagctgggattacaggtgtctgccactacgcccgggtaatttttttttttgtatttttagtagagacagggtttcaacatgttggccaagctggtctcaaactccagacctcatgattctcccgccttggcctcccaaagtgctgggattacaggtgtgagccaccgcacccggcagaaaattcttttctttaagaatgttgaatattggcccccccactcttctggcttgtagggtttccgccgagagatcagctgttagtctgatgggcttccctttgtgggtaagccgacctttctctctggctgcccttaacattttttccttcatttcaactttggtgaatctgacaattatgtgtcttggagttgctcttctcgaggagtatctttgtggtgttctctgtatttcctgaatttgaatgttggcctgccttgctagattgaggaagttctcctgtataatatcctgcagagtgttttccaactcggttccattctccccgtcactttcaggtacaccaatcagacgtagatttggtcttttcacatagtcccatatttcttggaggctttgttcgtttctttttattcttttttctcagactgacacctcacacgggccgttactcctctgagacaaaacttccagaggaacgatcaggcagcgacatttgctgttcaccaatatccgctgttctgcaccctccgctgctgatacccaggcaaacagggtctggagtggacctccagcaaactccaacagacctgcagctgagggtcctgactgttagaaggaaaactaacaaacagaaaggccatccacaccaaaaacccatctgtacgtcaccatcatcaaagaccaaaggtagataaaaccacaaagatggggaaaaaacagagtagaaaaactggaaactctaaaaatcagagtgcctctcctcctccagaggaacacagctcctcaccagcaatggaacaaagctggacggagaatgactttgatgagttgagagaagaaggcttcagacgatcaaactactccgagctaaaggaggaagttcgaacccatggcaaagaagttaaaaaccttgaaaaaaaattagacgaatggctagctagaataaccaatgcagagaagtccttaaaggacctggtggagctgaaaaccaaggcacgagaactatgtgacgaatgcacaagcctcagtagccgattcaatcaactggaagaaatggtatcagtgatggaagatcaaacgaatgaaatgaagcgagaacagaatgtgtataaatgttaaccaaagacataaaataatgtttatagcaacttttttcataatagccccaaactaaaaactacccaaatgcacatcagccaaagaatggatacaaaaatgatggtatattcacgcaaggaaatactatatagcaatgtgttgggaggcagatctgcacagatcactcatgttcctgcatgggctaggccttctgaacaatgtttgaacagcagccttggatattgagatagtgcatccctctggagagatttagagacagttcagcgtaagaaacatagaaatgccccacccctccccacaaccaggagattgctgacattccagggtaatgaataatctctggctatggaggggaggacaggcaggtgtgtcagcaagttcacaacagcttagtctcctaattttagtttcttcccgcatgatgcaacccactgaacgcacaggaaatatctggcttcgtgtgagctggggcatgaggaattgatgcaaggtatagctctggctgctgattttgtggtaatcaatgatccatttttctgattcatgatcgtgtgtgtgtgtgtgtgtgtgtgtgtgtgtgtgtgtgtgttttgagacaaaatttcactctgtcacccaggctggagtgcagtgtcgtgttcatagctgactgcagcctcgacctccaggactcaagcaatcctcccacctcagcctcccaagtagctgagactacaagcatgtgccatcaagcccctaattttttttaatttgtttgtagcaacagagtctagctatgttgcccaggctggggtcttgtgttttatatatctgtgtgtatgcacatgtgcatgtatgtgtgtctgtgcaaaatttggcaggctaactttttagcttgcaagtagggtaaactcaaacccttcacagttctgacttacaatgaaactgaagaaaggataattccatgtgcataacagggatggacctcacaaacaatgttgggcaaaagaagctgcaggacacagaaggataatactatatgattccctttatacaaagttcaaaaacctggcttcatggccaggcatggtggctcatacctgtaatcccagcactttgggaggccgaggtgggtggatcacttgagatcagaagttcaagaccagcctgaccaacatggtgaaaccccatctctactaaaaaaaagtacaaaattagccgggtatgatggtgcacatctgcaatcccagctacctgggaggctgaggcaggagaatctcttgaatcctggaggtggaggtcacagtgagccgagatcacaccattgcactccagcctgggcaacaagagcaaaagtctgcctcaagaaaaaaaaaagccaaaaaacaaaaaacctggcaacatgaaatcatgctgttcaagtcacagggaggtgcctgaggtactacgggacatggcttttttgtttctttctttcttttatttttatttatttattttgagatagactctcactgtcacccaggctggagtgcagtggtgccatcttagctcactgaaacctcgacctcctgggctcaagcaatccccctgccttagcctcccaggtagctgagactacaggcgcactcggcctccagtgttgattctttttgcctgaaatacggatatacctttccatttattctggtcatttttttcttctgtcaaaatgtatagagctcatattttcttttctttttttttttgaaacggagtctcgctgtgtcaccaggctggagtgcagtggcgcgatctcggctcactgcaatctccgcctcccaggttcaagcgattcccctgctgcagcctcccaagtagctgggactacaggcgtgcaccaccacacccagctaattttttgtattttagtatgaacgaggtttcaccatgttggccaggatggtctcgatctcctgacctcataatctgcccacctcagcctcccaaagtgctgggattacaggcatgagccaccatgcctggccgagctcacacttttcttgcttacaagaggttgataaattttgttactgtgatcaacggtaccctgccctcttacattttctgatttcaggtgtctgtcaaggaaggctatacccatctttgttttttttttttcttgttttttttttttttttttttgagacggagtctcgctctgtcgcccaggctgaagtgcagtggtgctatctcggctcactgcaacctccgcctcccgggttcacaccattctcctgcctcagcctcccgagtagctgggactacaggcgccgaccaccacgcccggctaattttttgtacttttttagtagagacggggtttcaccatgttagccaggatgttctcaatctcctgacctcgtgatccacccgcctcggcctcccaaagtgctgggattacaggcattagccaccgcgcccggccc

SEQ ID NO: 10345 - DNA, 6076 bp, Homo sapiens
tagaatatttccactaaaatttatttatttatttatttattttatttttattttttttattatactctaagtattagggtacatgtgcacattgtgcaggttagttacatatgtatacatgtgccatgctggtgcgctgcacccactaatgtgtcatctagcattaggtatatctcccaatgctatccctcccccctcccccgaccccaccacagtccccagagtgtgatattccccttcctgtgtccatgtgatctcattgttcaattcccacctatgagtgagaatatgcggtgtttggttttttgttcttgcgatagtttactgagaatgatggtttccaatttcatccatgtccctacaaaggatatgaactcatcattttttatggctgcatagtattccatggtgtatatgtgccacattttcttaatccagtctatcattgttggacatttgggttggttccaagtctttgctattgtgaatagtgccgcaataaacatacatgtgcatgtgtctttatagcagcatgatttatagtcctttgggtatatacccagtaatgggatggctgggtcaaatggtatttctagttctagatccctgaggaatcgccacactgacttccacaatggttgaattagtttacagtcccaccaacagtgtaaaagtgttcctatttctccacatcctctccagcacctgttgtttcctgactttttaatgattgccattctaactggtgtgagatgatgtctcatagtggttttgatttgcatttctctgatggccagtgatgatgagcatttcttcatgtgttttttggctgcataaatgtcttcttttgagaagtgtctgttcatgtccttcgcccactttttgatggggttgtttgttttttcttgtaaatttgtttgagttcattgtagattctggatattagccctttgtcagatgagtaggttgcgaaaattttctcccatgttgtaggttgcctgttcactctgatggtagtttcttttgctgtgcagaagctctttagtttaattagatcccatttgtcaattttggcttttgttgccattgcttttggtgttttggacatgaagtccttgcccacgcctatgtcctgaatggtaatgcctaggttttcttctagggtttttatggttttaggtctaacgtttaaatctttaatccatcttgaattgatttttgtataaggtgtaaggaagggatccagtttcagctttctacatatggctagccagttttcccagcaccatttattaaatagggaatcctttccccattgcttgtttttctcaggtttgtcaaagatcagatagttgtagatatgcggtgttatttctgagggctctgttctgttccattgatctatatctctgttttggtaccagtaccatgctgttttggttactgtagccttgtagtatagtttgaagtcaggtagtgtgatgcctccagctttgttcttttggcttaggattgacttggcgatgcgggctcttttttggttccatatgaactttaaagtagttttttccaattctgtgaagaaagtcattggtagcttgatggggatggcattgaatctgtaaattaccttgggcagtatggccattttcacgatattgattcttcctacccatgagcatggaatgttcttccatttgtttgtgtcctcttttatttcattgagcagtggtttgtagttctccttgaagaggtccttcacatcccttgtaagttggattcctaggtattttattctccttgaagcaattgtgaatgggagttcacccatgatttggctctctgtttgtctgttgttggtgtataagaatgcttgtgatttttgtacattgattttgtatcctgagactttgctgaagttgcttatcagcttaaggagattttgggctgagacgatggggttttctagataaacaatcatgtcgtctgcaaacagggacaatttgacttcctcttttcctaattgaataccctttatttccttctcctgcctgattgccctggccagaacttccaacactatgttgaataggagtggtgagagagggcatccctgtcttgtgccagttttcaaagggaatgcttccagtttttgcccattcagtatgatattggctgtgggtttgtcatagatagctcttattattttgaaatacatcccatcaatacctaatgtattgagagtttttagcatgaagggttgttgaattttgtcaaaggctttttctgcatctattgagataatcatgtggtttttgtctttggctctgtttatatgctggattacatttattgatttgcgtatattgaaccagccttgcatcccagggatgaagcccacttgatcatggtggataagctttttgatgtgctgctggattcggtttgccagtattttattgaggatttttgcatcaatgttcatcaaggatattggtctaaaattctcttttttggttgtgtctctgcccagctttggtatcagaatgatgctggcctcctaaaatgagttagggaggattccctctttttctattgattggaatagtttcagaaggaatggtaccagttcctccttgtacctctggtagaattcggctgtgaatccatctggtcctggactctttttggttggtaaactattgattattgccacaatttcagagcctgttattggtctattcagagattcaacttcttcctggtttagtcttgggagagtgtatgtgtcgaggaatttatccatttcttctagattttctagtttatttgcgtagaggtgtttgtagtattctctgatggtagtttgtatttctgtgggatcggtggtgatatcccctttatcattttttattgtgtctatttgattcttctctctttttttctttattagtcttgctagcagtctatcaattttgttgatcctttcaaaaaaccagctcctggattcattgattttttgaagggttttttgtgtctctatttctttcagttctgctctgattttagttatttcttgccttctgctagcttttgaatgtgtttgctcttgcttttctagttcttttaattgtgatgttagggtgtcaattttggatccttcctgctttctcttgtaggcatttagtgctataaatttccctctacacactgctttgaatgcgtcccagagattctggtatgtggtgtctttgttctcgttggtttcaaagaacatctttatttctgccttcatttcgttatgtacccagtagtcattcaggagcaggttgttcagtttccatgtagttgagcggctttgagtgagattcttaatcctgagttctagtttgattgcactgtggtctgagagatagtttgttataatttctgttcttttacatttgctgaggagagctttacttccaactatgtggtcaattttggaataggtgtggtgtggtgctgaaaaaaatgtatattctgttgatttggggtggagagttctgtagatgtctattaggtctgcttggtgcagagctgagttcaattcctgggtatccttgttgactttctgtctcgttgatctgtctaatgttgacagtggggtgttaaagtctcccattattaatgtgtgggagtctaagtctctttgtaggtcactgaggacttgctttatgaatctgggtgctcctgtattgggtgcataaatatttaggatagttagctcctcttgttgaattgatccctttaccattatgtaatggccttctttgtctcttttgatctttgttggtttaaagtctgttttatcagagactaggattgcaacccctgcctttttttgttttccattggcttggtagatcttcctccatccttttattttgagcctatgtgtgtctctgcacgtgagatgggtttcctgaatacagcacactgatgggtcttgactctttatccaacttgccagtctgtgtcttttaattgcagaatttagtccatttatatttaaagttaatattgttatgtgtgaattcgatcctgtcattatgatgttagctggtgattttgctcattagttgatgcagtttcttcctagtctcgatggtctttacattttggcatgattttgcagcggctggtaccggttgttcctttccatgtttagcgcttccttcaggagctcttttagggcaggcctggtggtgacaaaatctctcagcatttgcttgtctataaagtattttatttctccttcacttatgaagcttagtttggctggatatgaaattctgggttgaaaattcttttctttaagaatgttgaatattggcccccactctcttctggcttgtagggtttctgccgagagatccgctgttagtctgatgggctttcctttgagggtaacccgacctttctctctggctgcccttaacattttttccttcatttcaactttggtgaatcggacaattatgtgtcttggagttgctcttctcgaggagtatctttgtggcgttctctgtatttcctgaatctgaacgttggcctgccttgctagattggggaagttctcctggataatatcctgcagagtgttttccaacttggttccattctccacatcactttcaggtacaccaatcagacgtagatttggtcttttcacatagtcccatatttcttggaggctttgctcatttctttttattcttttttctctaaacttcccttctcgcttcatttcattcatttcatcttccattgctgataccctttcttccagttgatcgcatcggctcctgaggcttctgcattcttcacgtagttctcgagccttggttttcagctccatcagctcctttaagcacttctctgtattggttattctagttatacattcttctaaatttttttcaaagttttcaacttctttgcctttggtttgaatgtcctcccgtagctcagagtaatttgatcgtctgaagccttcttctctcagctcgtcaaaatcattctccatccagctttgttctgttgctggtgaggaactgcgttcctttggaggaggagaggcgctctgtgttttagagtttccagtttttctgttctgttttttccccatctttgtggttttatctacttttggtctttgatgatggtgatgtacagatgggttttcggtgtagatgtcctttctggttgttagttttccttctaacagacaggaccctcagctgcaggtctgttggaataccctgccgtgtgagatgtcagtgtgcccctgctggggggtgcctcccagttaggctgctcgggggtcaggggtcagggacccacttgaggaggcagtctgcccgttctcagatctccagctgcgtgctgggagaaccactgctctcttcaaagctgtcagacagggacacttaaatctgcagaggttactgctgtctttttgtttgtctgtgccctgcccccagaggtggagcctacagaggcaggcaggcctccttgagctgtggtgggctccacccagttcgagcttccaggctgctttgtttacctaagctagcctgggcaatggtgggcgcccctcccccagcctcgctgccgccttgcagtttgatctcagactgctgtgctagcaatcagcgagattccgtgggcgtaggaccctctgagccaggtgtgggatatagtctcgtggtgcgccgtttcttaagccggtctgaaaagcgcaatattcgggtgggagtgacccgattttccaggtgcgtccgtcacccctttctttgacttggaaagggaactccctgaccccttgcgcttcccaggtgaggcaatgcctcgccctgcttcggctcgcgcacggtgcgcacacacactggcctgcgcccactgtctggcactccctagtgagatgaacccggtacctcagatggaaatgcagaaatcacccgtcttctgcgtcgctcacgctgggagctgtagaccggagctgttcctattcggccatcttggctcctcccta

SEQ ID NO: 10346 - DNA, 24120 bp, Homo sapiens
aagctttttgatgtgctgctggattcagtttgccagtattttattgaggatttttgcattgatgttcatcaggaatattggtccaaaattctctttttttgttgtgtctctgccaggctttggtatcaggatgatgctggcctcataaaatgagttagggaggattccctctttttctattgattggaatagtttcagaaggaatggtaccagttcctccttgtacctctggtagaattcggctgtgaatccatctggtcctgtactttttttcattgataagctattaattattgcctcaatttcagagcctgttattgggctattcagagattcaacttcttcctggtttagtcttgggagggtgtatgtgttgaggaatttatccatttcttctagattttctagtttatttgtgtagaggtgtttatggtattctctgatggtagttagtatttctgtgggatcggtggtgatatcccctttatcattttttattacgtctatttgattcttctctcttttcttctttactagtcttgctagtggtctatcaattttgttgatcttttcaaaaaaccagctcctggattcattgattttttgaagggttttttgtgtctctatttccttcagttcttctctgatcttagttatttcttgccttctgctagcttttgaatgtgtttgctcttgcttctctagttcttttaattgtgatgttagggtgtcaattttagatcttgtcttctttctcttgtgggcatttagtgctataaatttccctctgcacactgctttgaatgtgtcccagagattctggtatgttgtgtctttgttctcattggtttcaaagaacatctttatttctgtcttcatttcgttatgtacccagtagtcattcaggagcagattgtccagtttccatgtagttgagcggttttgagtgagtttcttaatcctgagttctagtttgattgcactgtggtctgagagacagtttgttataatttctgttcttttgcatttgctcaggagtgctttacttccaactatgtggtcaattttggaataggtgtggtgtggtgctgaaaagaatgtatattctattgatttggggtggagagttctgcagatgtctattaggtccgcttggtgcagagctgagttcagttcctggatatccttgttaactttctgtctagttgatctgtctgatgttgacagtggggtgttaaagtctcccgttattattgtgtgggtgtctaagtctctttgtagctctctaaggacttgctttatgaatctgggtgctcctgtattgggtgcatatatatttaggatagttagcttttcttgttgaattgatcctttaccattatgtaatggccttctttgtctcttttgatctttgttggtttatagtctgttttatctgagactaagattgcaacccctgccttttttggttttccatttgcttggtagatcttcctccatccctttattttgagcctatgtgtgtctctgcacgtgagatgggtttcctgaatacagcaaactgatgagtcttgactctttatccaatttgccagtctgtgtcttttaattggagcatttagcccatttccatttaaggttaatattgttatgtgtgaatttgatcctgtcattaggatgttagctggttattttgctcgttagttgatgcagtttcttcctagccttgatggtctttacaatttggcgtgtttttgcagtggctggtaccggttgtttccatgttcagtgcttccttcaggagctcttttagggcaggcctggtcatgagaaaatctctcagcatttgcttgtctgtaaagtattctatttctccttcacttacgaagcttagtttggctggatatgaaattctgggttgaaaattcttttctttaagaatgttgaatattggcctcctgtctcttctggcttgtagagtttctgctgagagagcagctgttagcctgatgggcttccctttgtgggtgacccgacctttctctctggctgcccttaacattttttccttcatttcaactttggtgaatctgacaattatgtgtcttggagttgctcttctcgaagagtatctttgtggcgttctctgtatttcctgaatttgaatgttggcctgccttgctagattggggcagttctcctggataatatcctgcagagtgttttccaacttggttgcgttatccccgtcactttcgggtacaccaataagaggtagatttggtcttttcacatagtcctatatttcttggaggctttgtttatttctttttattcttttttctctaaacttctcttctcacttcatttcattcatttaatcttccatcacagatacgctttcttcctgttgatcgaatcggctactgaggcttgtgcattcatcacgtagttctcgtgccgtggttttcagctccatcaggtcctttaaggacttctctgcattggttattctagttagccattcgtctaatttatttttaaggtttttaacttctttgccatgggttcgaacttcctcctttagctcggagtagtttgatcgtctgaagccttcttctctcaactcgtcaaagtcattctccgtccagctttgttccgttgcaggtgaggagctgcgttcctttggaggaggagaggtgctctcatttttagagtttccagtttttctgctctgttttttccccatctttgtggttttatctaccttgggtctttgatgatggtgacaaacagatggggttttggtgtggatgtcctttctgtttgttagttttccttctaacagtcaggaccctcagctgcaggtctattggagtttcctggaggtccactccagaccctgtttgcctgggtatcagcagcagaggctgcagaacagtggatattggtgaacagcaaatgttactgcctgatccttcctctggaatttttgtctcagaggagtaccaggccgtgtgaggtgtcagtctgcccctactggggggtgcctcccagttaggctactcaggggtcagggacccacttgaggaggcagtctgtccattgtcagatctccagttgtgtgctgggagaaccactagtctcttcaaagctgtcagacagggacatttaagtctgcataggtttctcctgccttttgtttggctatgccctgcccccagaggtggagtctacagaggcaggcaggcctccttgaggtgctgtgggctccacccagtcgagcttcctggctgcttttttacctactcaagccttggcaatggttggcgcccctcccccagcctcgctgccaccttgcagtttgatctcagactgctgtgctagcaatgagcatggctccgtgggcataggaccctccaagccaggtgcgggatataatctcgtggtgtgccgtttgctaagaccattggaaaagcgcagtattaaggtgggagtgatccaattttccaggtgccgtctgtcacccctttatttgactaggaaagggaattccctgaccgcttgcgcttcctgggtgaggcaatgccttgccctgctttggctcatgctcggtgcactgcacccactgtcctgcacctactgtctgacactccccagtgagatgaacccagtacctcagttggaaatgcagaaatcacccatcttctgcgttgctcatgctgggagctatagactggagctgttcctatgcggccatcttgtctccacccctcaggacttgaattcttatgcagcagtcccagtgatctttagagaatgcacatcttgcagaacacctgaggtgaggagtttgagaccggcctggccaacatggcgaaaccctgtcactactaaaaatacaaaagttagctggacatgatggtgggcacctgtaatcccagctactcaggaggctgagacaggagaattgcttgaactcggaagatggaggttgtagtgagccgagattgtgtcactgcactccagcctagctgacagagtgagaccctgtctcaaaaaaaaaaaaaaaaaagagagagagagcatgtccattttggctctgatggtctcaccttgcttaggcattttaaaagtacacctgacaaggaggtgaaaatcctccctctaatactgtatctgcagttacagctaagaaaggccaaggcaagcattggaacctactgggaagttgaaaatttaggctgaagagctgcaaggggtgaccatttctgaaggtttgttagacagcagaatacttttacaaataaaattcctgaagtcaagactcttgggtcatctaaaattagacgggacaaacccttgagaatgagctactgacagggacatgagcaaggtgaactgatgactttttctatttctaatttctgtgagtctatagaaaggtctatttctttcagtattttataatgcatgtttctcctttagccttctttacattttttcctctgatatttttatagattctacttacaaagcttaaaattacaacaaaaatgccatttcatacattattaagtttagaccatttaaaatcctgtcttgcaaatttctcttcctacagagcaatgctgtcccatcatgttgccttatgtctgctgctatttttgaattacagcacatttcatccacctttgataaggaacttaatatccattggcaggtcaacttgtgactttatgctgtgactataactgcaaattatggtgcatatttcattttaagttattccctgggataggaagctggtccaacggcagaactttgtgttataaagactgaagaaggaatcttacagaaacaatgtttccacggtgggcaatgcttacaggatagaatgtcagggaagattgcaataaaatatatggaagggagttgggtgcaaaagagcaaacacataactggagagcaacagagatcagtgtgggattgaggagtccagaaaaggttaagcatggagctgaggttcagagagggacccaaggtctgactggtgcaggaagctaggccttcatgttttgaagattagaataaacagctgcaatattaggatctcaccatagaaggaagctgggcccaggaaggagctggcacacaggctatggctttggcaaagggaaaggctgtggacactaaaccaacttttaagttgagctctgaagttctataatcatcgtgtcaggtcagaagctagtgttagtagcctgaaggcgcaggcatagggaaataagaatattggggaggaatatcatggagtgagatttagaggaagagagatggttactgactttacatctctagatgtacatgggcctcccttaattttaatattctttgcttttcggcttttgttcagatactgtatcctctatcttggaagtaaagtgaaagggaattaaacaaacatttctagaatatctaccatttaaaaggtacttggataagcacttaacatatgtactcattgagctgttccaggagagtgggttattgttatctccatttcacagacaatacacaagctcaaaggttaagtaactcaccctagtgtgcacaattaataaatgggggcctttagattcacttccaggtgtgtgtgtgtgtgattccagagtcctcactcctttcactctaccatactgcttcctacagatagatgtctaggatcagactccagggactgggcctggcacacagcaggccctctgtaaatcgttgaattcctctctccctccctgtcctccaccccttctaacctctttaaagtccactgctttattttcaggtttttagttgactctatagagttattgtgttaggttataaaatcacctgcatattctctttcttttcatgaaggaggataatatcctgaatttggaaattttggataattttttttgggggagagggtaaagcaaggattgatacattttttttcttattcttaaaagccagactctcagactcttggaatataatggtttttaagaaattcatgaaataaagggattttccaatttttcagagaaagtggaaaaaaagggctctatttcaacctacatgatttagctccttgggcccaatgacagcacaggtccacatgtctgaagctcactttcttgcatcattgttgtttctgctgctcagctcttcctgatcttattcctaatcatgtgactgttaagtctgcactttgctggccctcccacttgtcttccagccttgtatttttagatatctacaggacattgctaattggagctcaagatgtgaaaaactgacaactccataatttttcttcaattttccccaccaaatatgcatcttttctcaattctggaattctaatggtcttttggtcctcattggaataatttttgaccacttcctctaatttccactgccactggaatggacttaaaatgaatgatctcaagtaccaagtgggcatccaacatggcgctaaaatcctaatacagttccctagtaatttacttctttctttctgagatgattttatccttttttccttgaacctcctaagcttcctctatgttctcaataactcatccagatgacctgcatcaagtaccacatcatctgccttccttctgcttctatgaaagaagcgtgcctgctcctgccattccactgtgctcagggtcccattctctttcaccttcttaacatcttccattcagcattatcccttccctgtcttggaaaatctatttctttctctctgttgaatcattctgctaaacacaaaaatacaacttagtatcacgtatctcagagaacatcctcctttgatctcatagccctcctctggcattgtatcactcctctgctccccttcacagaaacattccagcaaagagccgcccacctctctcatcccttagtctttcctcaaccctccctaactggtctgtcttctaccactccactactgtggccattgtcaagctcaccaatgacctccctcttgcacaagcagtgatttatatacccaatcaggggtgctcacccagcctaaccgccacctttccttagagtgccccctcctcaaagctctcaggaccctttcctaccttgttttcctcttaccttgttggccacacatgatcagtttcttttggaagctctcctcctctacaagaccttgcttgaaaagcccaaggacgttatcttaggctctcttctctttcgtttttaaattctcttcctagaaaattatctccagttatgtagtccctcccccaccatatttatgtggtttaaagtgccatctgcaagcgtattactctcaaatttacatacagctccagatgtgatcaccagcctgagcttcagactcagatagccaactgtctacctgacaccaccattttgaaatccacaagtatctcaaacataacacagctgaaatataattacagatgtcagccttcatccactctcctcttctcaagccttccccgtatcagtaaatggtcctaccattcactcatacccaaacctaaaggttaaacttgaatcctttctttatcctataacctacaatagtaagtctcaacagttccattccatgaatataacccaaccaatccacttatcgttattttcctggctacacacctcatgtaagccaccataagttttcatcccaactagcagagcagcaaggctcctacctctactcctgctgttctaacacccatgctcctcatagcaaccacaatgatctctttaaaatgtataacatcaaaataccttaaaaaagtacaatctaaactccgaaccgcagtccagagggccctaaaaaatctggcctcttcctatttctctgatgaagtcttccttgactctccatcttgttactgtttttcagccacactggccttctttccgtcctttgagtatccccagtcctgactcaggggctttgtacttgctctgtcttctgtttggaatacatttcttctgtatctttgaatagtctttgaatagttttttctctttaaattagttttaccttaaatgtccccttctcagagaggacttccctgacaaactgagtggccttatcacctctacaaaattaacctacatgatctttttcacatcccttctgtacctgaaattatcttatttatcaacttgcttgtttttgctgtctgtagttgtatcagatttatggcataaaaaatcactccaaacttagtactaaaacaaacatttattgagctcacaatcctttgggtgggccaattggactgagctcaaatgggtggtatctggattaggctgggtttatcatgcgtcagcggccaggtgggtggctcttcttctgggggttggttggctgttggctggggtaactgggcactggggctaggtttctcttatcatccagcaggccagcccaggcttactcacagggtggataacaggattcctgagagaacagaaatgtaccagttctcttgaggtttcgttttggcactagcacaatgtcccttctgcctcattcttttggtcaaagcagcccaaacactagaagtgggggaaatagtctctactgcttaaggggaagagctacagattacattgtaaagggatgtggatatggggagagaagaattgtaatcatttttgcaaacaacccaccacaaggatatatatttgcaattcatttgggattcttacaatttgaatccctttttgagtttaataaattaccttatgaatctttgtagggcaaagaatgtttcctcctgtaggagctgaacaagctacataatttctttccattaagggcacaggtacttgtgcaatttgggagagagcaaggtgcaatagtaggctccctgtggaattcattttctggttagggtgacagcaaagatgactgtgccaggttggtatcaccttatttgctgtacaattatgttcctggtgggaaagtagcaagagtgcaagctgtagcacctggggccctgctgcgatgagctggtgatttcctcatcaggccagttctatgaaaggttttatatgttgttcctggaatcttaagtttgaaacttattctttagccctcttgaagattctgtgagccactcagtattcttctattagattccttttctgtgtaattccccggggtcggatttggttgcttgcaatgaagagctctattttggcagctggcaccaggaatggggcttatttttcttatataacaggaagagtgaggtggttgctaaattagtccagttgctcacacagctatcaaggactcttatcttcctgcttggttgtccttagtgtattaacttgtaattttcatgcttgttgccccttagtggctccaggtattacttctgtgttctaggcaggaagggggaaaatgggacggcaccagctgtgtctgttcctcttatcaagaaagcaaaagtttctaggaagtgctccttttatcaagaaaggagcttctcttttgtcaagaaaggggtctaaaccgatcagctggccccctacaggcatcagtgattaggaagtacctggctttctagcctctatgaggaagtcatgcagggagaaagcttgagaatgtgccaaattaggtgatacccagtgcctatcccatgattagtttccccctttagaatgacagttcttggggtcggtggcaggggctctgatttattcattgctgtctcttctgggcccagaaaagcaactggcaaatatgcggtttcaaaattcattgatgactgactgatctttaatctgccatcaaggtctagagatttctttcttcaaaatgtgtcttatctcttgctttcattatagaaccaccattttatttcaggcctgtagtatattattaaaggttgttttcatgctgtatttctctctccagtcttttccatcctgtgtctgcattatattctgctactagtgtatcaccttgaataccatttttatcttgtccttttctttctcaaagtattagttatgttgtagtaaatcccagtctctcagcttgggatctgactccttgcataagctggtctgttgcctctctgacatcagcaatttatttggtaatcactcacaagtccagctaatctcatggccatctggtatacactgccacatccagtgtatgcaaagggagcaggctgcactgtgaagggaacaggaaagaccaggacagggaagactctcattctaggtgacaggtggccaagctgcttggctgtaaagggtagggccgtcaatgaccactcagtctgaacttgtgcttagtctgcagcctcaccagtggaactcatatcaggcacagggtctgactgggctgaagcaagactgggctggctcagtctaatccgtggggtgctcacaggagtcttgtcatcccagaggaaaagtggagtgtaaaccaggatcaacttctgtcacagagactggcccacagggcagaagttgcagaggaaggtgaaagtcagtggcatgtaggtgtccaagggcttgctgtccagcccagcaggaaacacatcattcctgaactctgagagaacttgggaccaggaacttggttcttcttggtctgaggctggaaacacatcattcctgaactctgagagaacttgggaccaggaacttggttcttcttggtctgaggctggaaacacatcattcctgaactctgagagaacttgggaccaggaacttggttcttcttggtctgaggctggaaacacatcattcctgaactctgagagaacttgggaccaggaacttggttcttcttggtctgaggctggaaacacatcattcctgaactctgagagaacttgggaccaggaacttggttcttcttggtctgaggctggcaaggaagagcactttgtgttggacctcagtgttggcagctaagctgttggatctggcaggcactggtctatcttccacttgcctttagttctctacctttatgagtgccctaccttttgttagaagcacattattttctggtatgctacaagtgatattttgaaaagctctggagacaattaggacacatctgaatttgtttgatgaaagtaatttaaatcatttttacaataaaacagaataaacatggataaaattggcatgctgtttcagacaaaattaagacttaaatttgaagctctgattacaattctggtttatgattatgtattcattcttttctttcattaggggtacttaaatggaaagaattgaaacacagaattctaaggcaaataaaaggccactagaagcactgtaattattatggaagttgttcattagagatacatatgctaggaatttaaatcagaactcagaaatttccatttttagaatgaattaaaaagaccatgtatgagattttaaaaaatattctttaacaggaagggagaatttgtgatgatagcatatagtgggaaggatgggaataaaactgctatttgaagagaatatctactttttaaggtaaaaatctcaagtcagtttaaaataatttcaaggtatttttcttactcaaaaatccctataataaataaacatttaaaataaataaatattaaaatgaataattccttctgaatagtatacttttattctagaatgtctatttcctctaagaaggatcctccaaacatttttttttttttttgagatggagtctttctctgttgcccagggtggagtgcagtcgcgcgatctcagctcactgcaagctccacctcccaggttcacgccattctcctgcctcagcctcccgagtagctgggactacaggcgcccgccaccatgcccagataattttttgtatttttagtagagacagggtttcactctgttagccaggatggtcttgatctcctgacctcgtgatccgcccgcctcagcctcccaaagtgctgggattacgggtgtgagacaccacgcctggccccctccaaacattttaaactaacaactttaatctaactgcttggttagaatgagaattccctgtgtcatctcctcttagcaaactgcaatcttttaacatcttaatacttctctctggcagggtgctaggagcataccaggggagatttctccaaaatcgcttcttccactggctgcttccaataatttatttgaaatctcaaggactgcttattactcaaaaagaaaagtataaacccagagtctactcgcctgattatgctaagcataaaatgctttattgttttaaataattagaaattattttgtggattgacttgtctctcaaacttgattatatgttttgaggatagctgtatttactatcattattaataaagctatttccttttattataaaagaaaatatatgctcttacagtatttcaaacactctggaagacttgctacagaagaggtgatttattcctgaccatcacattctttggaggaattagcttttttcattctttcatttagcaaataaattattgaaatctgatgaagtgattataagtcaataattttgtctaaattaaaaataagtttagtcaaacaacaagaatgataatgatacattgtaatttagtgttgcttagaaaattcttgggatatatagaatgctattttatttaataattctgtttctccataagactataatagacttcaagagctttttcattcttgtcctatgcattaatcaggatcgctgtgaattttaattcagagtacatttagatcggtttcatctgttcaacaactgatggaaatgtgaaattccattgtgatttttggggtacacttgttacctcagcataacctagactctcttgtccattataggccctacctatatcacaactgtaaatctacaatttctggagtttgtttcattgcatgaacaataatattcacctccttcacaattctttgtctcttagctatcccatgactcaaattatctcctctacatgaatacctttcaaatcttctcttattctgatccctctccaaatttccaatataagattaataactttcagacatcaccacctagatgtctatgacctcaaatctgttacaaataggatggatttacccaactcttgatttaacattgtttttgacacatgttgtctgtttttgttagtggtaccacagggttgtaagacttgagctccccacttaaacaaggacagagcaagtactcagtaagagccaactcttttcctctgtgatactcctgctctatgcagcttttgctgaactatgctctgtgtcagattatttaattacgatacattattcatttaaaggattaaataaattacccatctccttgccttctacaaccaatctattgttatgttattttgggtccacctctgaaattttttggaaataatttccttcctttctattcctattctcattactctaagtcaagcccttatgaactctggatttcactatttttagagctaccttaccggtttctgtcagcactgtgtcctccctccaaatcatttgacatagcaatgtcaaggacatcttcagttctgattatgtcatttccctgctcaaaaaccttcagcatttccatgttcaatagaatagaactaaaactccttagcccggcattttccatctccacagtatggtctccacacatacacaggcttcaatgttagatggagaatactactgcaaagtggttaagagccttcattatttactaattgtgtgacctttggttaattactactccctcctcaactccagtttttctacttggaaaaacagggataataatagtacatacttcctatagttgttatgaggattaaataattcatttaaagcattaacatgcctggtaaaatataagtaatcaagacattttattattattattattacagcatttttagatgagtacataaatacatgttgtatatttatggaacttgatatcaattcagttcttctctttatatgttttagaaatgggaacatgagtctacaggactgggaattatggctccctcaccattcagttcccatgtatttctcattagcaattatttctagatgaagggctatgcctgttgtgctgtatggagcacactgaatgttgtcatgattacttgcctaagcaggttattaatgaaactcaagtttccactaaaaagaagcaatgtactgatatatgctaaaacatagttgaacctcaaaaacattatgctaaataaacaatgccagacaaaagacctccatattgtgtgtccatttatataaaatgtccagaatagtcaagtctataaagcctagaagatagattagtggttgctttgggctgtgggtggaaatgaagaatgactgcaaatggagacaaagtgtttttttttgggttgatgaaaatgtgtacatatagttccatgtcattttatcacatctgtaaccaccaccacaagaaagatgcagaattgtttgatttcataaagatcttgcttgagctacccctttatggccatacatttttccctccccgcactatcgttaacccctgccaaccactaatctattctcaatctctgtaattatgacattttgagaatattatataaattaaatcatatagcatatgagttcattaccaataatttaacgtaattattgatattctaaggtttaagtctgccatattattttttgttttctattttctctgatttttcatttctttctttcatatacttcctgtggaatactttaacatattttagaattctattttgattctatattgtttgtaagcatatctctttgtatatatttttagtaactactctaagtattaaattgtacatacataactatcagtctactgatgtagacattttaccagtgttaagtgtagccctttaattctctttaccctccctcatttataattgttttaatatttcctctacttcattgagagccacataagaaaatattatacttttgcttcaattgtcaaaaacaatttagaaaattcagatggaaagtttattgtatttattcttatttttgttctttctgttgtccttttttctttccttatattcccaaattccttcttttatcatttactttctgtcagataacttccttcagtcattcttttagagtaattctgctggtgacaaatattcttagttttccttcatctgagcatgcctttgttacctgcattcctcaaggatatttttgccggacatagaactgtggttgacagctcttttactgtagcacttagaaaatggttgcaatatccttcggagcttcttgacttttgatgagaagtcggctgtcatttgaattgtttcccccttttcccttacaggtaatgtgtcatttctctctggttcctttcaaaattattttcgctgtctttagttttctgaagtttgatgatggtgtgtcttagtgtaaatttctttgggttttttgtccttggggtttgatcagtttcttaaatctgtagtttgtttttgctaaataagttttcaaccattatttctgggaaaatattttgaggcccacctgcttcctcctctccttctgagatcttttgttatagttctgcaagtccctgaggttctgttcaatttttttttcaatctattttctctctgttgttcagattgggtaatttctattgtactaccttcaagataactatataattatttcctgtcttttccatgatgctgttgagcccactcattgtgttttaaaattttgattactgtagttttcatttccagaatttccatttggttcttctttatatcttctatttctaaggctttctattatttcgtttgtttcaagtccatttggaattgcttgttgaagtagttgtatggcatctgctttaaaacccttgtcagataattccaactctgtgtcatgttgatgttgtcatttgttgactgaaagtcttttttttttttttgagacagggtctcactctgtcgcccaggctggaatgcggtggcaccgtctcggctcactgcaacctctgtctcctggcttcaatcagttctcatggctcagcctcccgagtaggctacaggtgcacatcaccatgcctggctaatttttgtattttttggtagaggcgatgtttcatcatgttggccaggctggtctcaaactcctgacctcaagtgatccacttgccttggcctcccaaagtactggggttacaggccactgtgcctggcctgactgaatgtcttttgtcattcaagttgagattttccttgttcttggtatgatgagtgctttttaaaggttgcattccggacattttgggtactatgttatgagactctgggtcctatttaaatcttgtgttttagaagacctcctttgacactgctggcagaggaaagggaactcactcctctttactaccagatgtggatggaagctctggccacttacactgcctcatttgacatcctgaggaggggtacaccttattactactgggcagggatgggacttcaggctttgatatggtttggctgtgtcttcatccaaatctcatcttgaattgtagcttccacaattcccacatgttgtaggagggaactggtgggaggtaactgaatgatgagggtgtgtctttcccatgctgttctcgtgacagtaagtctcatgagatctgatggttttataaaggggagtttccctgcataagctctgtctcttgcctgccataatgtaagaagtccctttgcccttccttcatcttctgccatgattgtgaggcctgcccagccatgtagaactttgagtcaattaaacctctttctttataaattaccgagtcttgggaatggctttattagcagcatgagaacagactaatacaggcttcctttgtggtctcatttaccctgcagagtggcggggagttggggagggatttgggcagacccattactgctaaatggtggtgaaagttctggcttccctctgggcttcttctgatacgaataagagggagtgtggtggctttactaccaggtggagatggaagtcttggttccccacttggccttcactgatatcatccagtgtagggaagagagggatgcctcattattgctggagaagggcacaggtcgaggcttcccaaggcagataagagtatggtgaggcctgggtattttcctgtggtgtttggctgcattgggcaggtattgcctaaatgttttctgtcttactagcttgcccctttcctggacccttggccagagagaggtgactttcattggagcattttaaatctgctcctatcggtgttttttggtcactggcttctctagcacctagtttgggatatatgggacaaaaagaaaacccagagaacacactgctgtgtcattccttgagttttgtgattcctagccctcctgtcttcttgtctgtgtctttcagtgtatttgctttatatataatgtccggggttttcggttgtacttagtgagaggaatagggagacgtggtctcctccatttcggtctggactattctctgcaactaatctgaccatttcgttttgccattctgccttacaatgtaggagtattgacttacatgacctacaagtaacttgcataaagacatgaaaaggcaaataatggggtttatcaaagatacctctccactgttaaaaattaagctttgaaatcctatcataagaatgaatgctaaataaaaagaaaacctaaaatattttcaacatgtggatatgtaattttttttgaaagaagcgatattcacaagaacaaaaaaccaaacaccgcatattctcactcataggtgggaattgaacaatgggaacacatggacacaggagggggaacattacactctggggactgttgtggggttgggggaggggggagggatagcattgggagatatacctaatgctagatgacgagttagtgggtgcagcgcaccagcatgtcacatgtatacatatgtaactaacgtgcacattgtgcacatgtatcctaaaacttaaagtataataaaaaaaaaccaaataaaaaacttagaaaaaaaaaaaaaagaaagaagcgatagtaccaaagacttgcacaagaatgttcatagaagtattatctgcaggagccccaaactggaaacaacctaaatgctattcaaatggtgaatgaataaataaaatacaataaaatatttgaaaataataaggaataaagtactaatatatgctactacatggatgaatctcaaaagcactatgctaagtgaaaaaagccagccataaaagatcacatatggcatgactccatttatatgaaatgttcaaaataggcaaatccataaagacagaaagtaaattcgtggttgcctagggctggtgtaggggtggtgggataggtacagtttctttctttctttctgaggtgttctaaacttagatcattgtaatcttggaacaactctgaatattctacaaatcactgaatcatccatttttttaaattatgctttaagttttagggtaaatgtgcacaacgtgcaggtttgttacatatgtatacatgtgccatgttggtgtgctgcacccattaactcttcatttaacattaggtatatctcccagtgctatccctcccctcttcccccaccccacaacaggccccagtgtgtgatgttcccctttctgtgtccatgtgttctcattgttcaattaccacctatgagtgagaacatgcggtgtttggttttttgtccttgcgacagtttgctgagaatgatggtttccagcttcatccacgtccctacaaaggacatgaactcatccttttttatggctgcatagtattccaaggtgtatatgtgccacattttcttgatccagtctatcattgttggacatttgggttggttccaggtctttgctattgtgaatagtgctgcaataaacatacatgtgtatgtgtctttatagcagcatgttttataatcctttgggtatatacccagtaatgggatggctgggtcaaatggtatttctagttctagatccctgaggaatcactacactgacttccacaatggttgaaccagtttacagtcccagtaacagtgtaaaagtgttcctatttctccacatcctctccagcacctgttgtttcctgactttttaatgattgccattctaactggtgtgagatggtatctcattgtgcttttgatttgcatttctctgatggccagtgatgatgagcattttttcatgtgtcttttggctgcataaatgtcttcttttgagaagtgtctgttcatatcctttgcccacttgttgatggggttgtttgtttttttcttgtaaatttgtttgaggtcattgtagattctggatattagccctttgttagatgagtagatggcaaaaattttctcccattctgtaggttgcctgttcactctgatggtagtttcttctgctgtgtggaagctctttagtttaattagatcccatttgtcaatttttgtttttgttgccattgcttttgatgttttagacatgaagtgcttgcccatgcctatgtcctgaatggtattgcctaggttttcttctagggtttttatggttttaggtctaacatttaagtccttaatccatcttgaattaatttttgtataaggtgtaaggaagggatcctgtttcagctttctacatatggctagccagttttcccagcaccatttattaaatagggaatcttttccccatttcttgtttttgtcaggtttgtcaaagatcagatggttgtagatatgcggcattatttctgagggctctgttctgttccgttggtctatatctctgttttggtaccagtaccatgctgttttggttactgtagccttgtagtatagtttgaagtcaggtagcgtggtgcctccagctttgttcttttgccttaggattgacttggcaatgagggctcttttttggttccatatgaacttgaaagtagttttttccaattctgtgaagaaagtcattggtagcttgatggggatggcattgaatctataaattaccttgagcagtgtggccattttcacgatattgattcttcttacccatgagcatggaatgttcttccatttgtttgtatcctcttttatttcattgagcagtggtttgtagttctccttgaagaagtccttcacatcccttgtaagttggattcctaggtattttattctctttgaagcaattatgaatgggagttcactcatgatttggctctctgtttgtctgttattggtgtataagaatgcttgtgatttttgtacactgattttgtatcctgagactttgctgaagttgcctatcagtttaaggagatttgggactgagacgatggggttttctagatatacgatcatgtcatctgcaaacaggacaatttgacttcctcttttcctacttgaacaccctttatttccttctcctgcctgattgccctggccagaacttccaacactatgttgaataggagtggtgagagagggcatccctgtcttgtgccagttttcagagggtatgcttccagtttttgcccattcagtatgatattggttgtgggtttgtcatagatagctcttattattttgagataattcccatcaatacctaatttattgagagtttttagcatgaagagttgctgaattttgtcaaaggccttttctgcatctattgagataatcatgtggtttttgtcgttggttctgtttatatgctggattacgtttattgatttgtgtatgttgaaccagccttgcatcccagggatgaagcccacttgatcatggtggataagctttttgatatgctgctggattcattttgccagtattttactgaggatttttgcatcgatgttcatcagggatatcggtctaaaattctctttttttgttgtgtctctgccaggctttggtatcaggatgatgctggcctcataaaatgagttagggaggattctctctttttctattgattggaatagtttcagaaggaatgataccagatcctccttgtacctctggtagaattcggcagtcaatccatctggtcctggactttttttggttgataagctattaattattgcctcaatttcagagcctgttattggtctattcagagattcaacttcttcctggtttagtcttgggagggtgtatgtgttgcggaatttatccatttcttctagattttctagtttattttcatataggtgtttatagtattctctgatggtagtttgtatttctgtgggatcggcggtgatatcctctttgtcattttttattgcatctatttgattcttctctcttttcttctttattagtcttgctagtggtctatcaattttgttgatcttttcaaaaaaccagctcctggattcattgattttttgaagggttttttgtgtctctatttccttcagttcttctctgatcttagttatttcttgccttctgctagcttttgaatgtgtttgctcttgcttctctagttcttttaattgtgatgttagggtgtcaattttagatcttgtcttctttctcttgtgggcatttagtgctataaatttccctctacacactgctttgaatgtgtcccagagattctggtatgttgtgtctttgttctcattgatttcaaagaacatctttattactgccttcatttcgttatgcacccagtagtcattcaggagcaggttgttcaatttccatgtagttgagcggttttgagtgagtttcttaatcctgagttctagtttgattgcactgtggtctgagagagagtttgttataatttctattcttttacatttgctgagaagtgctttacttccaactatgtggtcagttttggaataggtgtagtgtggtgctgaaaagaatgtatattctgttgatttggggtggagagttctgcagatgtctattaggtccacttggtgcagagctgagttcagttcctggatatccttgttaactttctgtctcgttgatctgtctaatgctgacagtggggtgttaaagtctcccattattattgtgtgggagtctaagtctctttgcaggtctctaaggacttgctttatgaatctgggtgctcctgtattcggtgcttatatatttaggatagttggctcttcttgttgaattgatccctttaccattatgtaatggccttctttgtctcttttgatctttgttagtttaaagtctgttttatccgagactaggattgcaacccctgccttttttggttttccatttgcttggtaaatcttcctccatccctttattttgagcctatgtgtgtctctgcacatgatgagatgggtttcctgaatacagcacactgatgggtcttgactctttatccaatttgccagtctgtgtcttttaattggagtatttagcccatttccatttaaggttaatattgttatgtgtgaatttgatcctgtcatgatgatgttagctggttattttgctcattagttgatgcagtttcttcctaactttgatggtccttacaatttggcatgtttttgcagtggctggtaccggttgttcctttgcatgttcagtgcttccttcaggagctcttttagggcaggcctggtggtgacaaaatctctcagcgtttgctcatctgtaaagtattttatttctccttcacttatgaagcttagtttggcttgatatgaaattctgagttgaaaattcttttctttaagaatgttgaatattggcccccactctcttctggcttgtagggtttctgccgagagatctgctgttactctgatgggcttccctttgtgggtaacccgacctttctctctggctgcccttaacatttattccttcatttcaactttgctgaatctgacaattatgtgtcttggagttgctcttctcgaggagtatctttgtggtgttctctgtatttcctgaatttgaatattggcctgccttgctagattggggaagttctcctggttaatatcctgcagagtgttttccaacttggttgcactctcctcatcactttcaggtacaccaatcagacgtagatttggtcttttcacatagtcccatatttcttggaggctttgtttgtttctttttattctttttttctctaaacttctcttctcacttcatttcattcatttgatcttccaccactgataccctttcttccagttgatcgaatcggctactgaggcttgtgcattcgtcacgtagttctcgtgccatggttttcagctccatcaggtcctttaaggacttctctgtattggttattctagttatccattcgtctaattttttttcaaggtttttaacttctttgccatgggttcgaacctcctcctttagctcagagtagtttgatcgtctgaagtcttcttctctcaactcgtcaaagtcattctccatccagctttgttccattgctggtgaggagctgtgttcctttggaggaggagaggcgctctgatttttagagtttccagtttttctgctctgttttttccccatctttgtggttttatctacctttggtgtttgataatggtgacaaacagatggggttttggtgtggatgtcctttctgtttgttagttttccttctaacagtcagtaccctcagctgcaggtctgttggagtttcctggaggtccactccagaccctgtttgcctgggtatccgcagcagaggctacagaacagtggatattggtgaacagcaaatgttactgcctgattgttcctttggaagttttgtctcagaagagtacccagctgtgtgaggtgtcagtctgcccctactggggggtgcctcccagttaggctactcggggg

SEQ ID NO: 10347 - DNA, 7969 bp, Homo sapiens
aatttcttttttttttattgcactttaagttttagggtacatgtgcaaaacgtgcaggtttgttacatatgtgtacatgtgccatgttggtgtgctgcacccactaactcgtcatttaacattaggtatatctcctaatgctatccctccccactcccctcaccccacaacaggccccggtgtgtgatgttccccttcctgtgtccaagtgtcctcattgttcaattcccacctatgagtgagaacatgcggtgtttggttttttgtccttgcgatagtttgctgagaatcatggtttccagcttcatccatgtccctacaaaggacatgaactcatccttttttatggctgcatagtattccatggtgtatatgtgccacattttcttaatccagtctatcattgttggacatttgggttggttccaagtcttcgctattgtgaatagtgccactataaacatacatgtgcctgtgtctttatagcagcatgatttataatcctttgagtatatacccagtaatgggatggctgggtcaaatggtatttctagttctagatccttgaggaatcaccacactgtcttccacaatggttgaattagttgacagtcccaccaacagtgtaaaagcgttcctatttctccacatcctctccagcacctgttgtttcctgactttttaatgatcgccattctaactggtgtgagatggtatctcattgtggttttgatttgcatttctctaatggccagtgatgatgagcattttttcatgtgtctgttggctgcataaatgtctccttttgagaagtgtctgttcgtatcctttgcccacttgttgatggagttgtttgtttttttcttgtaaatttgtttgagttcattgtagattctggatattagccctttgtccgatgagtagactgcaaaaattttctcccattctgtaggttgcctgttcactctgatggtagtttcttttgctgtgcagaagctctttagtttaattagatcccatttgtcaattttggcttttgttgccattgcttttgctgttttagacttgaagtccttggccatgcctatgtcctgaatggtattgcctaggttttcttatagggtttttgtggtatgaggtctaacacgtaagtctttaatccatcttgaattaatttttgtataaggtgtaaggaagggatccagtttcagctttctacatatggctagccagttttcccagcaccatttattaagtagggaatcctttccccatttcttgtttttgtcaggtttgtcaaagatcaggtggttgtagatacgtggaattatttctgagggctctgttctgttacattggtctatatctatgttttggtaccagtaccatgctgttttggatactgtagccttgtagtatagtttgaagtcaggtagcgtgatgcctccagctttgctcttttggcttaggattgacttggcgatgcaggctcttttttggttccatatgaactttaaggtagttttttccaattctgtgaagaaagtcattggtagcttgatgggggtggccttgaatctataaattaccttgggcagtatggccattttcacgatattgattcttcctacccatgagcatggaatgttcttccatttctttgtatcctcttttatttcattgagcagtggtttgtagttctccttgaagaggtccttcacatgccttgtaagttggattcctaggtattttattctctttgaagcaattgtgactgggagttcactcatgatttggctctctgtttgtctgttattggtgtataagaatgcttgtgatttttgcatattgattttgtatcctgaggcttttctgaagttgcttatcagcttaaggaggttttgagctgagatgatggggttttctaaatattcaatcatgtcatttgcaaatagggacaatttgacttcctcttttcctaattgaataccgtttattcctttctcctgcctgattgccctggccagagcttccaccactatgttgaataggagtagtgagagagggtgcccttgtcttgtgccaattttcaaatggaatgcttccagtttttgcccattcagtatgatattgtctgtgggtctgtcataaatagctcttattatttttatatatattccatcaatacttagtttattaagagtttttagcatgaagggctgttgaattttgctgaaggccttttctgcatctattgagataatcatgtggtttttgttgttggctctgtttgtatgctggattatgtttattgatttgcgtatgttgaagcagccttgcatcccggggatgaagcacacttgatcatggtcgataagctttttgaggtgctgctggattcggtttgccagtattttattgaggattttcgcatcaatgtttatcagggatattggtctaaaattctctttttttgttgtgtctctgccaggctttggtatcaggatgatgctggcctcataaaatgagttagggaggattccttctttttctattgatgggaatagtttcagaaggaatggtaccagctcctccttgtacctctggtagaattcggctgtgaatccatctggtcttggactttttttggttggtaagctattaattattgcctcaatttcagggcctgttattggtctattcagagattcaacttcttcctggcttagtcttgggagggtgtatgtgtccaggaatttatccatttcttctagattttctagtttatttgcatagaggtgtttatagtattctctgatggtagtttgtatttctgtgggatcggtggtgatatcccctttatcattttttattatgtctatttgagtcttctctcttttcttctttattagtcttactagtggtctatcaattttgctcatcttttcaaaaaaccagctcctggattcattgattttttgaagggctttttgtatctctatttccttcaattctgctctgatcttagttatttcttgccttctgctagcttttgaatgtgtttgctcttgcttctctagttcttttaattgtgatgttagggtgtcaattttagatctttcctgctttctcttgtgggcatttagtgctataaatttccctctacacactgctttgaatgtgtcccagagattctggtatgttgtatctttgttctcgttggtttcaaaggacatctttatttctgccttcatttcgttatgtacccagtagtcattcaggagcaggttgttcagtttccatgtagttgagtggttttgagtgagtttcttaatcctaagttctagtttgattgcactgtggtctgagagacagtttgttataatttctgttcttttacatttgctgaggagtgttttacttccaactatgtggtcagttttggaataggtgtggtgtggtgctgaaaagaatgtatattctgttgatttggggtggagatttctgtagatgtctattaggtccacttggtgcagagctaagttcgattcctggatatccttgttagctttctgtctctttgatctgtctaatgttgacagtgggatgttaaagtctcccattattactgtatgggagtctaagtctcttttttttttttttattgtccccctggcaaatctttttttcttttttcttttttttgtatttatttatttattttattgatcattcttgggtgtttctcgcagagggggatttggcagggtcataggacaatagtggagggaatgtcagcagataaacaagtgaacaaaggtctctggttttcctaggcagaggaccctgcggcctttcgcagtgtttgtgtccctgggtacttaaggttagggagtggtgatgactcttaacgagcatgctgccttcaagcatctgtttaacaaagcacatcttgcaccgcccttaatccatttaaccctgagtggacacagcacatgtttcagagagcacagggttgggggtaaggtcacagatcaacaggatcccaaggcagaagaatttttcttagtacagaacaaaatgaaaagtctcccatgtctacttctctctacacagacacggcaaccatccgatttctcaatcttttccccacctttcccgtctttctattccacaaaaccgccattgtcatcttggcctgttctcaatgagctgttgggtacacctcccagacggggtcgtggccgggcagaggggctcctcaattcccagtaggggtggctgggcagaggcgcccctcgcctcccggacagggcggctggccgggcggggggctgacccccccacctccctcccggacggggtggctggctgggcagaggggctcctcacttcccagtaggggcagccgggcagaggcgcccctcacctcctggacagggcggctggccaggcaaggggctgaccccccccccacccacctccctcccggacggggcggctggccgggcggggggctgaacccccacctccctcccggacggggcggctggccgggcagaggggctcctcaattcccagtaggggtggccgggcagaggcgcccctcgcctcccggacggggcggctggccggatggggtggctggccgggcggggggctgacccccccacctccctcccggacggggcggctggccgggcagaggggctcctcacttcccagtaggggcggccaggcagaggcgcccctcacctcccggacagggcggctggccgggcggggggctgacccccccccacctccctcccagacggggcggctggccgggcagaggggctcctcacttcccagtaggggcggccgggcagaggcgcccctcacctcccgtccgggaggctggccgggtggggggctgacccccccacctccctcccggacggggcggctggcctggcgggggctgacccccacctccctcccggacggggtggctgccaggcagagatgctcctcacctcccagaccgggtggctgccggacggaggggctcctcacctctcagacagggcggttgccaggcagagggtctcctcacttatcagacggggcagccgggcagagacgctcctcacctcccagacggggtcgcggccgggcagaggtgctcctcacataccagacggggcggcggggcagaggcgctccccacatcccagacgatgggcggccgggcagagacgctcctcacttcctagatgggatggcgggggggaagaggcgctcctcatttcctagatgggatggcggccgggcagagacgctcctcactttccagactgggcagccaggcagaggggctcctcacatcccagacgatgggcggccaggcagagacgctcctcacttcccagacggggtggcggctgggcagaggctgcaatctccgctctttgggaggccaaggcaggcggctgggaggtggttgtagcaagccgagatcacgccactgaactccagcctgggcaccattgagcactgagtgaacgagactccgtctgcaatcccggcacctcgggaggccgaggctggcggatcactcgcggttaggagctggagaccagcccggccaacacagcgaaaccccgtctccaccaaaaaaatacgaaaaccagtcaggcgtggcggcgcgcgcctgcaatcgcaggcactcggcaggctgaggcaggagaatcaggcagggaggttgcagtgagccgagatggcagcagtacagtccagctttggctcggcatcagagggagtacagtccagctttggctcagcatcagagggagaccgtggaaagagagggagagggagaccgtggggagagggagagggagagggagaggtctaagtctctttgtagctttctaaggacttgatttatgaatctgggtgctcctgtattgggtgcatatatatttaggatagttagctcttcttgttgaattgatccctttaccattatgtaatggcctggtttgtctcttttgatctttgttggtttaaagtctgctttatcagagactaggattgcaacccctgcctttttttgttttccatttgcttggtagatcttcctccatccctttattttgagcctatgtgtgtctctgcacgtgagagggtttcctgagtacagcacactgatgggtcttgactctttatccaatttgccagtctgtgtcttttaattggagcatttagcccatttacatttaaggttaatattgttatgtgtgaatctgatcctgtcattatgatgttagctggttattttgcttgttagttgatgcagtttcttcctacccttgatggtctttacaatttggcatgtttttgcagtggctggtaccagttattcctttccatgtttagcgcttccttcaggagctcctgtagggcaggcctggtggtgacaaaatctctcagcatttgcttgtctgtacagtattttatttctccttcccttttgaagcttagtttggctggatatgaaattctgggttgaaaattcttttctttaagaatgttgaatattggcccccactctcttctggcttgtagagtttctgccaagagatcagctgttagtctgatgggcttccttggtgggtaacccgacctttctctctggctgcccttaatattttttccttcatttcaactttggtgaatctgacaattatgtgtcttggagttgctcttctcgaggagtatctttgtggcattctctgtatttcctgaatttgaatgttggcctgccttgctaggttggggaagttctcctggataatatcctgcagagtgttttccagcttgattccattctccctgtcactttcaggtacaccaatcagacatagatttggtcttttcacatagtcccatatttcttggaggctttgttcatttctttttattcttttttctctaaacttctcttctcgcttcatttcattgatttgatcttccatcactgataccctttcttccagttgatcaaatcagctactgaggcttctgcatttgccacgtagttctcgtgccatggtgttcagctccatcaggtcctttaaggacttctctgcattggttattctagttagccattcgtctaatcttttttcaaggtttttaacttctttgccatgggttcgaacttcctcctttacctcagagtagtttgatcatctgaagccttcttctctcaactcgtcaaagtcattttccatccagctttgttctgttgctggtgaggagctgtgttcctttggagaaggagaggcattctgatttttagaattttcagtttttctgctctgttttttaccccatctttgtggttttatctacctttggtctttgatgatggtgatgtacagatggggttttggtgtggatgtcctttccgttttttagttttccttctaacagtcaggactctcagctgcaggtctgttggagtttgctggcggtccactccataccctgtttgcctgggtatcagcatcagagtctgcagaacagtggatattggtgaacagcaaatgttgctgcctgatcgttcctctggaagttttgtctcagaggagtacctggccgtgtgaggtgtcagtctgcccctacttggggggtgcctcccagttgggctactcaggggtcagggacccacttggggaggcagtctgtctgttctcagatctccagctgtgtgctgggagaaccactactctcttcaaagctgtcagacggggacatttaagtctgcagaggtttctgctgccttttgtttggctatgccctgcccccagaggtggagtctacagaggcaggcaggcctccttgagctgcagtgggctccgcccagttcaagcttcccagccactttatttacctactcaagcctcagcaatggcgggcg

SEQ ID NO: 10348 - DNA, 16344 bp, Homo sapiens
  SITE (4124): n equals a,t,g, or c
  SITE (4127): n equals a,t,g, or c
  SITE (4130): n equals a,t,g, or c
  SITE (4131): n equals a,t,g, or c
  SITE (4136): n equals a,t,g, or c
  SITE (4141): n equals a,t,g, or c
  SITE (4151): n equals a,t,g, or c
  SITE (4162): n equals a,t,g, or c
  SITE (4170): n equals a,t,g, or c
  SITE (4202): n equals a,t,g, or c
  SITE (4220): n equals a,t,g, or c
  SITE (4229): n equals a,t,g, or c
  SITE (4382): n equals a,t,g, or c
  SITE (4391): n equals a,t,g, or c
  SITE (4400): n equals a,t,g, or c
  SITE (4401): n equals a,t,g, or c
  SITE (4404): n equals a,t,g, or c
  SITE (4415): n equals a,t,g, or c
  SITE (4421): n equals a,t,g, or c
  SITE (4428): n equals a,t,g, or c
  SITE (4438): n equals a,t,g, or c
tttttcttagttcatattctttttcttttcttttctttattattatactttaagtttcagggtacatgtgcatattgtgcaggttagttacatatgtatacatgtgccattctggtgcgctgcacccactaactggtcatctagcattaggtatatctcccagtgctatccctcccccctccccccaccccactacagtccccagagtgtgatgttccccttcctgtgtccatgtgatctcattgttcaattcccacctatgagtgagaatatgcggcgtttggttttttgttcttgcgatagtttactgagaatgatgatttccaatttcatccatgtccctacaaaggacatgaactcatcatttttaatggctgcatagtgttccatggtgtatatgtgccacattttcttaatccagtctatcattgttggacatttgggttggttccaagtctttgctattgtgaataatgccacaataaacatatgtgtgcatgtgtctttatagcagcatgatttatagtcctttgggtatatacccagtaatgggatggctgggtcaaatggtatttctagttctagatccctgaggaatcgccacactgacttccacaatggttgaactagtttacagtcccaccaacagtgtaaaagtgttcctatttctccacatcctctccagcacctgttgtttcctgactttttaatgattgccattctaactggtgtgagatggtatctcattgtggttttgatttgcatttctctgatggccagtgatggtgagcattttttcatgtgtttttggctgcataaatgtcttcttttgagaagtgtctgttcatgtccttcacccacttttcgatggggttgtttgtttttatcttgtaaatttgtttgagttcattgtagattctggatattagccctttgtcagatgagtaggttgcgaaaattttctcccattttgtaggttgcctgttcactctgatggtagtttcttttgctgtgcagaaactctttagtttaattagatcccatttgtcaattttggcttttgttgcctttgcttttggtgttttagacatgaagtccttacccatgcttatgtcctgaatggtaatgcctaggttttcttctagggtttttatggttttaggtctaacgtttaagtctttaatccatcttgaattgatttttgtataaggtgtaaggaagggatccagtttcagctttctacatatggctagccagttttcccagcaccatttattaaatagggaatcctttccccattgcttgtttttctcaggttggtcaaagatcagatagttgtagatatgcagcattatttctgagggctctgttctgttccattgttctatatctgtgttttggtaccagtaccatgctgttttggttactgtagccttgtagtatagtttgaagtcaggtagtgtgatgcctccagcttttttcttttggcttaggattgccttggcaatgcgggctcttttttggttccatatgaactttaaagtagtttcttccaattctgtgaagaaaggcattggtagcttgatggggatggcattgaatctgtaaattaccttgggcagtatggccattttcacgatattaattcttcctacccatgagcatagaatgttcttccatttgtttgtatcctcttttatttcgttgagcagtggtttgtagttctccttgaagaggtccttcacatcccttgtaagttggattcctaggtattttattctctttgaagcaattgtgaatgggagttcactcatgatttggctctctgtttgtctgttattggtgtataagaatgcttgtgacttttgtacattgattttgtatcctgagactttgctgaagttgcttatcagcttaaggagattttgggctgagacaatggggttttctagatatacaatcatgtcatctgcaaacagggacaatttgacttcctcttttcctacttgaataccctttatttccttctcctgcctaattgccctggccagaacttccaacactatgttgaataggagtggtgagagagggcatccctgtcttgtgccagttttcaagggaatgcttccagtttttgcccattcagtatgatattggctgtgggtttgtcatagatagctcttattattttgaaatacgtcccatcaatacctaatttattaagagtttttagcatgaagggttgttgaattttgtcaaaggccctttctgcatctatgcagataatcatgtggtttttgtctttggctctgtttatatgctggattacatttattgatatgtgtatattgaaccagccttgcatcccagggatgaagcccacttgatcatggtggataagctttttgatgtgctgctggattcggtctgccagtattttattgagggtttttgcatcaatgttcatcaaggatattggtctaaaattctcttttttggttgtgtctctgcctggctttggtatcagaatgatgctggcctcataaaatgagttagggaggattccctctttttctattgattggaatagtttcagaaggaatggtaccagttccttcttgtacctctggtagaattcggctgtgaatccatctggtcctggactctttttggttggtaagctattgattattgccacaatttcagatcctgttattggtctattcagagattcaacttcttcctggtttagtcttgggagagtgtatgtgtcgaggaatttatccatttcttctagattttctagtttatttgcgtagaggtgtttgtagtattctctgatggtagtttgtatttctgtgggattggtggtgatgtcccctttatcattttttattgcatctatttgattcttctctctttttctctttattagtcttgctagcagtctatctattttgttgatcctttcaaaaaaccagctcctggattcattaattttttgaagggttttttgtgtctctatttccttcagttctgctctgattttagttatttcttgccttctgctagcttttgaatgtgtttgctcttgcttttctagttcttttaattgtgatgttagggtgtcaattttggatctttcctgctttctcttgtgggcatttagtgctataaatttccctctatacactgctttgaatgcgtcccagagattctggtatgttgtgtctttgttctcgttggtttcaaagaacatctttatttctagcttcatttcgttatgtacccagtagtcattcaggagcaggttgttcagtttccatgtagttgagcggttttgagtgagattcttaatcctgagttctagtttgattgcactgtggtctgagagatagtttgttataatttctgttcttttacatttgctgaggagagctttacttccaagtatgtggtcaattttggaatacgtgtggtgtggtgctgaaaaaaatgtgtattctgttgatttggggtggagagttctgtagatgtctattaggtccacttggtgcagagctgagttcaattcctgggtatccttgttgactttctgtctcgttgatctgtctaatgttgacagtggggtgttaaagtctcccattattaatgtgtgggagtctaagtctctttgtaggtcactcaggacttgctttatgaatctgggtgctcctgtattgggtgcatatatatttaggatagttagctcttcttgttgaattgatccctttaccattatgtaatggccttctttgtctcttttgatctttgttggtttgaagtctgttttatctgagactaggattgcaacccctgcctttttttgttttccatttgcttggtagatcttcctccatccttttattttgagcctatgtgtgtctctgcacgtgagatgggtttcctgaatacagcacactgatgggtcttgactctttatccaatttgccagactgtgtcttttaattggagcatttagtccatttacatgtaaagttaatattgttatgtgtgtatttgatcctgtcattatgatgttagctggttattttgctcgttagttgatgcagtttcttcctagnctnganngtctntacantttggcatgnttttgcagtgnctggtacnggttgttcctttccatgtttagtgcttccttnaggagctcttttagggcnggcctggtngtgacaaaatctctcagcatttgcttgtctgtaaagtattttatttctccttcacttatgaagcttagtttggctggatatgaaattctgggttgaaaattcttttctttaagaatgttgaatattggcccccactctcttctggcttgtagngtttctgcngagagatcnnctnttagtctgatnggcttncctttgngggtaacccnacctttctctctggctgcccttaacattttttccttcatttcaactttggtgaatctgacaattatgtgtcttggagttgctcttgtcaaggaatatctttgtggcattctctgtatttcctgaatctgaactttggcctgccttgctagattggggaagttctcctggataatatcctgcagagtgtttttcaacttggttccattctccccatcactttcaggtacaccaatcagacgtagatttggtcttttcacatagtcccatatttcttggaggctttgctcatttctttttattcttttttctctaaacttcccttcttgcttcatttcattcatttcatcttccatcactgataccctttcttccagttgatcgcatcggctcctgaggcttctgcattcttcacgtagttctcgagccttggttttcagctccatcagctcctttaagcacttctgtgtattagttattctagttatacattcttctaaatttttttcaaagttttcaacatctttgcctttggtttgaatgtcctcctgtagctcagagtaatttgatcgtctgaagccttcttctctcagcttgtcatagtcattctctgtccagctttgttccgttgctggtgaggaactgcattcctttggcagaggagaggcgctctgctttttagagtttccagtttttccccatctttgtggttttatctacttttggtctttgatgatggtgatgtacagatgggtttttggtgtggatgtcctttctgtttgttagttttccttctaacagacaggaccctcagctgcaggtctgttggagtaccctgccctgtgaggtgtcagtctgcccctgctggggggtgcctcccagttaggctgctcgggggtccggggtcagggacccacttgaggaggcagtctgcccttctcagatgtccagctgcgtactgggaggaccactgctctcttcaaagctgtcagacagggacatttgagtctgcagaggttactgctgtctttttgtttgtctgtgccctgcccctagaggtggagcctacagaggcaggcaggcaggcctccttgagctgtggtgggctccacccagttcgagcttcctggctgctttgtttatctaagcaagcctgggcaatggggggcccccctcccccagcctcactgccgccttgcagtttgatctcagactgctgtgctagcaatcagcaagactcagtgggtgtgggaccctccaagccaggtgcgggatatagtctcgtggtgcgccgtgttttaagctcgtcagaaaagcgcagtattcgggtgggagtgacccgattttccaggtgccgtccgtcacccctttctttgactaggaaagggaactccctgacccctgtgcttcccgagtgatgcaatgcctcgccctgcttcggctcgcgcatggtgtgcacacccactgacctgcgcccactgtctggcactccctagtgagatgaacccggtacctcagatggaaatgccgaaatcacccgtcttctgcgtcgctcaggctgggagctgtagacgggagctgttcctattcggccatcttggctcctcccccccaggcacaatactttctaaaggcaccttgaagcctaaaagagcccttcttatactctgaggtatctcaccactgaaactggttacatacatctgtattgggaattaatggataagggtggaacaaatgaaatgcatttctgggggccagatattccaaagcagtttggggtagccttcttcctcctcctctgcaatgctttgttagttggaggctgtaaacatgccgatgctttcccaaatttgtgggaatgaatgtgaatcacagtttttggggcttcaatctcctctgcggacacataaaaaggaactttcatcaatttctaacaaggtttgagatctatgcctggatagagctggatattgatgcaaaagtaagaagcaaaagatgatttccttgagttccagcaatttcaataaaaaacacagagaccagacttgcaacaacactatagtgtcaaagagctggttcccaaaggggagcatagagtccacccataccagagacagacgagatctaacactttttgagtttaatattaatgttgcagcatggtaatgaaaactagtaaaagaatctctcttggtaaatgaatcttcactcccaaacggcaagcaggaaaaaccctaaataaataatgtgagattgatatcagaggcccatgtgcagggactcgattacaattcttggcttgtactcaggggccctcatgcattttttaagagctcatcaatattgtgatccttctgcttgctggtgaactttaaaaactacaccgaggtataaaagtagggctttgactttgttgaggcttatgattcttctcaaataaagtagatctgaataaaagacggattggaaaatcttccctggcctttaggcaagcacagaacttagcagtggttttggagcacccactatggaacgatccatgagatccaaagatggatacagttcccacacaacagccacaaggaaccacacattggggaccacctgaagcagaaccctagctgggggcttggccttgttctgccatgaagctgacagagctgtttctacaacaatgtgcatcttgaatcatcccacagaaggagctgagttaggctggaaatgagagaattccagacagagggaaggtatatttgtggagttgtaggaggccagaaagttgaaggctggagactaggggcaaggttggaggctggagaccaggggtcaaggcaaggaagacaaggctgacccctcagacgctagtaagtctctactgtgagagcagcaggaagccatggaagggggttaaacagaggaaggttgactcttactggaaatgatggcttgtctcccatttctggtttgggatacaggatgccttaggccctggtgccagcagagtgtacaggaggccacattggaagacgatggtctttgctgtcttcttacctttctgtatgctccctgggccttcgtgtggctttagcttctcacaaggcctcactgggctgtgtatgtgtgtgcgtgtttgtgtgtgtaggtggtgactgaccatcttctatgagctgggctttgtattatttcttgaccttctcaagatttgcctgtctcatgtcttcagaacccattgcctgcagtctttgatacacactattctgataaatgaatgagactgtgaggagtgttaatttaagatattaacccttttatgtgttagggtaatacccagtgtctttttactcaggagatattcaatcagtagggattcaatacacgagtgtcgtatatttgtgttttaaccgggtctgtctgagatgcagtgaacgttcagttagcctgggcagccttctttcttgtcatctgtagagctggaatctgggagcttccttctggtcactcagcagggacaaagaggcctctacccccacatcactgttctctaaggtacatgcctcccccatcactttccacctctcgaggaactggcacagcccaggatttcgcaatgattagaactgaaccccaataagctacccaagaaaaacagtgagccttttaaggggctcagaagtcagacaagagaatcagaacacagggaatacatgttctggaacaagaggacacaaacaccagcttagcaactgcagcaagtacagtgaaccagccagaccaccggacaaggtcagaggtacaggggatggcctcttgaacacagtggcaggaggatggttgcagggtagtggctgcagaagaccccatgtacatacatgctaagcttttatttcaggcaaagggcttagagttctaagcttgagaacccctcagaacaggtcctactgtcactttctgagtctgagggagagttactaagaagacactgaaattctataagagcccttaagaagctaaaattgcaaatactcctcagagagacctggatttccagcagaaatcaggattagcacatgccaatatttaggtcgacatcgagtgggcgtgaacagcagtatgtggaggctttgttggatggccccagggttcttttaacctaaaattctatgggagtgtttgaagggtcgtagttcagagggaactcttgatccctgttgtgaacgccaagctcattcctatctcctggcctttatctttgctcagctctctggaccaccagaaggatctttgcagggctccttccatcccatcatttacgtctcattgcctgagaggcctttccgggccattctttccaaaatactcccctcccacgttttatccccttcctggatttgcttctccacccagcactcaccacagtcgggaacgatactatttgtttgtttacttgatcagtggggatctctgtgggtcttgtctatcaatcactgcatcctcagttcccaaaacaggaccagtcatttagtgtccactcaacacacgcatggcaaaaaaagacagaggagcagggaggctgagagggagggagcaagccttcctctagaagggtggaacgcagagcagtgcagtgagaatgtgtgtgtgcctgtgtgtatccatgcatgggagcatgtgcttatgtatccacgtacatgtgcatgtgtgtcaacatatatgtgtccatgcatgtgtacttgtgtgtgaatgtgtatgtgtgcacgcatgtgtgtgcgcaagcacacgtgtaggcatcaaagagacttgcatttgaaaggagacccttagtataatatttatgataaacatttcaaaactgagttttagtgatgtgcagaacagaggaggaagatgcaagccccgaggcttggcaccccagctgcctgagccaagtcctcaggcagtgagggagatataggtaagtgaagctgggggtgggggttatttagctctgaagattggactgctggtgtcttgttttgatttcagagccaacatgacagatacccagacttcagagagggaaaacagcatggtcaaaatgacaactgagaatacggtggccagccttggtcagaatagtgctgacctgtgcagaggtaggctctttcttcaggtaagggctcctggcctctctgcatgccttggggcccgcctcctactctccaccctcacaccctcaggagagagtgatgcaagatgaatggatcctaaaattaaaatccagtaactctttcgaattactggcaatttagtgaattaacaagttggcaccaggcagtggccttttcccactaaaaaaaaaaaaaacaacctcaaatgcattccccaaggaaggggctgaaactcataaccttgtgtctggggcccagagggcatgagcacagagatccaaaggggctgatgctttccctaccactagtggggcaggctgtgttagggtgcatgtctgaaacttgaaactgaattaagtagcttcatgtaatggcttctcttgacggcacaggataaacatcataagaagaagaagcagtaatccaagaaggtttgcaactggctcaaaatgctacctgaaaccaagaattggaagccaccttgacccagaggaaaaaaaattgttaaactttgcagctatttctcaaaagaatagagaattttgttttctgtttgtagagatgggaatagtcatcccttatggaagaagacaataatttgctgcatttttaggacttgtaattgtacaggcaaattcaaaattcaggtagcattaaaattacagctagataatgctgcctgctttgtggatagctatcctcatttcaagggagagcacccctttatctgttgaagagatgtctttttgatttgctaagggcaagaatggaaaataagtgcgaataggaacagctccggtctgcagctcccagcgtgagcgacgcagaagacgggtgatctcggcatttccatctgaggtaccgggttcatctcactagggagtgccagacagtgggtgcgcacactgtgcgtgagccgaagcagagcgaggcattgcctcactcgggaagcacaaagggtcagggagttccctttcctagtcaaagaaaggggtgacggacggcacctggaaaatcgggtcactcccacccgaatactgtgcttttctgacgggcttaaaacatggcgcaccacgagattatatcccgcacctggcttggagggtcctacgcccatggagtctcgctgattgctagcagagcagtctgagatcaaactgcaaggtggcagccaggctgggggaggggggcccgccattgcccaggcttgcttaggtaaacaaagcagcctggaagctcgaactgggtggagcccaccacagctcaaggaggcctgcctgcctgcctctgtaggctgcacagacaaacaaaaagacagcagtaacctctgcagactcaaatgtccctgtctgacagctttgaagagagcagtggtcctcccagtacgcagctggacatctgagaagggcagactgcctcctcaagtgggtccctgaccccggacccccgagcagcctaactgggaggcaccccccagcaggggcagactgacacctcacagggcagggtactccaacagacctgcagctgagggtcctgtctgttagaaggaaaactaacaaacagaaaggacatccacaccaaaaacccatctgtacatcaccatcatcaaagaccaaaagtagataaaaccacaaagatggggaaaaactggaaactctaaaaagcagagcgcctctcctctgccaaaggaatgcagttcctcaccagcaacggaacaaagctggacagagaatgactatgacaagctgagagaagaaggcttcagacgatcaaattactctgagctacaggaggacattcaaaccaaaggcaaagatgttgaaaactttgaaaaaaatttagaagaatgtataactagaataactaatacacagaagtgcttaaaggagctgatggagctgaaaaccaaggctcgagaactacgtgaagaatgcagaagcctcaggagccgatgcgatcaactggaagaaagggtatcagtgatggaagatgaaatgaatgaaatgaagcaagaagggaagtttagagaaaaaagaataaaaagaaatgagcaaagcctccaagaaatatgggactatgtgaaaagaccaaatctacgtctgattggtgtacctgaaagtgatggggagaatggaaccaagttgaaaaacactctgcaggatattatccaggagaacttccccaatctagcaaggcaggccaaagttcagattcaggaaatacagagaatgccacaaagatattccttgacaagagcaactccaagacacataattgtcagattcaccaaagttgaaatgaaggaaaaaatgttaagggcagccagagagaaaggtcgggttaccctcaaagggaagcccatcagactaacagtggatctctcggcagaaaccctacaagccagaagagagtgggggccaatattcaacattcttaaagaaaagaattttcaacccagaatttcatatccagccaaactaagcttcataagtgaaggagaaataaaatactttacagacaagcaaatgctgagagattttgtcactaccaggcctgccctaaaagagctcctgaaggaagcactaaacatggaaaggaacaaccggtaccagccactgcaaaatcatgccaaaatgtagagaccatcaagactaggaagaaactgcatcaactaacgagcaaaataaccagctaacatcataatgacaggatcaaatacacacataacaatattaactttacatgtaaatggactaaatgctccaattaaaagacacagactggcaaattggataaagaaagagtcaagacccatcagtgtgctgtattcaggagacccatctcacgtgcagagacacacataggctcaaaataaaaggatggaggaagatctaccaagcaaatggaaaacaaaaaaaggcaggggttgcaatcctagtctcggataaaacagactttaagccaacaaagatcaaaagagacaaagaaggccattacataatggtaaagggatcaattcaacaagaagagctaactatcctaaatatatatgcacccaatacaggagcacccagattcataaagcaagtcctgagtgacctacaaagagacttagactcccacacattaataatgggagactttaacaccccactgtcaacattagacagatcaacgagacagaaagtcaacaaggatacccaggaattgaactcagctctgcatcaagtggacctaatagacatctacagaactctccaccccaaatcaacagaatacacatttttttcagcaccacaccacacctattccaaaattgaccacatacttggaagtaaagctctcctcagcaaatgtaaaagaacagaaattataacaaactgtctctcagaccacaggtcaatcaaactagatctcaggattaagaatctcactcaaaatcgctcaactacatggaaactgaacaacctgctcctgaatgactactgggtacataacgaaatgaaaccagaaataaagatgttctttgaaaccaacgagaacaaagacacaacataccagaatctctgggacgcattcaaagcagtgtgtacagggaaatttatagcactaaatgcccacaagagaaagcaggaaagatccaaaattgacaccctaacatcacaattaaaagaactagaaaagcaagagcaaacacattcaaaagctagcagaaggcaagaaataactaaaatcagagtagaaccgaagcaaatagagacacaaaaaacccttcaaaaaattaatgaatccaggagctggttttttgaaaggatcaacaaaatagatagactgctagcaagactaataaagagaaaaagagagaagaatcaaatagatgcaataaaaaatgataaaggggacatcaccaccaatcccacagaaatacaaactaccatcagagagtactacaaacacctctacgcaaataaactagaaaatctagaagaaatggataaattcctcgacacatacactctcccaagactaaaccaggaagaagttgaatctctgaatagaccaataacaggatctgaaattgtggcaacaatcaatagcttaccaaccaaaaagagtccaggaccagatggattcacagccgaattctaccagaggtacaaggaggaactggtaccattccttctgaaactattccaatcaatagaaaaagagggaatcctccctaactcattttatgaggccagcatcattctgataccaaagccaggcagagacacaaccaaaaaagataattttagaccaatatccttgatgaacattgatgcaaaaatcctcaataaaatactggcagaccgaatccagcagcacatcaaaaagcttatccaccatgatcaagtgggcttcatccctgggatgcaaggctggttcaatatacacaaatcaataaatgtaatccagcatataaacagagccaaagacaaaaaccacatgattatctcaatagatgcagaaaaggcctttgacaaaattcaacaacccttcatgctaaaaactctcaataagttaggtattgatgggacgtatctcaaaataataagagctatctatgacaaacccacagccaatatcatactgaatgggcaaaaactggaagcattccctttgaaaactggcacaagacagggatgccctctctcaccactcctattcaacatagtgttggaagttctggccagggcaattaggcaggagaaggaaatgaagggtattcaattaggaaaagaggaagtcaaattgtccctgtttgcagatgacatgattgtgtatctagaaaaccccactgtctcagcccaaaatctccttaagctgataagcaacttcagcaaagtctcaggatacaaaatcaatgtacaaaagtcacaagcattcttatacaccaataacagacaaacagagagccaaatcatgagtgaactcccattcacaattgcttcaaagagaataaaatacctaggaatccaacttacaagggatgtgaaggacctcttcaaggagaactacaaaccactgctcaacgaaataaaagaggatacaaacaaatggaagaacattctatgctcatgggtaggaagaatcaatatcgtgaaaatggccatactgcccaaggtaatttacagattcagtgccatccccatcaaggtaccaatgcctttcttcacagaattggaagaaactactttaaagttcatatggaaccaaaaaagagcccgcattgccaaggcaatcctaagccaaaagaaaaaagctggaggcatcacactacctgacttcaaactatactacaaggctacagtaaccaaaacagcatggtactggtaccaaaacacagatatagatcaatggaacagaacagagccctcagaaataatgccgcatatctacaactatctgatctttgaccaacctgagaaaaaacaagcaatggggaaaggattccctatttaataaatggtgctgggaaaactggctagccatatgtagaaagctgaaactggatcccttccttacaccttatacaaaaatcaattcaagatggattaaagacttaaacgttagacctaaaaccataaaaaccctagaagaaaacctaggcattaccattcaggacataggcatgggcaaggacttcatgtctaaaacaccaaaagcaaaggcaacaaaagccaaaattgacaaatgggatctaattaaactaaagagtttctgcacagcaaaagaaactaccatcagagtgaacaggcaacctacaaaatgggagaaaattttcgcaacctactcatctgacaaagggctaatatccagaatctacaatgaactcaaacaaatttacaagataaaaacaaacaaccccatcgaaaagtgggtgaaggacatgaacagacacttctcaaaagaagacatttatgcagccaaaaacacatgaaaaaatgctcaccatcactggccatcagagaaatgcaaatcaaaaccacaatgagataccatctcacaccagttagaatggcaatcattaaaaagtcaggaaacaacaggtgctggagaggatgtggagaaataggaacacttttacactgttggtgggactgtaaactagttcaaccattgtggaagtcagtgtggcgattcctcagggacctagaactagaaataccatttgacccagccatcccattactgggtatatacccaaaggaatataaatcatgctgctataaagacatatgcacacgtatgtttattgcggcattattcacaatagcaaagacttggaaccaacccaaatgtccaacaatgattggattaagaaaatgtggcacatatacaccatggaacactatgcagccataaaaaatgatgagttcatgtcctttgtagggacatggatgaaattggaaatcatcattctcagtaaactatcgcaagaacaaaaaaccaaacaccacatattctcactcataggtgggaattgaacaatgagatcacatggacacaggaaggggaacatcacactctggggactgtagtggggtggggggaggggagagggatagcactgggagatatacctaatgctagatgactagttaatgggtgcagcacaccagcatggcacatgtatacatatgtaactaacctgcacaatatgcacatgtaccctaaaacttaaaataataaaagaaaaaaagaaaagaaaa

SEQ ID NO: 10349 - DNA, 5536 bp, Homo sapiens
atttttttttaaattttattattattatactttaagttttagggtacatgtgcacaatgtgcaggtttgttacatatgtatacatgtgccatgttggtgtgctgcacccattaactcgtcatttagcattagatatatctcctaacgctatccctccccctcccccaaccccacaaccatccccagagtgtgatgttccccttcctgtgtccatgtgttctcattgttcagttcccacctatgagggagaacatgcggtgtttggttttttgtccttgctgtagtttgctgagaatgatggtttccagcttcatccatgtccctacaaaggacatgagctcatcattttttatggctgcatagtattccatggtgtatatgtgccacattttcttaatccagtctatcattgttggacatttgggttggttccaagtctttgctattgtgaatagtgccacaataaacatacgtgtgcatgtgtctttatagcagcgtgatttataatcctctgggtatatacccagtaatgggatggctgggtcaaatggtatttctacttctagatccctgaggaatcgccacactgacttccacaatggttgaactagtttacagtcccaccaacagtgtaagtgttgctatttctccacatcctctccagcacctgttgtttcctgactttttaatgatcaccattctaactggtgtgagatggtatctcattgtggttttgatttgcatttctctgatggccagtgatgatgagcattttttcatgtgttttttggctgcataaatgtcttcttttgagaagtgtctgttcatatcctttgcccactttttgatggggttgtttgcttttttcttgtaaatttgtttgagttcattgtagattctggatattagccctttgtcagatgagtaggttgaaaaaattttctcccattctgtaggttgcctgttcactctgatgatagtttcttttgctgtgcagaagccccatagtttaattagatcccatttgtcaattttgccttttgttgtcattgcttttggtgttttagacatgaagtccttgcccatgcctatgtcctgaatggtattgcctaggttttcttctagggtttttatggttttaggtctaacatataagtctttaatccatcttgaattaatctttgtataaggtgtaaggaagggatccagtttcagctttctacatatggctagccagttttcccagcaccatttattaaatagggaatcctttccccatttcttgtttttgtcaggtttgtcaaagatcagatggttgtagatatgcggcattatttctgagggctctgttctgttccattggtctatatctctgttttggtaccagtaccatgctgttttggttactgtagccttgtagtatagtttgaagtcaggtagcatgatgcctccagctttgttcttttggcttaggattgacttggcaatgcgggctcttttttggttccatatgaagtttaaattagttttttccaattctgtgaagaaagtcattggtagcttgattgggatggcattgaatctataaattaccttgggcagtatggccattttcatgatattgattcttcctacccatgagcatggaatgttcttccatgtgtttgtatcctcttttatttcattgagcagtggtttgtagttctccttgaagaggtccttcacattccttgtaagttggattcgtaggtattttattctctttgaagcaattgtgaatgggagttcactcatgatttggctctctgtttgtctgttattggtgtataagaatgcttgtgatttttgcacattgattttgtatcctgagactttgctgaagttgcttatcggcttaaggagattttgggctgagacgatgaggttttctagatatataatcatgtcatctgtaaacagggacaatttgacttcctcttttcctaattggatgccctttatttccttctcctgcctgattgccctggctagaacttccaacactatgttgaataggagtggtgagagagggcatccctgtcttgtgccagttttcaaagggaatgcttccagtttttgtccattcagtatgatattggctgtgggtctgtcatagatagctcttattattttgagatacaacccatcaatacctaatatattgagagtttttagcatgaagggttgttgaattttgtcaaaggccttttctgcatctattgagataatcgtgtggtttttgtctttggttctgtttatatgctggattacatttattgattttcgtatgttgaaccagccttgcatcccagggatgaagcctacttgatcatggtggataagctttttgatgtactgctggattcggtttgccagtattgtattgaggatttttgcatcaatgttcatcaaggatattggtctaaaattctctttttttgttgtgtctctgccaggctttggtatcaggatgatgctggcctcataagatgagttagggaggattccctctttttctattgattggaataatttcagaaggaatggtaccagctcctccttgtacctctggtagaattcggctgtgaatccatctggtcctggactctttttggttggtaagctattaattattgcctcaatttcagagcctgttattggtctattcagggattcaacttcttcctggtttagtcttgggatggtgtatgtgtcgaggaatttatccatttcttctagattttctagtttattttcgtagagttgtttatagtattctctgatggtagtttgtatttctgtgggatcggtggtgatatcccctttatcattttttattgcatctatttgattcttctctcttttcttctttattagtcttgctagtggtctatcaattttgttgatcttttcaaaaaaccagctcctggattcattgattttttgaagggttttttgtgtctctatttccttcagttctgctccgatcttagttatttcttgccttctgctagcttttgaatgtgtttgctcttgcttctctagttcttttaattgtgatgttagggtgtcaattttagatctttcctgctttctcttgtgggcatttagtgctataaatttccctctacacactgctttgaatatgtcccagagattgtggtgtgttgtgtctttgttctcattggtttcagagaacatctttatttctgccttcatttcgttatgtacccagtagtcattctggagcaggttgttcagtttccatatagttgagcagttttgagtgagtttcttaatcctgagttctagtttgattacactgtggtctgagagacagtttgttataatttctgttttttcacatttgctgaggagtgctttacttccaactatgtggtcaattttggaataggtgtggtgtgctgctgaaaagaatgtatattctgttgatttggggtggagagttctgtagatgtctattaggtctgcttggtgcagagctgagttcaattcctggatatcctttttaactttctgtcttattgatctgtctaatattgacagttgggtgttaaagtctcccattattattgtgtgggagtctaagtctctttgtaggtcactcaggacttgctttatgaatctgggtgctcctgtattgggtgcatatatatttaggatagttagctcttcttgttgaattgatccctttaccattatgtaatggcgttctttgtctcttttgatctttgttggtttaaagactgtttcatcagagactaggattgcaacccctgcctttttttgttttccatttgcttggtagatcttcctccatccctttaatttgagcctatgtgtgtctctgcacgtgagatgggtttcctgaatacagcacgctgatgggtcttgactctttatccagtttgtcagtctgtgtcttttaattggagcatttagcccatttacatttaaggttaatattgttatgtgtgaatttgatcctgtcattatgatgttagctggttattttgctcgttagttgatgcagtttcttcctagccttgatggtctttacaatttggcatgtttttgcagtggctggtaccagttgttcctttccatgtttagtgcttccttcaggagctcttttagggcaggcctgttggtgacaaaatctctcagcatttgcttgtctgtaaagtattttatttctccttcacttatgaagcttagtttggctggatatgaaaattctgggttgaaaattcttttctttaagaatgttgaatattggtccccactctcttctggcttgtagagtttctgccgagatcagctgttagtccgatgggcttccctttgtgggtaacccaacttttgtctctggctgcccttttaacattttttccttcatttcaactttggtgaatctgacaattatgtgtcttggagttgctcttcttgaggagtatctttgtggcgttctctgtatttcctgaatttgaatgttggcctgccttgctagattggggaagttctcctggataatatcctgcagaatgttttccaacttggttccattctccccgtcactttcaggtacaccaatcagacatagatttggtcttttcacatagtcccctatttcttggaggctttgtccatttctttttattcttttttctctaaacttctcttctcgcttcatttcattcatttcgtcttccatcactgataccctttcttccagttggtcacatcagctactgaggcttgtgcattcgtcatgtagttctcgtgccatggttttcagctccatcaggtcctttaaggacttctctgcattggttattctagttagccattcgtctaattttttttcaaggtttttaacttctttgccattggttcgaacttcctcctttagctcggagtagtttgatcttctgaagccttcttctctcaacgcgtcaaagtcattctccttccagttttgttccattgctggtgaggagctgcgttcctttggaggaggagaggcactctgatttttagagtttccagtttttctgctctgttttttccccatctttgtggttgtatctacctttggtctttgatgatggtgacgtatagatgggtttttggtgtggatgtcctttctgtttgttagttttccttctaacagtcaggaccctcagctacaggtctgttggagtttgctggaggtccactccagacgctgtttgcctgggtatcagcagcagtggctgcagaacaacggatattggtgaaccgtaaatgctgctgcctgatcgttcctctggaagttttgtctcagaggagtacccggctgtgtgaggtgtcagtctgcccctactggggggtgcctcccatttgggctactcgggggtcagggacccacttaaggaggcagtctgcccgttctcagatctcaagctgcatgctgggagaaccactactctcttca

SEQ ID NO: 10350 - DNA, 5129 bp, Homo sapiens
aaattttttttttattatactttaagttttagggtacatgtgcacaatgtgcaggttagttacatatgtatacatgtgccatgctggtgtgctgcacccattaactcgtcatttagcattaggcatatctcccaatgctatccctccccccaccccaccccacaacagtccccagagtgtgatgttccccttcctgtgtccatgtgttctcattgttcaattcccacctatgagtgagaacatgtggtgtttggttttttctccttgcgatagtttactgagaatgatgatttccaatttcatccatgtccctacaaaggacatgaactcaccattttttatggctgcatagtattccatggtgtatatgtgccacattttcttaatccagtctatcactgttggacatttgggttggttccaagtctttgctattgtgaatagtgccacaataaacatacatgtgcatgtgtctttatagcagcatgatttatagtcctttaggtatatacccagtaatgggatggctgggtcaaatggtatttctagttctagatccctgaggaatcgccacactgacttccacaatggttgaactagtttacggtcccaccaacagtgtaaaagtgttcctatttctccacatcctctcctgcacctgttgtttcctgactttttaatgattgccattctacctggtgtgagatggtatctcattgtggttttgatttgcatttctctgatggccagtgataatgagcattttttcatgtgttttttggctgtataaatgtctcctttggagaactgtctgttcatgtccttcgcccactttttgatggggttgtttgtttttttcttgtaaatttgtttgagttcattgtagattctggatattagccctttgtcagatgagtaggttgcgaaaattttctcccattctgcaggttgcctgttcactctgatggtagtttcttttgctgtgcagaagctctttagtttaattagatcccatttgtcaatttggtgccaaaacaccaacaccattgcttttggtgttttagacatgaagtccttgcccgtgcctatgtcctgaatggtaatgcctaggttttcttctacggtttttatggttttaggtctaacgtttaagtctttaatccatcttgaattaatttgtgtataaggtgtaaggaagggatccagtttcagctttctccatatggctagccagttttcccagcaccatttattaaatagggaatcctttccccattgcttgtttttctcaggtttgtcaaagatcagatagttgtagatatgcggcgttatttctgagagctcttttctattccatttatctatatctctgttttggtaccagtatcatgctattttggttactgtagccttgtagtatagtttgaagtcaggtagcgtgatgcctccagctttgttcttttggctgaggattgacttggcgatgcaggctcttttttggttccatatgaactttaaagtagttttttccaattctgtgaagaaggtcattggtagcttgatggggatggcattgaatctataaattaccttgggcagtatggccattttcacgatattgattcttcctacccatgagcatggaatgttcttccatttgtttctatactttttatttcattaagcagtggtttgtagttctccttgaagaggttcttcacgtcccttgtaagttagattcctaggtattttattctctttgaagcaattgtgaatgggagttcactcatgatttggctctctgtttgtctgttattggtgtataagaatgcttgtgatttttgcacattgattttgtatcctgagactgctgaagttgcttatcagcttaaggagattttgggctgagacaatggggttttctagatatacaatcatgtcatctgcaaacagggacaatttgacttcctcttttcctaattgaataccctttatttccttctcctgcctgattgccctagcctgaaattccaacactatgttgaataggagtggtgagagagggcatccctgtcttgtgccagttttcaaagggaatgcttccagtttttgcccattcagtatgatattggctgtgggttcgtcataaatagctcttattattttgtgatatgtcccatcaatacctaatttattgagagattttagcatgaagagttgttgaattttgtcaaaggccttttctgcatctattgagataatcatgtggtttttgtctttggttctgtttatatgctggattacatttattgatttgcatatattgaaccagccttgcatcccagggatgaagcccacttgatcatggtggataacgtttttgatgtgctgctggatttggtttgccaatattttattgaggatttttgcatcaatgttcatcaaggatattggtctaaaattctcatttttggttgtgtctctgcccggctttggtatcaggatgatgctggcctcataaaatgagttagggaggattccttctttttctattgattggaatagtttcagaaggaatggtaccagttcctccttgtacctctggtagaattcggctgtgaatccatctggtcctggactctttttggttggtaagctattgattattgccacaatttcagagcctgttattggtctattcagagagtcagcttcttcctggtttagtcttgggagagtgtatgtgtcgaggaatttatccatttcttctagattttctagtttatttgtgtagaggtgtttgtagtattctctgatggtagtttgtatttctgtgggatcggtggtgatatcccctttatcattttttattgcgtctatttgattcttctcttttttcttctttattagttttgctagcggtctatcaattttgttgatccttcaaaaaaccagctcctggattcgttaattttttgaagggttttttgtgtctctatttccttcagttctgctctgattttagttatttcttgccttctgctagcttttcaatgtgtttgctctagcttttctagttcttttaattgtgatattagggtgtcaattttggatctttcctgctttctcttgtgggcatttaatgctataaatttccctctacacactgctttgaatgtgtcccagagattctggtatgttgtgtctttgttcttgttggtttcaaagaacatctttatttctgccttcattttgttatgtacccagaagtcattcaggagcaggttgttcagttaccatgtagttgagcggttttgagtgagtttcttaatcctgagttctagtttgattgcactgtggtctgagagacagtttgttataatttctgttcttttacatttgctgaggagagctttacttccaactatgtggtcaattttggaataggtgtggtgtggtgctcaaaaaaatgtatattctgttgatttggggtggagagttctgtagatgtctattaggtccgcttggtgcagagctgagttcaattcctgggtatccttgttgactttctgtctcgttgatctgtctaatgttgacagtggggtgttaaagtctctcattattattgtgtgggagtctaagtctctttgtaggtcactcaggacttgctttatgaatctgggtgctcccgtattgggtgcatatatatttaggatagttagctcttcttgttgaattgatccctttaccattatgtaatggccttctttgtctcttttgatctttgttggtttaaggtctgttttatcagagactaggattgcaacccctgcctttttttgttttccatttgcttggtagatcttcctccatccttttattttgagcctatttgtgtgtgtgcacgtgagatgggtttcctgaatacagcacactgatgggtcttgactctttatccaatttgccagtttgtgtcttttaattggagcatttagtccatttacatttaaagttaatattgttatgtgtgaatttgatcctgtcattatgatgttagctggttattttgctcgttagttgatgcagtttcttcctagcctcgatgatctttacaatttggcatgattttgcagtagctggtaccggttgttcctttccatatttagcgcttccttcaggagctcttttagggcaggcctggtggtgacaaaatctctcagcatttgcttgtctgtaaaggattttatttatccttcacttatgaagcttagtttggctggatatgaaattctgggttgaaaattcttttctttaataatgttgaatattggcccccactctcttctggcttgtagagtttctgccaagagatctgctgttagtctgatgggcttccctttgtgggcaacccgacctttctctctggctgcccttaacattttttccttcatttcaactttggtgaatctgacaattacgtgtcttggagttgctcttctcaaagagtatctttgtggcactctctgtatttcctgaatctgaatgttggcctgccttgctagattggggaagttctggataatatcctgcagagtgttttccaacttggttccattctccttgtgactttcaggtacaccaatcagacgtagatttggtcttctcacatagtcccatatttcttggaggctttgttcatttctgtttattcatttttctctaaacttcccttcttgcttcatttcattcatttcatcttccatcgctgataccctttcttccagttgatcgcaacggctcctgaggcttctgcattcttcacgtagttctcgagccttggctttcagctccatcagctcctttaagcacttctctgtattggttattctagttatacattcgtctaaatttttttcaaagtttttaacttctttgcctttggtttgaatttcctcctgtagctcagagtagtttgatcatctgaagccttcttctctcaactcgtcaaagtcattctccatccaggtttgttccgttgctggtgaggaactgcattcctttggaggaggagaggcactctgctttttagagtttccagtttttctgccctgttttttccccatctttgt

SEQ ID NO: 10351 - DNA, 6066 bp, Homo sapiens
tttttttttccatagttcagagcatttatttatttttttaaatttattattattatactttaagttttagggtacatgtgcacaatgtgcaggttagttacctatgtatacatgtgccgtgctggtgcgctgcacccactaactcgtcatctagcattaggtatatctcccaatgctatccctcccccccgccccaccccacgaccgtccccagagtgtgatgttccccttcctgtgtccatgtgttctcattgttcaattcccacctatgagtgagaatatgcggtgtttggttttttgttcttgcgatagtttactgagaatgatgatttccaatttcatccatgtccctacaaaggacatgaactcatcattttttatggctgcatagtgttccatggtctatgtgtgccacattttcttaatccagtctatcattgttggacatttgggttggttccaagtctttgctgttgtgaataatgccgcaataaacatacgtgtgcatgtgtctttatagcagcatgatttatagtcctttgggtatatacccagtaatgggatggctgggtcaaatggtatttctagttctggatccctgaggaatcgccacactgacttccacaatggttgaactagtttacagtcccaccaacagtgtaaaagtcttcctatttctccacatcctctccagcacctgttgtttcctgactttttaatgattgccattgtaactggtgtgagatggtatctcattgtggttttgatttgcatttctctgttggccagtgatggtgagcattttttcatgtgttttttggctgcataaatgtcttcttttgagaagtgtctgttcatgtcctttgcccactttttgatgggattgtttgtttttttcttgtaaatttgtttgagttcattgtagattctggatattagccctttgtcagatgagtaggttgcgaaaattttctcccattttgtgggttgcccgttcactctgatcgtagtttcttttgctgtgcagaagctctttagtttaattagatcccatttgtcaattttggctttggttgccattgcttttggtgttttagacatgaagtcctcacccatgcctatgtcctgaatggtaatacctaggttttcttctagggtttttatggttttagttctaacgtttaagtctttaatccatcttgaattgatttttgtataaggtgtaaggaagggatccagtttcagctttctacatatggctagccagttttcccagcaccatttattaaacagggaatcctttccccattgcttgtttttctcaggtttgtcaaaaatcagatagttgtagatatgcggcgttatttctgagggctctgttctgttccattgatctataactctgttttggtaccagtaccatgctgttttggttaccttaggcttgtagtatagtttgaagtcaggtagtgtgatgcctccagctttgttcttttggcttaggattgacttggcgatgcaggctcttttttggttccatatgaactttaaagtagttttttccaattctgtgaagaaagtcattggtagctttatggggatggtattgaatctgtaaattaccttgggcagtatggccattttcacgatattgattcttcctaccgatgagcatggaatgttcttccatttgtttgtatcctcttttatttccttgagcagtggtttgtagttctccttgaagaggtccttcacatcccttgtaagttggattcctaagtattttattctctttgaagcaattgtgaatgggagttcactcatgatttggctctctgtttgtctgttgttggtgtataagaatgcttgtgatttttgtacattgattttgtatcctgagactttgctgaagttgcttatcagctgaaggagattttgggctgagacagtggggttttctagatatacaatcatgtcatctgcaaacagggacaatttgacttcctcttttcctaattgaataccctttatttccttctcctgcctaattgccctggccagaacttccaacactatgttgaataggagtggtgagagagggcatccctgtcttgtgccagttttcaaagggaatgcttccagtttttgcccattcagtatgatattggctgtgggtttgtcatagatagctcttattattttgagatacgtcccatcaatacctaatttattgagagtttttagcatgaagcgttgttgaattttgtcaaaggccttttctgcatctattgagataatcatgtggtttttgtctttggttctgtttatatgctggattacatttattgatttgtgtatattgaaccagccttgtatcccagggatgaagcccacttgatcatggtggataagctttttgatgtgctgctggattcggtttgccagtattttattgaggatttttgcatcaatgttcatcaaggatattggtctaaaattctcttttttgattgtgtctctgctgggctttggtatcaggatgatgctggcctcataaaatgagttagggaggattccctctttttctattgattggaatagtttcagaaggaatggtaccaattcctccttgtacctctggtagaattcggctgtgaatccatctggtcctggactctttttggttggtaagctattgattattgccacaatttcagctcctgttattggtctattcagagattcaacttcttcctggtttagtcttgggagagtgtatgtgtcgaggaatttatccatttcttctagattttctagtttatttgcatagaagtgtttgtagtattctctgatggtagtttgtatttctgtgggatcggtggagatatcccctttatcattttttattgcgtctatttgattcttctctctttttttctttattaatcttgctagcagtctatcaattttgttgatcctttcaaaaaacgagctcctggattcattaattttttggagggttttttgtgtctctatttccttcagttctgctctgattttagttatttcttgccttcttctagcttttgaatgtgtttgctcttgcttttctagttcttttaattgtgatgttagggtgtcaattttggatctttcctgctttctcttgtgggcatttagtgctataaatttccctctacacactgctttgaatgcgtcccagagattctggtatgttgtgtctttgttctcgttggtttcaaagaacatgtttatttctgccttcatttcgttatgtacccagtagtcattcaggagcagattgttcagtttccatgtagttgagcggttttgagtgagattcttaatcctgagttctagtttgattgcactgtggtctgagagatagtttgttataatttctgttcttttacatttgctgaggagagctttacttccaagtatgtggtcaattttggaataggtgtggtgtggtgctgaaaaaaatgtctattctgttgatttggggtggagagttctgtagatgtctattaggtccgcttggtgcagagctgagttcaattcctgggtatccttgttgactttctgtctcgttgatctgtctaatgttgacagtggggtgttaaagtctcccattattattgtgtgggagtctaagtctctttgtaggtcactcaggacttgctttatgaatctgggtgctcctgtattgggtgcatatatatttaggatagttagctcttcttgttgaattgatccctttaccattatgtaatggccttctttgtctcttttgatttttgttggtttaaagtctgttttatcagagactaggattgcaacccctgcctttttttgttttccatttgcttggtagatcttccttcatcctattattttgagcctatgtgtgtctctgcacgtgagatgggtttcctgaatacagcacactgatgggtcttgactctttatccaatttgccagtctgtgtcttttaattggagcatttagtccatttacatttaaagttaatattgttatgtgtgaatttgatcctgtcattatgatgttagctcgttattttgttcattagttgatgcagtttcttcctagtctcgatggtctttacattttggcatgattttgcagcggctggtatcagttgttcctttccatgtttagcacttccttcaggagctcttttagggcaggcctggtggtgacaaaatctctcagcatttgcttgtctgtaacgtattttatttctccttcacttatgaagcttagtttggctggatatgaaattctgggttgaaaattcttttctttaagaatgttgaatattggcccccactctcttctggcttgtagagtttctgccgagagatcagctgttagtctgatgggcttccctttgtgggtaacccgacctttctctctggctgcccttaacattttttccatcatttcaactttggtgaatctgacaattatgtgtcttggagttgctcttctcgaggagtacctttgtggcgttctctgtatttcctgaatctgaacgttgggctgccttgctagattggggaagttttcctggataatatcctgcagagtgttttccaacttggttccattctccccgtcactttcaggtacaccaatcagacgtagatttggtcttttcacatagtcccatatttcttggaggctttgctcatttctttttattcttttttctctaaacttcccttctcgcttcatttcattcacttcatcttccatcgctgataccctttcttccagttgatcgcatcggctcctgaggcttctgcattcttcacgtagttctcgagccttggctttcagctccatcagctcctttaaaaacttctctgtaatggttattctagttatatattcttctaaactttttcaaggttttcaacttctttgcctttggtttgaatttcctcccgtagctcagagtaatttgatcgtctgaagccttcttctctcagctcatcaaagtcattctccgtccagctttgttccattgctggtgaggaactgcgttcctttggaggaggagaggtgctctgctttttagagtttccagtttttctgctctgttttttccccatctttgtggttttatctacttttggtctttgatgatggtgatgtacagatgggtttttcgtgtggatgtcctttctgtttgttagttttccttctaacagacaggaccctcagctgcaggtctgttggagtacccagccgtgtgaggtgtcagtctgcccctgctggggggtgcctcccagttaggctgcttgggggtcaggggtcagggacccatttgagggggcagtctgcccgttttcagatctctagctgcatgctgggagaaccactgctctcttccaagctgtcagacagggtcatttaagtctgcagaggttactgctgtctttttgtttgtctgtgccctgcccccagaggtggagcctacagaggcaggcaggcctccttgagctgtggttggctccacccagttggagcttcctggctgctttgtttacctaagcaagcctgggcaatggcgagtgcccctcccccagccttgctgccaccttgcagtttgatctcagactgctgtgctagcaatcagagagactccgtgggcgtaggaccctctgagccaggtgtgggatataatctcctggtgtgccgttttttaagcctgtcggaaaaacacagtattcgggtgggagtgacccgattttccaggtgctgtctgtcacccctttctttgactaggaaagggaactccctgaccccttgcgcttcccgagtgaggcaatgcctcgccctgcttcagctcacgcacggtgcgtgcacccactgacctgcgcgcactgtctggcactccctagtgagatgaacctggtacctcagatggaaatgcagaaattacccgtcttctgcgttgctcacgctgggagctgtagaccagagctgttcctattccgccatcttggctcctcc

SEQ ID NO: 10352 - DNA, 20421 bp, Homo sapiens
tggatatccttgttaaccttctgtcttgctgatctgtctaatattgacagtggggtgttaaagtctcccattattattgtgtgggagtctaagtctctttgtagatctctaaggacttcctttatgaatctgtgtgctcctgtattgggtgcatttatatttaggatagttagttcttcttgttgaatcgatccctttaccattatgtaatggccttctttgtctcttttgatctttgttggtttaaagtctgttttatcagagactaggattgcgacccctgcctttttttgttttccatttgcttggtagatcttcctccatccctttattttgagcctatgtgtgtctctgcacgtgagatgggtttcctgaacacagcacactgatgggtcttgactctttatccaatttgccagtctgtgccttttaattggagcatttagcccatttacatttaaggttagtattgttatgtgtgaatgtgatcctgtcattatgatgttagctggctattttgctcgttagttgatgcattttcttcctagcttcgatgctctttacaacttggcatgtttttgcagtggctggtacaagttgttcccttccatgtttagtgcttccttcaggagctcttttagggcaggcctggtggtaacaaaatctctcagcatttgcttgtctgtgaagtattttatttctccttcacttatgaagcttagtttggctggatatgaaattctgggttgaaaattcttttctttaagaatgttgaatattgcccctcagtctcctctggcttgtaggtttttggccaagagattcgctgttagtctgatgggcttccctttgtgagtaccctgacctttctctctggctgcccttaacattttttccttcatttcaaccttggtgaatctgacagttatgtgtcttggggttgctcttctcaaggagtatctttgtggtattctctgtatttcctgaatttgaatgttggcctgccttgctaggttggggaagttctcctggataataccctgaagagtgttttctaacttggatccattctccccatcactttcaggaataccaatcaaacatagatgtggtcttttcacatagttccacatttcttggaggctttgttcatttcttttcactctttttgctctaatcttgtcttctcgctttatttcattcatttgatcttcaatcactgatgtcctttcttccacttgattgaatcggttattgaagcttgtgcatgtgtcacaaagttcttgtgctgtggttttcagctccatcaggtcatttaaggtcatctctacactgtttattctagttagccatttgtctaacctttcttcaaggtttttagcttccttgcaattggttagaacacgctcctttagctcggagaagtttgttattaccgaccttctgaagcctacttctgtcaacttgtcaaactcattctccgtctagttttgttcctttgctggcgaggatctgcaatcctttagaggagaagagacgctctggtttttggaattttcagcttttctgctctggtttctccccctctttgtggttttatctacgtttggtttttgatgttggtgacctacagatggggttttggtgtggatgtgctttttgttgatattgatgctattcctttcggtttgttagttttccttctaacagttgggcctctcagatgcaggtcttttggaatttgctggaggtctactccagaccctgtttgcctgggtatcaccagcagaggctgcagaacagcaaatattgctgcctgattctttctctgggagcttcgtcccagaggggtacctgcctgtatgaggtgtctgtcagcccttactgggaggtagctcccagtcaggctacacaggggtcagggacccacttgaggaggcagtctgttcattctcagagctcaaacaccatgctgggagaaccactgctctcttcagagctgtcagacagggacgtttaggtctgctgaagctgtctgctgccttttgttctgatatgccctgcccacagaggtggaatctacagcaaggcagcaggccttgctgagctgtggtgggctctgtcctatttgagcttcccagcctctttgtttacactgtgagcataaaaccgcctactcaagcttcagcaatggcggacaaccctccccttgccatgctgcagcatcgcaggtcaatctcagactgctacggtagcagtgagcaaggctccgtgggcgtgggacccgccaagccaggcacgggagggaatttcctggtctgcctgttgcaaagactgtgggaaaagcgcagtatttgggcaggagtgtaccgttcctccaggtatagactgtcacagcttcccttggctagaaaagggaaatcctccaacccttgtgcttctctggtgaggcgacgccccgtcctgcttccgcttgccctccatgggctgcacgcactgtccaaccagtccaaatgagatgaaccaggtacctcagttggaaatgcagaaatcacccatcttctgcatcagtcttgctgggagctgcagaccagagctgttcctatttggccatcttggaagccagacctaaatcctctctctctttttgtttttaactgaacttctgatatacagaattggattaaacataatccttagttgtaatacactgtcatctttggtcccatgcatagccctctttaattctaatttccttatttatgtatttacccctttataatttaatgcatacccatgaatctaccaccctacccagtgcctagaacattgataatcaagcacctctgtgccccttgtgttgtctccgccaatctgcacccttgctgaaaggcaaccactctcagaattttgtgcttattattcctttgctcttttccttatagattttttgtacacagatgtgtgcctcaataatgccttgtttcattttagttgttctgcaacttcctaaattacttactcctatgccagtaccactcaatgtcattgctacagtgttaagtaacctgatatctggtagacaagtcctgctgtccccaaattcctcattcctttttagaaggagatgccacggggaattggggacccattcctgaggacttcaccctgccctggatgaaattagcaccaactgtctctgcaagcacccttctgcttcccctgcctggtctctgatattggatgtgtttctttcagtacccataggggcagctgggttgttccagtgctgcagtgacagggaacactgcagaggttgggaagatccgtggagcagggtgcatgccaacccagaggcacccccacctgacactctccccatgtgacaagggctgtcccatccaaggccagcatgtccaaccattgtgcagctccctggggcaggttccaagttaaacacagtcagactttctgggacaattttaagctgagttaggagtatcctctaccagaccaaggaactggtgctgtgtgttactaattctgtctgcctgcaggaccttgccaggcttcttcagtggactcagggcaatatgaaagagctactttttattcattacctgcatcagaggacctgggctgcattttcctttgtagagatgcaggctcatttcagctgcctcctctctcccgaacactgggtttctcattctcattgacccagaacctacaatatccaaagcagagcggtaagggctggacagctaacacgagacccagccctgcctgtgggagcccataggggtgaggacagctccagcaacagggaacagttctacagagattcagggtggtcagggatttcctgaagtttgagggcagggagaccatatttcccaaaccccaaattaggacaatgaggtctggcagcaggacagaatatttcaaaccaggatcgtctcataaaactctcaggtttagtcaccgtaatgatgagaaccactcacaggcctctgcctaggagggtctgatgaggatgtggagaagggctcacagcagcaggtgtgagctgtgtttcatggggacagggaagggcaaggagacctagggaggctgcgttcataatggagtcaggaagatagaaaggatgggacaaagagatgtttaggacgtggacatgaaagcacttgggggtagattgggcttggagagcagaggagggacattgtgagtgtgtctgaagatctcagcctggtaacatggctacaaagacagggctcccactagagaagtacagcagtaaggaggaagggcagggaacttggtttcactgcggagagttgacatgtctatgaggccacagacagggcatgtggaccagtgtattagaatcactcagatcatgttaaaatgttgcttctgatgcagtaggtcagggtggagcacaagatcctgcattttcaacaggctcccaggtgacactggtgctgccagtccacagatcacgtagccaggctaacgagggtcccagacaagaatcgggcagagatcacatgtgacaatgtccctaatttggataaggagttaagtacatgttgaattgaggcatgtagtgtcatttttcatttccccccacaagaaaaatgtctcgacttccaggaaaaccattatcgatcaccctgattagaatccagggatgcaaaaatggaaggggagatgtgcctttatataatttttttcatatgaagaactgattcctctaactttcacaggtatgactttggttgtaagcagttgagcagagcgatatttttctttctgcctctttggaagtgaattttctgatgaggttagctccttctctccgtttcacccatgcgctcaccagcacaaggtggcagggtctgcaatcagacaggaagtggctggtgttgcagtaatattagagtcagggcagctctgtgccttcatcacatcatggcaggggaagaatcagaaggttcagaaccctgaagaccaggactcccatgcctcctcctcataatacctggactcaggtgttctcaggcatatccattagtatgaattgaagtcaacatgtgccccctgccaggggtcagtctcattctgagacctcagtctgcctgcagaaataagcagtgaatggatttcaggcatgggcccaaggttcagggggatgtatgtggttcctctgagaataaggaggctgtgtcctgcccagggttgtctctgcagacacctcctccctctgcttatattcagggaagggttgcaattcagctcctgcatattgggctcattttgaactttaatgacaccaaaaacaaaacagttgactttgtgacttggtttcctttgggagtttaaataaatattactatagaaatatcattctccttgtccaaggcttctcttctaagaggtgtgaagatagaggagaatcatattggatcctagcctttcctctatggcttgtggagattttgtgggaaggccagtcaaacatatgggtgccccacgcagacaggtttgaaagacctacctgagaagggggttctggttacatccttgccaccccaccaaatgctccccaagtctttggggctctatgattcaccacaagagagtgagccccagcatttcagaactgaccagatgcttagagaaaatctcattcagtggcctcagacaggaaagagaagctcagagagggaagaaatgtagcatcccaaggggttaatggaagaactgaggctcaaacccctgtctcctgaacccagtcacctctgcctccacctccctgccttccttggcctgaggagtggcattcactgcagcagcccaggtcccagccagcctttcatccctgaggccctgggctcaggagatctcagactcaatcctgaggagagaagacggagcagcctgttggaatggaagctgaccccaagtccacgtccacagagatcaaggctcctggatccgagtccagtcctctgtttttctcccactttccttcaatttccaaccggggttccaggcttgctaccaacatcccaagagtgatatttttcgaaggacaccatctgcccattgtatcaaccccagaggatcttcttccacagacccagggagaccaaataacaacagcaaaccaaatatcgatggcatctgagcatgtgccaggccatgctttaatcctttccgtaggttacctcctttaattcgcacaagcaccgtcagagacaggtccacgagctgagtttgctaggaccttggctgggataggacttgaattcctctgtgaaaatagagcccactccgaccccttccatggatagattagtagtggatctgcctctgcttttgatggtaagaggctagtgaaagattctggcttgggccttacactagggtggagactgagctaggattcgcctccaatacagccccccatgccccagcccgggctctcaaaggctgggcaagggatgggaccttcttccacctcttcactccccgcccaacccaaacacacagaggtttctccaaggtgtgtatgcttcgaggtcaagaagacccaacagtggtccaggacacaaaccccagtaggacctgagtctccagtgcctgcctgaagccagtcattcttcctcacagctgggagggggtcaatagtgaacacccatgtggctcagcagggctggggggtgcagcagcaagccagcagtggacaggcagctgagcactgctgaactgttggccaggaaggcagagacctgtggaaggaaggccaccagagaagggttcaggtctccagaccccttgttcttttgacagtgctagtgtgagcccatggctaaaatgagcctcacctgtaaagctgagtgaggcctcagttcagccagtcctgcctttgataataacagcagcttagagccagccctgcccttgggcctggttcagccccacctccccgaggaaacctgcctggcctctgtccagagctcagaagccacatccccaggtctgcaaggctcctctaacatttatctcacaggcatcacttgccttgccattcactttttcatgtgcattttttttttctatcaaatctaatttgatttggtacagtcaaggccctttcactgccaggattaaatgtgatttctgttctgccaaacgtcaaccggtggagaggagcctcagccatcacgccaagccatttgccactctgatggagacacaggctggagaaggaaggcgaggccactctgccagctggtggctgagacttgccaggcacccagggctcccagctgcctagctgcatggcaggtcagggaaaggaggacaaatattctcttaggccctgcagtagaactgaggtctaagaactgagaaccgaaccgaattccagaagctctttgttcccagttcatttcctagtccttagccctgcccctcccacagtccctcactggctgccccattggcctgcctgacctcatacccttggttcctgggaatagtgaattgttcaactggatgaggagggaggagaagaaaaagaaggctggtgggtggagcagatctgaagagacggccctgcggcctccaggtttccctgaggggaaataatggttaagtcggtggggaagggggtggagtgtggtaagtcattggtcagagactggggtgcagaaatgggtttaggagtaatgctgaggttgatagtggcccaggtaatagtggctggatggaggagagagtccctgaggatctggcagtcaagaatcaggagcctgagtgatgagaaagtgatccctgtggaggagtcatcagggcgtgacaggtgtgggtggagaggggctgtggggggccaggccaaagccctgacaaacactgggccagtggtcagtggatgacagcatcaaggagtggggagaggactgagccaagtggtgtagtggtgtgaaccacacaggaagggggatttctcacaaacagaaggtgggtgtggagctttgtatatggcagaggagccaggaggggccctgccctgcctccaggcctgagtgagcacgcagcccccagagaaggtggaagggcaacggggtgccggcacagaatgcttggtccagttgaggcagctggggggagctcacagaaggagctggggttgcagttttctgtatgtggagtggcagttccaaagggtgtagtggaagatttgagtggtagggaagctgagggctggagtcagaggtaagggggacagagcatcatggggggatggctctttagcaaagtcagcttctagaaagaggttctactaagcatcaggatccaacagaactttaaattgttccattctaccttccttcacttcagggtgtcattcactctcctctttttctggaggtgggtaccatcctgtttctagggctcctttttcattttgctggaatgcctccttgagtaactttcagactaggtggacagaagctcttctttcagagccactgcacacatccaaaaaggaagctgctgtttgctctgcaacagtgtagctccctttagcctgggagggtgaggagtctttgggtgaaaatattttgccagacacactctcctgtcagtactgagtcagggagctgatgggaaggccagacccttgagttcttcatctaagtggaggtgtctttcccacacatcctgcccacctctgctgtggaggttttgcccatgctctattcagcttctctattggaccttcacagctccaggagcctctcccaaaggctgccctgctcaaacagagctggatcaggctctgcagctggggcagacaggaacacaactgtcccagatgttgggattacagttctttaaggattaccctatgtttgctccttggagcttggggtttctctgggactcttttggtgagagccctgcacatccctggtatacaaggctactggtctcgttgcttgatttctccaccatcctgttgcacctgcttcctgtcttcctggaatttaccataatgtctggctgctgatggcctttcttgttttccagcactcttatcctgtccctcatgcacacgcatgcacacatgagcgaatcttctgtcatttcagagagacgctgggtaggaggggtgcagtgtgtgggcccaggctgcccccttgatcacactgcctttgtctttggaacagccccacacggttcagctggaacattcgaatggaatttttcaagcactccctgttctgggttgtcccctttggaggcttctcacatccttgctttgcagcgttgctagggaaggccatgcattatttaggactattttcctgtgcaacactcctctgcacaagaagtaacttgatagctccgtatcccagggaaaatgagggccccacctgggctgtggggaccatctgtgtggatgacgcttgttggcacagagttcatctgaagatgctgcttgtgtcccagctgtagtcacaaccctttttgctggggaaacagtgaagcttgtcaacagaaaacgctccaaattccaaatgcttcctagatgggagctgaggtctctgttggccatgacagggccagtcggtacagggatgccatattttagaagtagcattactacaggtaatgatacacttgacaatttgcatgattaagtggattgacacctaacagatgcagaccctgagggcagaggagccaagtcattgaggaagagatgacacttgatttgagtccagaaagatgaggcatgttcctggcaggaagtacaaggaatggtgttctaggaaaaaggagcagcatgaggggagtctcaggggcatgaaagcaattctgaggcttcggacaccaaaaccatagtctgtggataactgatgagcacagtgtctgccacagagtgtgtgtgtgcttgcacatgtgtgtgtctcctcctcatttcattccctgaaaacaaacagtgctcaggtctatttgagttcagctttcagggctgtcactcaaaccctcccctatctgccgaccattgtctaaaattacaagagaatttcacctcttgactctaagatgctgatcttttttcaaaatataaatacagggttggggtagggtagtgacttgtgtcttggcatcttctcactgcaggcagagaagacttcagagggcccagggaagcagcttaagccaccaatctctgcaccaagatctccacccatttccatcacagaaacaggccatcataactggatgcaataactttccccattttattgatagctaaacagagtccctgggaagtccaatggctcacctagggttgtgcaggtggtcagtgatggaaaattaaggaatattcagatcactggagaacttttgaaatgattaccttgtcatatttttagcacagaaccagacatccatccctggctccaggaaatcttcatcaagagcagaacattgttgtcaattaggatgatgtactgaggcatttgtagaaccacaataagtaaattatgactatttttaagggtgcttcctgggctgatggcctgaaataagacacattttagagagaacacctttaaggcaaggggcctgttacgtcataccatcatcacaacagcccatagatggaggtgttgctatccccattttacagatgataaaaatgtggagccacatttttctcctctattaaatgggtgttgggagcagaaactaggattccaagccagctccttccccctactttttcccattagggcaggcaggcaaatgcttcacttgtgttgcgtctcaccaagtacttctgtcagtgattttttttaatgtaaacttatttttgaagtataagatatatgtagacagcacacaaatcttaagggtgctgcttgatgatgtttacaaacaacatgctagtagaaccagaactcaattcaagcagcagaaaattccagcccccccttcccaacccccaggaatccctcatgcctcctccccatcactactcccttaaggtcacctctgccctaacttcatcaccttgcttttgcttctatacagaagacgtcacacaaaatgtactttttctcactcaaagttatgtcgaaagattcctccatgcttttacatataattgtggttccttcattctcgtggctgattagtgttctatatgaagttacacaatttatttttacattccactgttgatggacagtagaattgttgctttcagtttggtgctgttacaagtaatgctcctatgagcatttgtgaatgaacattttggtgaacatgtatatgcttttctgttaggtgtttacccaggagattcagcagttttagtcaatgtggctagttttccaaagtggttgtgcagttcacgttgccactaaaagcattgtgagcattctggttgctctacatcctcatcagcacttaatactatctttttcattttagtcattctttttttttctttcctaatttcaagtttttggtttcttaatttcaacaggtggtttttgatttcatggaaaaagtctttagtggtgatttatgaaattttgatgcactactcaatgtgtagtcttttatccctcaaccccctcccaccctttcccccaggtccctaaagtccattatatctttgtttttttttttgagatggagtctcactcggttgccctggccaaagtgcagtggcacgatctcggctcactgcaacctccgcctcccgggttcaagctattcttctgcctcagcttcccgagtagctgggactacaggtgagcaccaccatgcctggctaatttttgtatttttagtagagacagggtttcaccatattggccaggctggtctcaaactcctgacctcgtgatccacccgcctcggcaccccaaactgctgggattacaggcgtgagccaccgtacccagcttttatgtcgttcttatgactttgcatcctcataccttagctctcatttataagtgagaacatagatgtttggttttccattcctgagttacttctcttagaataatggtctgcaacttcatccaggttgctgtgaatgccattatttcattccttttttatggctgagtagtattccaaggtgtgtgtatatatatatatatatattatcatatttggtttatccactcattcattgatgggcatttaggctgtttccataattttataactgtgaattgtgctgctataaacatgcatgtgcaactgtcttgttcatataataacttattttcctctgggtagatacctagtagtgagattgctagatcaaacagtagttctacttttagttctttaaggaatctccacactgttttccataatggttgtactggtttacattcccaccagcagtgtaaaagtgttccattttcaccacatctacacaaacatctgctattttttgacgtctgttatttcttaaattatggccattcttgcaggagtaagtatttcattgtggttttaatttgcatttccctgataattagtgatgttgagcattttgtcatatgtttgtcagccatttgtatatcttcttttgagaattttctattcatatcctttgcctactttttgatggattatttgtttttttcttgctgatttgcttgagttccttgtagattctggatattagtcctttgtcagatgcatagtttgtgaatattttctcccactctgtgtttactctgctgattattttgctgagcagaaactttttagtttaattaggtcccatctacttatctttgtttttattgcatttgcttttaggttcttggtcatgaactttttgcctaagccaatgtctagaagagtttttcctgttatcttctagaatttttatggtttcaggtcttagatttaagtttttgacccatcttgaggtgatttttgtataagatgagagatgaggatccagcttcattcttcaacatgtgacttgtcaaatcccagcaccatttgttgaataggttgtccttttcccactttatgtttttgtttgcttggtcaaagatcagttggctgtgggtatttggctttatctctgggttctctattctggtccattggtctacatgcctatttttataccagtaccatgctgttttggtaactatagccttgtagtataaagttgggtaatatgatgcctccagatttgttctttttgtttagtcttgcttaggctatgtgagctctttttcagtttcatatgaattttaggattgttttctcttgttttgtgaagaatgataatggtattttgatgggaattgcattgaatttgtagattgcttttggcagtatggtcatcttcacaatattgattctacccatccatgagcttgttttgtgtcatctatgaattctttcagcaatgtttggtagttttccctgtggaaatctttcacctccttcattaggtatattcctaagtatttttcctttttttttttcttttctttttttttttttcttttttctttttttttttttttttttgcagctgttgtaaaagggattgagttcttgatttgattctggtcactgttggtgtatagcagtgctactgatttgtgtacattgattttgtatactgaaacttaactgaattcatttatcagatcaaggagctttttagatgagtctttagggttttctaggtatacagtcatatcatcggcaaatagcaacagtttgacttcctctttacagatttagatgccctttgtttatttctcttgtctgactgttctggctaggacttccagcatatactgttgaatagcagtggtgaaagtgggcatccttgtctcgttctagttctcagggggaatgctttcaacttttccccattcagtagtttaatgttggcatgggtctgtaatagatggcttttattaccttaagatatgtcccttctatgccaattttgctgaggcttttaatcataaagggatgctggattttgtcacgttttttctgcatctattgacatgcttatatgatttttgtttttaattatgtttatgtgatgtatcacatttattgacttttatatgttaaaccatccctgcatgcctggtgtgaaacctgcttgatcatggttaattatcttttttgatatgctgccgaattcagttagctagtattttgttgaagatttttgcatgtatgttaattagggatattggtctgtagttttcgttttttgttatgtcctttcccggttttggtattagggtgatactggcttcatagaataatttaaggaggattccctctttctctatcttttggaatagtttctttttttttttttgcagcaatatatcaatttaatttgtaaatgaggtataacaggtacactgcaaaagatatataagcatactgttcagtgaattcttaagtatatacacatgtaatcaccactcagatcaatacatagattcccagcactggaacagggctctcttatctttaatgtcaatagcaccaacaaccccagccccaccatctcacccccaagtaaccactattctcacttccatcaccatagattagttttgtctgtttctgaattttgtataagttgagtaaaatataattgttgtatgattctttttactttatattatatatgatttataagatcagttatgtatagtagaagtttttgttttgtgtggcattgcattgtattaatataccgtaatttatttatctactctctgatgtacatttgggtcacttccagtttttcttttattattattattattattattataccttaagttttagtatacatgtgcacaacgtgcaggtttgttacatatgtatacatgtgccatgttggtgtgctgcacccattaactcatcatttagcattaggtatatctcctaatgatatcccccctccccccaccccacaccagtccccggtgtgtgatgttccccttcctgtgtccatgtgttctcattgttcaattcccacctatgagtgagaacatgcagtgtttggttttttgtccttgtgatagtttgctgagaatgatggtttccagcttcatccatttccctacaaaggacatgaactcatcattttttatggctgcatagtattccatggtgtatatgtgccatattttcttaatccagtctatcattgttggacatttgggttggttccaagtctttgctattgtgaatagtgccacaataaacatacgtgtgcatgtgtctttatagcagcatgatttataatcctttgggtatatacccagtaatgggatggctgggtcaaatggtatttctagttccagatccctgaggaatcgccacactgatttccacaatggttgaactagtttacagtcccaccaacagtgtaaaagtgttcctatttctccacatcctctccagcacctgttgtttcctgactttttaatgatcgccattctaactggtgtgagatggtatctcattgtggttttgatttgcatttctctgatggccagtgatgatgagcattttttcatgtgctttttggctgcatgaatgtcttcttttgagaagggtctgttcatatcctttgcccactttttgaagggtttgtttttttcttgaaaatttgtttgagttctttgtagattctggttattagccctatgtcagatgagtaggttccaaaaattttctcccattctgtaggttgcctgttcattctgatggtggtttcttttgctgtgcagaagctctttagtttaattagatcccatttgtcaattttgtcttttgttgccattgcttttggtgttttagacatgaagtccttgcccatgcctatgtcctgaatggtattgcctaggttttcttctagggtttttatggttttaggtctaacatgtaagtctttaatccaccttgaattaatttttgtataaggtgcaaggaagggatccagtttcagctttctacatatggctagccagttttcccagcaccattgattaaatagggaatgctttccccatggcttgtttttgtcaggtttgtcaaagatcagatggttgtaggtgtgtggtattatttctgagggctctgttctgttccattggtctatatctctgttttggtaccagtaccgtgctgttttggttactgtagccttgtagaatagtttgaagtgaggtagcgtgatgcctccagctttgttctgttggcttaggattgacttggcgatgtgggctcttttttggttccatatgaactttaaagtagttttttccaattctgtgaagaaagtcattggtagcttgatggggatggcattgaatctataaataaccttgggcagtatggccattttcacgatattgattcttcctacccatgagcatggaatgttcttccatttgtttgtatcctcttttacttcattgagcagtggtttgtagttctccttgaagaggtccttcacatcccttgtaagttggattcctaggtattttattctctttgaagcaactttgaatgggagttcactcatgatttggctctctgtttgtctgttattggtgtataagaatgcttgtgatttttgcacattgattttgtatcctgagactttcctgaagtttcttatcagcttacggagattttgggctgagatgatggggttttctagatgtacaatcatgtcatctgcaaacagggacaatttgacttcctcttttcctaattgaatgcccaccttctcctgcctgattgccctgtccagaacttccaacactatgttgaataggagtggtgagagagggcatccctgtcttgtgccagttttcaaagggaatgcttccagtttttgcccattcggtatgatattggctgtgggtttgtcatagatagctctcattatttagagatatgtcccatcaatacctaatttattgagagtttttagcatgaatggttgttgaattttgtcaaaggccttttctgcatctgttgagaaaatcatgtggtttttgtcatttgttctgtttatatgctggattatgtttattgattttcatatgttgaaccagcgttgcatcccagggatgaagcccacttgatcatggtggataagctttttgatgttttgctgggtttggtttgccagtgttttactgaggatttttgcatcaatgttcatcaaggatattggtctaaaattctctttttttgtgtgtctctgacaggctttggtatcaggatgatgctggcctcataaaatgagttagggaggattccctctttttctattgattggaatagtttcagaaggaatggtaccagctcctccttgtacctctggtagaattcggctgtgaatccatctggtcctggactttttttggttggtaagctattaattattgcctcaatttcagagcctgttattggtctattcagagattcaacttcttcctggtttagtcttgggagagtgtatgtgtcgaggaatttatccgtttcttctagatattctagtttattttcatagaggtgtttatagtattctctgatggtagcttgtatttctgtgggattggtggtgatatcccctttgtcatttattattgcatctatttgattcttctctcttttcttcttcattagtcttgctagtggtctatcaactctgttgatcttttcaaaaaatcagctcctggattcattgattttttgaagggttttttgtgtctctatctccttcagttctgctctgatcttagttatttcttgccttctgctagcttttgaatgtgtttgctcttgcttctttagttcttttaattgtgatgttagggtgtcaattttagatcttacctgctttctcttgtgggcatttagtgctataagtttccctctacacactgctttgaatgtgtcccagagattctgatatgttgtgtctttgttctcgttggtttcaaagaacatctttatttccgccttcatttccttgtgaacccagtagtcattcaggagcaggttgttcagtttccatgcaattgagtggttttgagtgagtttcttaatcctgagttctagtttgattgcactgtggtctgagagacagtttgttataatttctgttcttttacatttgctgaggagtgttttacttccaagtatgtggtcaattttggaataggtgtggtgtggtactgaaaagaatgtatattctgttgatttggggtggagagttctgtagatgtctattaggtccgcttggtgcagagctgagttcaattcctggatatccttgttaactttctgtctcgttgatctgtctaatgttgacagtggggtgttaaagtctcccattattattgtgtgggtgtctaagtctttttgtaggttactaaggacttcctttatgaatctgtgtgctcctgtgttgggtgcatatatatttaggatagttagttcttcttgttggatggatccctttaccattatgtaatggccttctttgtctcttttgatctttgttggtttaaagtctgttttatcagagactaggattgcaacccctgcctttttttattttccatttgcttggtagatcttcctccatccctttattttgagcctatgtgtgtctctgcacgtgagatgggtttcctgaacacagcacactgatgggtcttgactctttatccaatttgccagtctgtgccttttaattggagcatttagcccatttacatttaagattagtattgttatgtgtgaatgtgatcctgccattatgatgttagctggctattttgctcgttagttgatgcattttcttcctagcctcgatggtctttacaacttggcatgtttttgcagtggctggtaccagttgttcctttccatgtttagtgcttccttcaggagctcttttagggcaggcctggtggtaacaaaatctctcagcatttgcttgtctgtgaagtattttatttctccttcacttatgaagcttagtttggctggatatgaaattctgggttgaaaattcttttctttaagaatgttgaatattggcccccactctcttctggcttgtggagtttctgccgagagatcagctgttagtctgatgggcttccctttgtgggtaaccccacctttcactcaggctgcccttaacactttttccttcatttcaactttggtgaatctgacaattatgtgtcttggagttgctcttcttgaggagtatctttgtggcgttctctatttcctgaattcgaatgttggcctgccttgctagattggggaagttctcctggataatatcctgcagagtgttttccaacttggttccattctcccagtcactttcaggtacaccaattagatgtagatttggtcttttcacatagtcccatatttctcggaggctttgttcatttctttttattcttttttctctaaatttctcttcacgcttcatttcattcatttcatcttccatcgctgataccctttcttccagttgatcgcgtcagttactgaggcttgtgcattcgtcacgtggttcttgtgccttggttttcagctccatcaggtcctttaaagacttctctgcattggttattctagttatccattcgtctaattttttttcaaagtttttaacttctttgccattggttcaaacttcctcctttagcttggagtagtttgatcttctgaagccttcctctctcaactcgtcaaagtcattctccatccagctttgttccgttgctggtgaggagctgcgttcctttggaggagaggcgctctgagttttagagtttccagtttttctgctctgttttttccccatctttgtggttttatctatgtttggtctttgatgatggtgacgtacagatgggtttttggtgtggatgtcctttctctttgttagttttccttctaacagacaggaccctcagctgcaggtctgttggagtttactggaggtccactccagaccctgtttgcctgggtatcagcagcggtggctgcagaacagcggatattggtgaaccgcaaatgctgctgcctgattgttccttgggaagttttgtctcagaggagtacccggccgtgtgaggtgtcagtctgcccctattggggttgtctcccagttaggctactcgggggtcagggacccacttgaggaggcagtctgcccgttctcagatctcaagctgcgtgctgggagaaccactactctcttcaaagctgtcagacagggacatttaa

SEQ ID NO: 10353 - DNA, 44311 bp, Homo sapiens
cttccacaacgattgaactagtttacagtcccaccaacagtgtaaaagtgttcctatttctccacatcctctccagcatctgctgtttcctgactttttaatgattgccattctaactggtgtgagatggtatctcattgtggttttgatttgcatttctgatggccagtgatgatgagcattttttcatgtatttcttggctgcatgaatgtcttcttttgagaagtgtctgttcagatcctttgcccactttttgatggggttgtttgtttttttcttgtaaatttgtttgagttctttgtagattcaggatattagccctttgtcagatgagtagattgcaaaaattttctcccattctgtaggatgcctgttcactctgatggtagtttctttgctgtgcagaagctctttagtttaattagatcccatttgtcaattttggcttttgttgccattgcttttggtgttttagacatgaagtccttgcccatgcctatgtcctgaatggtattgcctaggttttcttctagggttttaatggttttaggtctaacatttaagtctttaagccatcttgaattaatttttgtataaggtgtaaggaagggatccagtttcagctttctacatttggctagccagttttcccagcaccatttattaaatgggaaccccttccccatttcttgtttttgtcaggtttgtcaaagatcagatggttgtagatgtgtggtattatttctcagggctctgttctgttccattggtctatatctctgttttggtaccagtaccatgctgttttggttactgtagccttgtagtatagtttgaagtcaggtagcgtgatgcctccagctttgttcttttggcttacgattgacttggcaatgtgggctctttttgggttccatatgaactttaaagtagtttttttttccaattctgtgaagaaagtcattggtagcttgatggggatggcattgaatctatcaattaccttgggcagtatggccattttcatgatattgattcttcctatccgtgagcatggaatgttctcccatttgtttgcgtcgtcttttattttgttgagcagtggtttgtagttctccttgaagaggtccttcacatcccctgtaagttggattcctaggtattttattctctttgaagcaatagtgaatgggagttcactcatgatttggctttctgtttgtctgttattggtgtataagagtgcttgtgatttttgcacattgattttgtatgctgagtctttgctgaagttgcttatcagcttaaggaaattttgggctgagacaatggggttttctaaatatacaatcatgtcatctgcaaacagggacaatttgacttcctcttttcctaattgaataccctttatttctttctcctgcctgattgccctggccagaatttccaacactatgttaaatttgagtggtgagagagggcatccctgtcttgtgccagttttcaaagggaatgcttccagtttttgcccattaagtatcatataggctgtgggtttgtcttaaatagctcttattattttgagatacatcccatcaatacctaatttattgagagtttttagcatgaagggctgttgaattttgtcaaaggccttttctgcatctattgagataaccatgtggtttttgtctttggttcagtttatatgctggattacgtttattgatttgcatatgttgaaccagccttgcatcccagggatgaagcccatttgattatggtggataagctttttgatgtgctgctggattcggcttgccagtattttatcgaggatttttgcattgatgttcatcggggtattggtctaaatttctcttttcttgttgtatctctctcaggctttggtatcaggataatgctgccctcataaaatgagttagggaggattccctctttttctattgattggaataatttcagaaggaatggtaccagctcctccttgtacctcttgtagaatttggctgtgaatccttctggtcctagactttttttggttggtaggctattaattattgcctcaatttcagagcctgttattggtctattcagggattcaacttcctcctggtttagtcttgggagggtgtatgtgtccaggaatttatccatttcttctagattttctagttttttctttttttgtgtgtgtataggtgtttatagtattctctcatgatagtttgtatttctatgggatcggtgatgatatcccctctatcattttttattgtgtctatttgattcttctctcttttcttctttattagtcttgctagcagtctatcagttttgttgatcttttcaaaaaaccagctcctggattcattgattttttgaagggttttttgtgtctctatctcgtttagttctgctctgatcttagttatttcttgccttctgctagcttttgaatgtgtttgctcttgcttctctagttcttttaatcgtgatgttagggtgtcaattttagatctttcctgctttctcttgtgggcatttaatgctataaatttccctctacacactgctttgaatgtatcccagagattctggtatgttgtgtctttgttctcactggttttaaagaacatctttatttttgccttcatttcgttatgtacccagtagtcattcaggagcaggttgttcagtttccatgtggttgagcagttttgagtgagtttcttaatcctgagttgtagtttgattgcactgtggtctgagagacagtttgttataatttctgttctttcacatttgctgaagagtgctttacttccaactatgtggtcaattttggaataagtgcagtgtggtgctgagatgaatgtatattctgttgatttggggtggagagttccgtagacgtctattaggtctgcttggggcagagctgagttcaagtcctgaatatcctttttaactttgtgtcttgttgatctgtctaatgttgacagtggggtgttaaagtctcccattattattgtgtgggagtctaagtctctttgtaggtctctaaggacttgctttatgaatctgggtgctcctgtattgggtgcatatatatttaggatagttagctcttcttgttgaattgatccctttatcattatgtaatggccttctttgtctcttttgatctttgttggtttaaagtctgttttatcagagactaggattgcaacccctgcctttttttgttttccatttgcttggtagatcttcctccatccctttattttgagcttatgtatgtctctgcacatgagatgggtctcctgaatacagcacactgatggatcttgactctttttccaatttgccagtctgtgtcttttaattggggcatttagcccatttacacttaaggttaatattgttatgtgtgaatttgatcctgttattatgatgttagctggttattttgccccttagttggtgcagtttcttcctagcatcgatgttctttacaatttggcatgtttttgcagtggctggtacaagttgttcctttccatgtttagtgcttccttcaggagctcttttagggcaggcctggtggtgacaaaatctcttagcatttgcttgtctgtaaaggatttcatttctccttcacttatgaagcttagtttggctggatatgaaattctgggttgaaaattcttttccttaagaatgttgaatattggcccccactctcttctggcttgtagggtttctgccgagagatctgctgttagtctgacgggcttccctttgtgagtaacccgacctttctctctggctgcccttaacattttttccttcatttcaactttggtgaatctgacaattatgtgtcttggggttgctcttctcaaggagtatctttgtggcattctatgtatttcctgaatttgaatgttggcctgccttgctaggttggggaagttctcctggataatatcctgaagagtgttttccaacttggttccatgctccccgtcactttcaggtacaccgatcatacatagatttggtcatttcacatagtcccatatttcttggagtctttgtcagtttctttttacccttttttctctaaacttctcttctcgcttcatttcattcatttgatcttccatcactgataacctttcttccagttgatcgaattggctactgaagcttgtacattcaacacgtagttctcgtgccatggttttcagctccatcaggtcatttaatgacttctctacactggttattctagttacccattcgtcgattttttttcaaggtttttagcttctttgtgataggttcgaagttccttctttagcttggagaagtttgatcatctgaagctttcttctctcaactctttaaagtcattctctgtgcagctttgttccattgctggtgaggagctgcattcctttggagcgggagaggcactcaatttttagaattctcaggttttctgctctgttttttctccatctttgtggttttatctacctttggtctttgatgatggtgatgtacagatggggttttggtgtggatatcctttctgtttgttagttttccttccagtagtcaggaccctcagctgcaggtctgttggagtttgctggaggtccagtccagaccctgtttgcctgggtatcagcagtggaggctgcagaacagcgaatattgctgaacagcaaatgttgctgccttatcgttccttgggaagcttcatctcagagaggtaccggccgtgtgaggtgtcagtctgcccctactggggggtccctcccagttaggctactcaggggtcggggacccacttgaggaggcagtctgtccgttctcagatctcaaactccatgctgggagaaccaccactctcttcaaagctgtcagacagggacatttaagtctgcagagatttctgctgccttttgtttggctatgccctgcccccagaggtggagtctacagaggcagtcaggcctccttgagctgaggtggcctccacctggttcaaacttcccggccactttgtttacctactcaagactcagcaatggtgggtgcccctcccacatcctcgctgccaccttgcagttagatctcagactgctgtgctaacaatgagcgaggctctgtgggcgtgggaccctctgagccaggcacaggatataatctcctggtgtgccgtttgctaagaccattggaaaagcacagtattagggtgggaggacccaattttccaggtgccatctgtccagcttcccttggctaggaaagggaattccctgaccccttgtgcttcccaggggaggcgatgcctcgccctgctttggctcacgctcggtgggctgcacccgctgtcctgcacccactgtccaacaagccccagtgagatgaacctggtacctcagttggaaatgcagaaatcacccaccttctgcatctctcatgctgggagccgtagagtggagctgtttctattcggccatcttggaaccacccccagctgaatctttcttaagccacaattctgaacactgctttttatgccttcagctaaatttactatttgttaactcatatttagaaaacagaattaagtagtttgggagctagaagttcaggctcaaacaatttatcagtgctagatccagaactagcaccctaggccttgacacccctgtttatggatgtttttctgtttatgtttgttttatttgttcaaccaaaatttaaacaacttgagggcacagcccctctccttatgatttcccattgctcagaaggaagctttgcacctaaacgcacactggtaatgcagaaaggaaatctggtgctttaggttacaaattagattaaatggatttatgggctaaacattttcaattcttgcttgccatataatgagagaaattaaagcccattaaatgattaatactttatctaatgactatcctcccaggagttcaaagtctttttgaaataatgctctaacattcagtattcaactattccttgagcacttctgaaagcagcagtaatatagttagggtacctctgagtgtactgatatgagtacttccaaatgggttcttcctgcttactgtgactccacgagagaatcaggttcatttgattcctttgttcttacagtccccctgtgaaacctgcgtcatcacaatacagaggcctgcatcttactgcacaagtggagaggccatcttctaacatgtttaacactgcaggttccctcaacccatcagtgtcatctcagaaggatcccagtggaattttgttacttctgggactctttcttttttcattttacataatgtgttctcttctgtgccattgtccttgttacataaaactaagcatccctccatatatgaaggaaacaaaaccagtatctcaaagacatatctgcactcccatgttcagtgaagcattacccacaatagacaagacatggaaacaatgtaagtgtccaaggacagattaatggataaagaaaatgtgatccacacccacacccccacaacacacacacaatggaatataattcagccataaaaagaaggaaatcctgtcatttgtaactacgtggatgaaactcgtgggcattaagctaagtaaaataactcagagagagtaagacaaatactgtatgatttcatgtacatgtggaattcaaaaagttgaactcactgaaactgaaaataaaatgatgttttcccagggaaaggaggtggggaaaatgggagctgtttattgaagggtacaaaccttcagttatgtgatgaataagttctagggatctaatgtacagtatggtgactatggttaataatgttgtattgtctacttgaaatttactaagagagtagatcttaaatagttttgccacacacaaaaaaggtagctatgggaggtgatggatgtgttaaccaacttaattgtgacaatcattttaccatatatatgtatatcaaatcatcatgtacactttaaatttatataattttattgtcaattatacctcacaaaagggaaaaaatgtaaacttaaaatattttttgaattaaaaaattaagcatttctccttagtggcctgattggaatctcagaatgtttactttcccactgatcccaatcaggcaggtgaacttcactgactcagttgcttaggacccagcaacttcggggtcatggtttttgagactctcggtaaggaaataaatatatttacagtatctgcttgggacacttgtagatcacagtccactgccttatttttaacaatattatccatatatctgtttttataccactgacccatctatctttcttattctcatgaactgaattttaaatttttttctcacctatttttaataatttcccctgataaaactttgcggttaaaaaaaaattcctgcaatatcccccaaattagaatagcaatgaaaacaagaaagtaaaattactatcatcttattcttataatatctaagttgtggaataccctattttcttagaatcataaaattttagaatgggaaatgtccttagagaatttgacagttacaatacagtgcggagtaactagaatgctttatgaatggctcattctaattcagtaaggaaatttcatttcatttgtcaggaaaggtatcaaccccttggaaatggccaagagagattgccaactgtccatcagattaatattgcaaatgtctagcagactctccagggattagctgattctatggggtgtgtacctttgattgcttttgacaaggccattttataaaatctgtagtgatatggtattacccttgtagaaaaccggtaagaatacaagtatttcttgtgtatagcaaagcaaatggtttctgttcatggtgatttaatttctccagtggagaatatgagtatctgtaagccaatttctcatttgaatctgtctcagtatcttacggattttctcattaatcaaagaattaaatagaatctttgacaatgttcattttgtatctgtatggaaattatgattttgtcattttgaaaattatgctttaaaacaactttgttctgaaaattttgtttaaaatctattaactgaggctcatgcctgtaatcccaccactttgggagactgaggcaggtggatcacgaggtcaggagatcaagaccatcctggctaacacggtgaaaccgtctctactaaaaatacaaaaaattagccgggcatggtggcgggcacctgtagtcccagctagtcaggaggctgaggcaggagaatggcatggaacctgggaagccgaaattgcagtgagccatgatcacgccattgcactccagcctgggtgacagagcgagactccaaaaaaaaaaaaaaaaatctattaactgattttctgtctttagtaaacagtatactttaatatggtaaacattattatatcttaaggaatttgtaatatttcagagtttttatgataggcaccaatttatagctatgtaactatctcggagacgtggtagcaaaatgactaagcagatgggtttagaaccagagtgctcagtaaaaatcccagctctcccctttatcagctgtgagctatatagccagttatttaaaccctttctgtttcagtttcttcatctttaccataagtttgatgtgagaatcaaatgaataaatatatgtaaagcacttggaacaattgcacagtgttttactgtgttttgtattgtcattctcaaaagaatcacagatgagtttaacttctgaatgctcaatcttgccatggggagagagaaaacctctcaagaatggggaaattttttgcctgtccagacctgggtgaacaagtctgtctaacttgaggtttcattgagtagccagtcccttgaggttctcaccctgagctagattccaacttgtcctctgtgagagttctgcattgtcaccttggctagtctgaactaaaatttcaataattctcctttttgtatatttgcagttaggatgggtcaaaaggagactcttgcaaagtttttggaaggcaggcaggaggcagcagacgttttgtagttgacacatctgttgctagtccactgactcatcttgctggtgtggggcagcaactgggcctacagatgctttacctgcccctgaatctttcctcaatttttcttgaaggttgtatgtttagctctataacaaagttcccagcttctgcaggataccttcatcaccaagagcaggtttcagtccattcctacgaggttccagcctattagtgagcttttcttcctgtctgcactgagaacttcatgctccagcatcagatttgtagccctccaagacggcttaaccagcccccgtaattgtataaacaaatcctgctttaataaatcccttcatatatatacacatatctcctactgactctacttctcttgttaaacctgactgatgcagaatttggtaacaggagtgaggaagccaggaagagtgcattcaactgtttattcattcactcaatacaaatggaccatattacatatatacaggttaaatatcacttatcagaaatgcatgggacaagaagagtttcgaatctggcggtttttcagattttgaaatattttcacatgcataatgagatatcttggggatgggacccaaggttaaactccaaatttactaatgtcttatacataccttgtatacatagtctgaaggtaatttcatatggtagttttaccaactttgtgcatgaaacaaagtctgtattgtgtaactaggtgtggaattttccattttccacttggaatattatgtcgctgctcaaaaagtctctgagtttgaagcattttggatttcagatttttagattaggaatgctcaacctgtaattatataatctgcctttatcacctgaaaacatatcatgaacattttgttctatgtgaatacttaatctatttttaatgggtagatagtcctttgtaattatgaaccatagtttatttaataaagtacttaatatgagcattcagattgcttcgaatgacaagcccaccataaacatttctgtacgtaggtatttgcatacttttctgattatcctcttaggataaattccagaagagaaattgtttagtcaagtgatatgctcaattaagttttttatttgtttgatcagaataggtgttccgatttcctcccctaccagctgtgtatgaaatgactcgattcttcagaacttccttgatattttaaatcaaggcacccacaatgaattgcagtggtttgttctgtgaattaaactggacttactattgcttttagaggtctctaaatgctgtctattaagccaattggctgctttccccttcaggtgacatctccatagccagcttttaaactcttagggtcagtgactgaagccagagcctttccagttctagttccgctgcacacctccaagaacctccatcagggccatcctccaccatataagactatgcttaaagcaagcaaataggccaatgctagctgaggaagttttctgaaagcagcttgcttgtgggtagtgctgatgtgctttcattcaccactgtttgcaaagtactaaagtaattggagatctttagcaggaaattctgctgactgagagaggatgaagtgctgaaatccttttaactcccacagcacttactcagaaccatctgaatgcatttaaagtatctgttaaaagatgctaagaggagtttgaaagttatcaccagagcctacccagatggcaatgctcacataactgtttatttttcatcctgtttaaaagaatattctcacaatgcaggtttagaggtgatgaggaacctcagaatgacataatccattttaactataaaccataaatatccattaaaatctcatcccacccatactctctttttcttttcaaatgtgaaagaatacaatcctcctcttttcaaaaaaaataactgtgaaagctacttcactacaagtatagcagttgaaatggctttggcccataatccatggctttttctggttaatctttcttctctgctttttggttcaggagaataaactacatctcctttctgtagatattcacatacaagagaaggggtacaatagcactgttatggtgagtaaagtgttaaggaagtactggttaatccatgagggatgagccaacagtatcaatgcaataggtttgagaggttttatatcttccttggagatcaaaagaatactagaactggcggactaggagatgaaaaagtaattaaaagaatggatatgtgacaaagacatagtagcattcaaagaactctatttcagaaatgtgaaacagaaggaatttttgcaagtaaaatttatttaaaagacttgagaagtgtcccacttctgagtggcttcttgagtgtgaggttgctgtctaattagcaagataaatttcagggcatataactgcatgggtgtgtttgtatactggtagccatttaggtgaaagtgtcccttcttgttaacaagcaaagttcctctgtcatttggaatcatctgaaacatttttttggtttctctggaaattttatggtctctattatccaaatgattcagaaatgaaatgttgtttgcccctgagagctttcctactgagcagtgtgtctacagattgcagtctgacaacaatatcaactagttttaagagagaaaaaaattgagtcgctagaaataaagggagtccttcatcctcagacatactgggccaggcagtcagtattcagctctggattcaaagcccttgcttggtaacattgtcctggtgtcctggttgtttatggccaatgatcatttgaatcttcaggagtctgtaacattgtttaaaaaggcttgaggagaggagtggagcaagatggccaaatagaaagctccaccaatcgtccccctaccaagacactagtttttgtttttgtttttgttttttgttttttgtttttccagatggcgtctcactctactgcccaggctagagtgcaatggtgcaatctcagctcactgcaaccttcgcctcccaggttcaaatgattctcccgccttagcctcctgagtagctgggattataggtatccaccatcaagcctggctaattttagtatttttgtagagatggggtttcactgtgttggccagactggtcttgaactcctgaccttaggtgatctgcccgccttggtctcccaaagtcctgggattacaggcatgaaccaccgtgtctggcccaaggacaccaatttaacaactatctattaatacatttaaaaagcacatttatatgaaccaaaaataggataaacactcacagttgttgattttaacttcgtatcactgaaagaggcactgaagaagccaggaaagacagtcattaatcagtaacaccactcctccccttttcctcagtagtggctacatggcacagagaaagagtctgtgtgcttgagagagggaggacacagcaattgtgagacattgcattgaactcagtgctgctctgtcatggcagaaacaaaactgggctgaactctgctgatgcctgtccacgaagggagtatgtaaacccgacctagccagaggggtatcacacatcccagtagtcagaacttgagttccagtgagcctcaccaccatggcctaaagtgctctgaggccctaaataaacctgaaaggcagtctaggccacaaacactgcaattcctaggtgaggcctagggctgaactgagcttagagccagtggacttagggggcacatgatgtactaagacatccttggggtgcctatgggagtgcttgcaccaccgttcccccatcctcaggctgcacagcttatggctccaaaagagaccccgtccttctgcttgaggagaggagagggaaaagtaaagagaactttgtcttgaatattggatacctgctcagccacagtacaatagggcatcagtcagagttgtgaggtcccctttccaggtcctagctcctggacaacatttctagacacactctgggccagaagggaaaagactaaacagcccttggaccctgaataaccagcagcaacacccaggtagtatgctgtaggccttgggtgagactctgaggcatggtggttttaggtgtgacccaccacattcccagttgtggtggctatgagaagagactctttctacttgaaaaaggggaagggaaaagtgaaggggactttgtcttgttccttaggtactagctcagccacatgagagtagagcaccaagtgggctcttgggggctatggttccaggccttggttcttagacagcatttctggacctgccctgagttagaggtaagcccactgccttgaagggtgtcataggcctggaagcattcatcacaagctaactaaagagatcttgggccttacacgtacactgatggtagcctggctgtactccccatgggcctgtggtgatggtgaccaaggggagaggctcctctgcctgtggaaaggggagggaagagtgggaaggactgcgtctcatgatttgagtgtcagctcagtctcagtaaaagaaaacaccaggtaggcatctaagggtttttaactccagtccctggctcctggacagcacttctggagcctcctgggccctagggaaacttaatgtcatgaaggggagaacacaaccctggctggcttcatcacctgctgattgtagagccctggggccttgagtgaacattggcagtgtccaagtgatagttacagtgggcactgggaagacccagtgctgtgctggctttaggtctgacccagcacattcccagtggtagtggtcaaaagagtgcttggattacaacatccatagttctaggcagctcaccacagagacagagactccattcatctgggagaaagtaagggaagagaacaaagtctctgcctggtaatccaaagattcttctggatcttttccaaaataatcaatgtggtacctctaaaagactccaaaaagtacaacattgttgggcttggggtggcccctaatgcagatacagcttttattaaaacacccaagtccttttgaatacttggaaagccttcccaaaaaaggaagaatacgaagaaggccagactgagaagactgcaataaatacctaactcttcaatgcctggacacagacaaacatccacaaacatcaagaccatccagaaaaacatgacctcaccaaatgaactaaataagtcactagagaccaatcttggagaaacaatgatatgtgaccattcagacagggaattcagaatacctgttttgagaaaactcagtgaaatccaagataacatagagaaggaattcagaatattgttcagataaattcaacaaagagattgaaataatttaaaataatcaagcaggaattctggagttaaaaatgcaaacgacatactgaagaatgcatcagagtcttttaatagcagaattgatcaagcagaagaaagaattaatgagcttgaaggcaggctatttgaaaaaacatagaggagacaaaagaaaaaagaatagaaaacaatgaagcatacctacaggatctagaaaatagctttaaatgggcaaatataagagttattggccttacagagcaggtagagaaagagataggggtagaaggcttattcaaagggataataagagcttcccaaacctagagaaagatatcaatattcaagtacaagaaggttatagaacaccaaacagatttaacccaaagaatactgcctcaagacatttaaaaaacaaactcccaaagatcaaggataaagaaaggatcataaaggcatcaagataaaaagaaacaaataatatacaatggaactccaataagtctggtagcagatttttcagtggaaaccttataggccaggatagaatggcttgacatatttacagtgctgaaggaaaatatcttcagatatgaagcagaaataaagactttcccagaaaaactaaaactgagggattttgatcaatactagacctttcctacaaggaatgctaaagggagttcttcaatcagaaagaaaaaactgttaatcggcagtaataaatcacctgaagatagaaaactctctggtaacggtaagtacacagaaaatcaaagaatattataatactgtagttgtggtttgttaactactcttcagtagaaagactgaaagtagaaagatgcaccaatcaaaaacaataaatgcaatgactttttaagacttagacaataaaataagatataaatagaaacaacaaaaaggtaaaaagcagggggatgaagttatggcatagagtttgtattagttttctttttgcttgttgtttgtttatgcaaacagtgttaacttgttatcaacttaaaataatgggttatatgattgtatttgcaagcctcatggtaacctcaaatcacaacagatacacaaaagataaaacgcaagaaattaaatcacaccaccagagaaaaaacacctccactaaaaggaagacaggaagggaggaaagaagaaaagagcagatcacaaaacaaccagaaaacaaataacaagatggcaaaactaattggactaaagtctccaatttgattggagagtttgattggactaaactctccaatcaaaagatatagagtggctgaatagattaaaaaacaatgatcaattgcctataagaaacacactttacctataaagacaaacacagactgaaaataaagggatggaaaaagatattctatgccagcggaaaccaaaaaagagcagaagtagctatacttatatcagacaaaatagctttcaagacaaaagctgtaagacaagacaaagaaggtcactatttaattataaagtggtccattcaggaagagggtataataattgtaaatacatatgtaccccacactggatcactcagatacatatatatatagcaaatatttttagagctaaagaaagagggagagagaccccattaaaataatagctgaagacttcaacaccccacttttagcattgaacagatcttccagacagaaaatcaacaaagaagtatgggacataatctgcactatagattaatggacctaataaatatttacagaatagttcatccaaaggcagcagaatacacattctttcccttagcacatggatcattctcaaggatagacccacaaaacaagtcacaaaacaagtattaaaacgttcaaaaaatgaaataatatcaaatgtcttctctgactacagtgtaataaaacttgaaatcaataataagaggaattttggaaactgtgcaaacacacaaacattagacaatatgctcctaaatgagctgtaggtcaatgaagaagttaagaaggaaatagaaaaaaaattttgaaacaattgaaaattgaaatacaacatactaaatcctgtgggatacagtgaaagcagtaataagaggtaaatttataggtataagtgcctacatcaaaaaagaaaaaatacttcaactaagcaacctaacaatgtattttaaacaactaggaaagcaagagtaaaacaaatgcaaaattattagaagaaaagaaaaaataaaaatcataggagaaataaatttcaaataaagtaaaccacttaaaaaatcaacaaaacaaaaagttggtgtttttttttttttgttttgttttttttctgagaccgagtctcactctgtcctccaggctggagtgcagtggcgggatctctgctcactgcaagctccgccccctaggttcatgccattctcctgcctcagcctccccagtagctgggactacaggtgcccgccaccatgcctggctaattttttgtatttttagtagagacagggtttcaccgtgttagccaggatggtctcaatctcctgacctcgtgatccacctgccttgtctcccaaagtgctgggattacaggtgtgagccaccacgcctggtcaaaagttggtcttttaaaaagataaacaaaattgacaaaactatagcaagactaatggagaaaaaaaaggagaagacccaaatatataaaatcagagatgaaaaaggagacattacaaccaaaaccacagacattcaaaggattattagcagctgctatgagcaactatatgccaataaattggaaaatcaagaagaaatggataaatccccagacacatgtaacctaccaggattgaaccacaaagaaatccaaaacctaaacagaccaataacaagcaaggagattgaagctgtaataaaacatctcccagcaaagaaaagcccaggacctgatggcttcatgctgaattctaccaaacacttaaaaaggagctagtaccaattctattcaaactattgcaaaaaatagaggaggagagactacttcaaaactcattctacgaggccagtattaccctgataccaaaaccagacaaaatctatacatcaattaaaaaaatacataggccaaccactgattaatgttgatacaaaaatcctcaacaaaatactagcaaactgaatttaacaacacattaaaaagatcattcatcatgaccaagtgagatttatcccagggaagcaagaatggttcaacatattaaaatcaattgatgggatacatcaaataaacagaatggaggacaaaaaccatatgatcatttcaattgaggctgaaatagcttttgataaacttcatcatcccttcatgataaaagcccttaaccaattgcgtatagaaggaacatacctcaatataataaaaggcatatacaacagacacatagtatcatactgaatgggaaaaaactgaaagtcttttctctaagatcaagaacacaacaagattgcccatcttcaccactgttattcaacatagtgcaatcaagcaagagaaagaaataaagggcatccaaattggaaaggacaaagtcaaattagcctttttggcagataatataatcttacatttggacaaacctaaataccagaaaacttttagaacggataacaattcattacagttgcaggatatcaaatcaccatacaaaaatcagtaccatttttatatgccaacagtgaaccatccgaggaagaaatcaagaaagtaatcccatttataatagctacaaataaaatgagaaatacctagtaattaaggtaaccaaaaaaaatgaaagacctctacaatgaaaactataaaacattgatgcaagaaattgaggaagacacaaaaaatggaaagatgttccatgttcatggattggaagaattaatattgttaaaatgttatactacccaaagcaatctacagattcaatacaatccctatcaaaatactaatgccattcttcacagaaacataaaaaacaattctaaaatctatatgggaccacaaaaggcccagaatagccaaagttatccaaagcaaaaggaacaaaactgaaggagtcgcattacctgacttaaatttacactacagtgctacagtaaccaaaatggcatgacactagcataaaaacagacacatagatcagtggactagagaacacagagataaatctatacatttaccgtgaactcatttttgacaaaggtgttaagaacacacttggagaaaggacagtctcttcaataaatgatgcagggaaaagtggatatcactatgcagaagaatgaaactagacctctacctctcaccgtttgtaagaaaccaaatcaagatgaattaaagacatgaatctatgaaactactaaaataaaacattaggggaaactctccagtacattgatctgggcaaagatttcttgagtaatatcccacaagcagagtcaaccaaagcaaaaatggaaaaatgggatcacatcaagtcaaaaaccttctgcacagcaaaagaaacaatcaacaaagtgaagagacaacatacagaatagaaggaagtatttgcagactacccatctggcaagggattagtaaacagaatatatgaggagcttatacaatgctacaggaaaaaatctaataatccaatcaaaactaggcaaaagatctgaatacacatttcccaaaagaagacatatgaatggcaaacaggtatataaaaaggtgctcaacatcactgatcatcagagaaatgcaaatcaaaactacaatgagatatgttctttttttttattatactttaagttttagtgtacatgtgcacattgtgcaggttagttacacatgtatacatgtgccatgctggtgtgctgcacccactaactcgtcatctagcattaggtatatctcccaatgctatccctcccccctccccccaccccacaacagtccccagagtgtgatattccccttcctgtgtccatgtgatctcattgttcaatccccacctatgagtgagaatatgcggtgtttggttttttgttcttgcgatagtttactgagaattatgatttccgatttcatccatgtccctaaaaaggacatgaattcatcattttttatggctgcatagtattccatggtgtatatgtgccacattttcttaatccagtctatcattgttggacatttgggttggttccaagtctttgctattgtgaataatgctgcaataaacatacgtgggcgtgtgtctttatagcagcatgatttatagtcctttgggtatatacccagtaatgggatggctgggtcaaatggtatttccagttctagatctctgaggaatcgccacactgacttccacaatggttgaactagattacagtcccaccaacagtgtaaaagtgttcctatttctccacatcctctccagcacctgttgtttcctgactttttaatgatcgccattctaactgatgtgagatggtatctcattgtggttttgatttgcatttctctgatggccagtgatgatgagcattttttcatgtgttttttggctgcataaatgtcttcttttgagaagtgtctgttcatgtcctttgcccactttttgatggggttgtttttttcttgtaaatttgtttgagttcattgtagattctggatattagccctttgtcagatgagtaggttgcgaaaatgttctcccattttgtaggttgcctgttcactctgatggtagtttcttttgctgtgcagaagctccttagtttaattagatcccatttgtcaattttggcttttgttgccattgcttttggtgttttagacctgaagtccttgcccatgcctatgtcctgaatggtaatgcctaggttttcttctagggtttttatggttttaggtctaatgtttaagtctttaatccaacttgaattgatttttgtataaggtgtaaggaagggatccagtttcagctttctacatatgactagccagttttcccagcaccatttattaaatagggaatcctttccccattgcttgtttttctcagggttgtcaaagatcagatagttgtagatatgtggcgttatttctgagggctctgttctgttccattgatctatatctctgttttggtaccagtaccatgctgttttgcttactgtagccttgtagtatagtttgaagtcaggtaatgtgatgcctccagctttgttcttttggcttaggattgacttggcgatgcgggctcttttttggttccatatgaactttaaagtagttttttccaattctgtgaagaagggcattggtagattgatggggatggcattgaatctgtaaattagcttgggcagtatggccagttaaaatggcttttacccaagagtctggcaataacaaatgctggcaaggatgtggagtaaagagaaccctcatacactgttggtgggaatgtaaatttgtacaatcactatgaagaacaatttggaggttcctcagaaaactaaaaatagagccaccatatgatccagcaatcccactcctaggtatatacccaaaagaaacgaaattagtatatcaaagagatatctgtactctgatgtttattgaagcattattcacaatggccaagatttggaagcagcctaagtgtccatcaacacaggaatagataaagaaaatatggtacttatacatgatggagtactattcagccataaaaaagaatgagattcttgtcatttgcaacaacgcagatggaactggaggtcattatgttaagtaaaataagtcagacacagaaagacaaacttcacatattcttatttatttgtgggagctaaaaattaaaataattgaacaaatggagatagagggtagaaagatggttaccagaggctgggaagggtggtggggggtagggaggaagtgaagattgctaatgggtaccaaaaaaatagaaagaatgaataagacctagtatttgctagcacaacagggtgactgatatgactcggatctgtgtacccacccaaatcttacgatgaaatgtaatccccaatgctggaagtggggcatgatgggaggtgattacatcatgggggtggttttctcatggtttaacaccattcttcgttagtgctgttgttgtgatagtgagctctcatgagatccaattgtttaaaagtgagtggcacctcccccatctctcttgttcctacttcagccatgtaatgtgtatgttccttcttcactttctgttatgattgtaagtttcctgaagcctccctagaagctgagcaaaggccagaatcatgcttctatacagcctgcagaaccgtgaaggaattaaagctgttttctttatatgttacctagtctcaggtatttctctatagtcatccaagaatggactaatacagaaaattgctaccaggggtgaggcattgctataaagatacctgaaaatatggatcccagtttggaactgtgtaaagggtagaggttgaaagaatgtggtgggctcagaagatagaaagatgagggaaaatttggaacttcctacagacttggtaaattgtgacaaaaatgctgatgctgagatggacaatgaagtctaggctgaggaggtctcagaagaaaatggggaacttattgggaactggaataaaggtcacttttgttatctattagcaaagaacttgggggcattatgcctctgccctagggatctgtggaaattttgacttgagagtcatgacttaggatatctggcagaaaaaatgacttaggatatctggtagaagaaacaacctatgctcatatatgtgagcaaagaaatgacataaaactggaacttatatttagaaggtaaacaaagcataaaagtttggaaaacttgcagcctgaccatgtggtgaggaattcaatcaggctgcagaaatttgcataagtaaagaagaaccgatagccaagacaatgggaaaaaggccttgaaggcacttcagagacctacacagcagcccctcccatcacaggcctggagggctaagagggaagaatgatttcatgggccacgcccaaggccctgccaccctgcacagcctcaggacattgctctcagcatccctgtcacttcagctccagccttggctcaaagaggcccaggtacagcttgggccactgcttcagagggtgcaagccataagccttggcagcttccacgtggtgttaagcctgtaggtgcacagagtgcattagctgaggctcggtagcctcctcctagactttagagaatgtatggaaaagcctggatgttcaggcagaggcctactgcaggggtggaaccatcatggagaacttctactagggcagtgcagagggtaaatgtgggtttggaggccccacacagagtccccactgggacagtgcttagtggagctatgagaaggccaccatcctctggaaccaggaatgctaccaacagcttgcactatgaacctggaaaagccacaggcactcaataccaccccttgagagcaactgtgggggctgtaccctggaaagccacagaggcagagtttcccaagactttgagagcccacctcttgcaccagtgtaccctggatgtgagacactgagttaaaggagattattttgcagttttaagagttaataactgccctgctgggttttggacttgcatgggccctgtagcccctttcttttggccaatttctcccttacccagtgccataaccccattgtattttgggagcaactaacttgtttttcatgttacaggctcgtaggtggaaggaaattgccttatctcagatgagactttggactttggacttttggcttaatgctagaataaactaagactttgggagactgttgggaagccatgattgtattttacaatataagaaggacatgagattttgaggggccaggggcagaatggggtttggtgtcctcactaaatctcaagttgaattctaatacccagtgttggagtggggcctggtgggagttgattgcatcatgggggtggagttctcatgaatgggttagcaaaacccccacggtgctgttctcatgacagtgagtgacttatcatgagatctagttatttaagagtgtgcttcctgtgaacaattaaattgttctacagaatatgcaggtagcttccgctttgccttctgccatgagtaaaagcttcctgaggccccctcagaagcagactctgacatgtttcctgtttatcctataaggcaattaaacctctttctttttttttttttttttcagatggagtcttgctctgttgcccaagttggagtacagtgacgtgatctcagttcactgcaattaccacctcctggtttcaaggaattatcctgcctcagcttcctgactagctgggattacaggtgtgcaccaccatgcctggctagtttttgtgtttttagtagagaaggggtttcaccatgttggccaggctggtctcaaactcctgacctcaggcgatccacccactttggtctcccaaagtgctgggagtgagccaccatgccagtcgtctcttttctttataaattatccagtctccggtatttctttatagcagtgtgagaatggactagtacagtgactatagtaaaaaataatttaatattacattttaaaataattaaaagaatataattggattgggccaggcatggtggcttacacctgtaatcccagcactttgggaggccgagatgggcagagcacctgaagtcaggagttcaggaccaacctggccaacgtggtgaaaccctgtctctactaaaagtacaaaaagtaactgggcattgtggcatgcacctgtaatcccagctacttgggaggctgaggcaggagaatcactggaacatgggacatgaaggttgcagtgagccaagattgcaccactgcagtccagcccaggcaacagagtgagattgtctaaaataaacaaataaataaataaacaaaagaatataattggattgtttgttacataaattataaatgcttgtggtgattgataccccatttaccctgatgtgaatattatgcattgcatgcctataacaaaatctctcatgtaaccataaatatatgcctactacatctccacaaaaattaaaaattagaaaaaagatttgtagagagaagaacatgagttcagaggaagagggctttcaattttaggggctgagggttggggtggtttagctaacaatccatcattggaaagcaagttaggatgcctagcatgcattgcttgatgtagacctctaactctgttagagaaattttgaaggggtattagacttcaattccttcatcttacagataaagaaaaggaagactttgacattttctttacctgtaaattttcttatgtctatttactcggtaagtgttcagtgcacatgcagggtatgaggataaggatagagggatcagatgaatgatggaacaaaagaaatactgtaataatttgttgtcaaacctggctggaggaaatactgaaattaatgaagtatcttttctaatggagtactgcactgttccaagaattcacaaaactgagcatgattgatagtcttctaggttgattgggaggcattgtattcttgtataatccttcagtatctttgagaacattagtcacccctatacttttggaactccagaggatcatttgtacaggtttatgctagatagaatgtgagagaacaagtacactataaactacatcaccacctttcaggagcttaccaactaagtcaaatgacctcaacagacccatttattcagggtgtgtaatctctgtcttccagatctgatgccaacagtgtggactcatcgtttaagtagaaggatgtatgtattctaataaggcacttttttaaaaaattatattttaagttctgggatacatgtgcagaatgtgcaggtttgttacataggtatacacgtgacatggtggtttgctgcacccatcgacccatcatctacattaggtatttctcctaatgctatccctccccttgccccccaccccccaacaggccccagtgtgtgatgttctctttcctgtgttcacgtgttctcattgttcaactcccacttatgagtgagaacatgcagtgtttggttttctgttcctgtgttagtttgctgagaatgacgatttccagctttattcatgtccctgcaaaggacatgaactcatccttttttatggctgcatagtattccatggtgtatatgtgccacattttctttatccagtctatcaatgatgggcatttgggttggttccaagtttttgctattgtgaatagtgctaaaataagcatacgtgtgcatgtgtcattatagtagaatgatttataattctttgggtatatacccagtaatgggattgctgagtcaaatgatatttctggttctagatccttgagaaattcccatgctgtcttctacaacggtttaacaaatttacactcccaccaacagtgtaaaagcattcctatttctctatatcctctccagcatctgttgtttcctgactttttaatgatcaccattctaactggcatgagatggtatctcattgtgattttgatttgcatttctctaatgaccagtgatgatgagctttttttcatgtttgttggccgcataaatgtcttcttttgagaagtgtctgctcatatactttgcccactttctgatggggttgtttatttttttcttgtaaatttgtttaagttccttgtacattctggatattagctgtttgtcagattgatagattgcaaaaattttctcccattctgtaagttgcctgttcactctgatggtagtttcttttgctgtgcagaagttcttcagtttaattagatctcatttgtcaattttggcttttgttgccattgcttttggcgttttagtcatgaattctttgcccatgcctatgtcctgaatagtattgcctaggttttcttctagggtttttatggttttaggtcttatgtttaagtctttaatccatcttgagttaatttttgtataatgcgtaaggaaggggtccagtttcaattttctgcatatggctagccagttttcccaacaccatttattaaatagggaatcccttccccattgcttgtttttgtcaggtttggcaaagatcagatggttgtagatgtgtggcgttatttctgaggcctctgttctattccattggtctatatatctgttttggtaccagtaccatgctgttttgattactgtagccttgtagtatagttactaaggcacttttaattgctgacttggtgccatatattagatgatactgaatggacaagtgagcatggcctgggactttggaatagaatgccctctttgcagaaataagtagctcattcataggaaacaaaactatattcctgacctctcctgtaagctattatggtttttagcatgcaatcctgatgtatgtgtatttacctatttataaattgtattatgttgtacaaatataatatttgtacaaaatcaatatttaaaaggataagataaaaataaatcaaatagatatctatttgttccttcccgcagaaaatggggtgggtaaaactcatatgtaaattatttctagccatctctgaactatgttcattatacctcactttcaatcccagccccacctgaatattctgtttcctaatactaaattatacattaaaccttacaaaaaacatgttaagtaacaagggaaaaaagatggaaaataataaaataggtagcatatacaaacacacccatacacacacacacacatgaaaaacagcagcagcaaacaaagaagaagctatgtgcagctgctacggtattcatttctgtaacccctcacaatattgtggttggtattcataacttccttcttctattacacatcctatgttttctttcccattagccagaattttagctggctagggttcttacccaaaaagtctaaatcttcaattcctcttttttttaattggttgctgtagctttcagttaatatttagtattagaaaaggaggtagtaagagtcatcacagagaatctcttgggttccagaaacagtcctccctgttcacattttctagcatcaattctgtttcctcttggttgtcaagatcagccatcagccacccaaccagaataactctctccttctttgcctgttagcttcctattaatgaggaactaaaaatgatcaggtattcttggctctgaaaaatgaaaactttatttttctgaagtttcaaacttcagatccatagaaccattgttgtaaggatttctctcttgggaaccaagacctcagagtagcaggtcttgtagatgtagattcaaaaattctgcaaatgggttatttggtgtagtaatgagagaagtcattcccacttcaactcacttcttcctagactcatgtattctggctttgggagaaacagcaccctgtattgttcctcagttgaaagaaatatactatatcctatatgatggcaacatatgttctcagggttttatgttttttggtgctattgcatatggaagttgtaaattttcatttccgtgttattttcgtgttacataaaaatacaactgattttagtatactagccttgatcctgtgattttgttcatttcatttattagttctagtagtttttttaataaatcccttaggaattttatgtaaacaatcatgttatctacaaagagagagctttacttcttccttcctgatcattttttaaatttcttttttcctttttgccttatggcaatggccaaaacctccaggacaatgttgaaaagaagtagtgagagtgggtatcctctaaggagggtgcaccgcacactgcttagctggttctggtgtcctgaattcagcaaagagggctgagacccagacctctaaggagggtggagtgctgctggctggctggtgcaggtatgtcctgaatctggatctgcaagtgttacaaaaattacaaattggattcaactgctgctacaaggaagaactgtttctgctaagatgaagcattgctagagggataggcacaggaacaggaaaagaggaaaatgaaatcctttcctcatccttaactgtccagtttccctctggtgcttgcatttaaaaaaacagagcctaatacagaattagttggcagaacagagatgtagtttgccgcattccagatgcagcgtaacaacagtgagatacagtagagtggatttggagctgagggacaacaacttaataacaggcatgcaagaagtatgcattatggacttatcagacccaggaatacgttttcttggcttccagagtgagtcctagaagtcattagaactttacctctgtttttgttttatgctttagttctgagatttgtttgggaaagactcatgctctaacagttttgctctgctctgagatctgtctcctactgagatgacgggagcttacctctgtgaatttaagcttttgacctgaaacctctttcatgtttcactcctagtctaaactcagcctatcccagcttttctccctcattctttccccactttcctgactcatttgaacttacctccacaaaggattttattcttggccctgaaaaatgaaaactttatttttagcatcttgtgtgttaaatggtatgcttccattcaatgtactactagaacaggacttttatctctcccttcctttgacatattcatgcatacacatttacacactttataagcatatgcacacctggaaatgtcagtgtataaagactgacatttttgcttagaggagtgaagggaatttctcaccattgcacaaggagagaaatgccattaatattcagccttcacattggttgattctaaagatctttctcttcccattttccaccctattactcctctcttctttttaatactaagaataataactcaacttacaacacttcatttttcaaaatgttttcacatatcttgcagtatgtgacaatcacaacttctctggaaagaggacagatcacattattttctttatgtcacaagagaggaaacttggcttaggacattttccaatggaaggagaaaaatattgccaataggaagcattcaatcagtgaatctgtctccatttcagtgcaattttaattaaagctcattttcaaaacattttaaaattaatcttacatctataatacctgcaatctattttacttccagtgcctgtgtactattgagtagcactgtctgtgcttttatagattgttttatttgtcagggggcatgtgtaaggatgcaaatgtctttactgttcacttctaagtctgaaacttatcagatccaggcaaggtcattattgggagtaaagtcagaataaaatttgtgttgaatttacttgtaggaaactttaatgtcttaaaagcttattccccacagtattaatcagtacatttacatttttattctagttctctcttttctctacttttgttttttttttttttgcgtggccaatatccataagtttattttttttaagagtttatatgtataatgtaagggatttatttattatatgaaagattccataagaatttccaattaagctacaagaatagccacctatagcaccaaatgagggccacctgtattttaaaatgatggtaaccaagatcatgaagaatagcaatcaacacctaaggacagtagaaaacactatggttgtgtggcctgaatataagagagggagcacataggtacatttgtaatatgtctaatatgccaagaagaatgggagcagtcttagaggtggacctaggttggtaaacaatagctttttgcatttataactttttttcttttttttttcttttattattattatactttaagttttagggtacatgtgcacaatgtgcaggttagttacatgtgtatacgtctgccatgctggtgtgctgcacccattaactcgtcatttagcattaggtatatctcccaatgccatccctccaccctccccccaccccacaacagtccccagagtgtgatgttccccttcctgtgtccatgtgttctcattgttcaattcccacctatgagtgagaatatgcagtgtttggttttttgttcttgagatagtttactgagaatgatgatttccaatttcatccatgtccctacaaaggacatgaactcatcattttttatggctgcatagtattccatggtgtatatgtgccacattttcttaatccagtctatcattgttggacatttgggttggttccaagtctttgctattgtgaataatgccacaataaacatacgtgtgcatgtgtctttatagcagcatgatttataatcctttgggtatacacccagtaatgggatggctgggtcaaatggtatttctagttctagatccctgaggaatcgccacactgacttccacaatggttgaactagtttacagtcccaccaacagtgtaaaagtgttcctatttctccccatcctctccagcacctgttgtttcctgactttttaaagattgccattctaactggtgtgagatggtatctcattgtggttttgatttgcatttctctgatggccagtgatggtgagcattttttcatgtgttttttggctacattaatgtgttcttttgagaaatgtctgttcatgtcctttgcccactttttgatggggttgtttgtttttttcttgtaaatttgtttgagttcattgtagattctggatattagccctttgtcagatgagtaggttgcgagaattttctcccattttgtaggttgcctgttcactctgatggtagttttgctgtgcagaagctctttagtttaattagatcccatttgtcaattttggcttttgttgccattgcttttggtgttttagacatgaagtccttgcccatgcctatgtcctgaatggtattgcctaggttttcttctagggtttttatggttttaggtctaacatttaagtctttaatccatcttgaattaatttttgtataaggtgtaaggaagggatcattatttggagggtgctgtggtctgaatgatcatgtctctccaaaattcatgtgataaaacctggcccccaaggtggtggtattaaaaagtggggccttcaggaggtaattagatgatgagggcaaagccttcatgaaagagaaggtgctcatttgaaagaggctcaagggaactccctgggtgcttccttcatgggaggacatagctaaaggcaccatcgtgcaaatggagagtaagtccacaacaaacaatgaatctgctggcactttaatcttagatttcccagctcccagaaccatgagcagtaaatttctattatttataagttacccagtctaatgaatttgttatagcagcctgaatagaatagaatagaataagacaagcaggggggcatatcatttagaatatctggttcttcacttagtgaatggtttagaagaaaaaatacaaaatgaagggtatgccctaatttcttgctgcagtgttgactttgcattactccagagctaagagagtatagctagcgatcacttatatgaatccccctaagtatcttgtcttctgtttctcagcagtgatgtgggggtttctaactccatatccttccagtgtcttcttttttctttatgaagtggagtagccaatttccgggattacttacaactctagtcttgaggagtgaattggcaatcacaccaccatttcttagctataagcccggcaatccaaatcacaaactttcagcaaagaaattctctaaaatccaacaatttcatcctcatcccctgtgcctctgggatacagaaactcatgagatgattttattgaatgcttactactgtcagcctctcctgccttacaaacctgacttcactgtgatggttaacttatgtcaacctggctacttggctgggctatggttaagcagtttctggatgtttctgtgaaggttaaatgttaattgcatttaaatcagtggacttcgagtaaatcagtttaccctccacgatgtgggtggacctcatccaatcaattggaggcctgaagagaataaagactgatcttccccaagaaagaagaaattctgccagcagactgccttcagactccaactgcaaaaattctgagtctccagtctgccagtctaccctgaagatttaggatttgccagcctccacaatcatgtgagccaattccttaaaatctgcacccccatatatattctctctctctctctctctctgtcacacacacacacacacacacacacacgcacacacacatcctgttgctcctgtttctctggagaaccctgattgacttaacccttacaataattgttaagtagcattatcacattttcagagggtaaaactggagctcagagagattaaatgatattcccaagatcatacagttaatatgtagaaggaccagatttgaagctctgttgtttccaaagttagcgttctgactactatgctatatatttgttctgccatgctatgctatgccacactatattacaatgcaaagtcaaataaccatcactaaaacttaaacgtgcatgcaaagatccagtggcatcttaccttcctgaatagttttgagttatatgccataacccacatgctgtgtagcatgaattgatgaaacgaacatctgagatccttttgcctggggaacgtttaacagtgttgctcagaaaatgctacttcactcagctattgggagatccattttaacttggactcaagcagaaagaaattgtttcccccaaagattttgaatacttattttcttaatagctttgaaaaaaaacacttataacctgactatataagaatatactacagattaaattacttcaattgtattaaacaagggtataataaagaataatgtatcttcaattttaccactccaacaaaccaaacatttcattttttttagttttcttttcagttttgtacaagttataatgataatagacatacaatttttattctcctttcacaaaagaaaaaattattttaatagagggaagaaaagtacttttttttaatttcagaaggaaatttcacagccaagaagaaaatatcggtgttgagctatgcctgaaacgtgtcactttgtgtaccaagcacttagggctaaacataaaaaaaaaattaagctgatcccagatcattttctttgattcagttcacataattagaacctgatttgtaccaagagtgagtaaagaaaagtcaggaaagcccaggagaccctgttctccaagccgttgagaacatcatctattctaaacttaaattttagccacctgtgtaagcttcccagccattcagtaacctgctgatttgtgtaaagtaccccaagagtaaccaagaagatggactgtaagtgaaagcttctgtcaaacagaaagggcaaatcaatagaaaagtgtggtgctggaaaagcataaaaagcatagtggattatagcagaggggtgtaatccttcttttgttcttctgtagaaaaaaacgaaagaatgaatgagcctacactctggttagtggagcctggaatttcatggctaggtatattacactatatcatgtggccatctgctctggtcctattaaaattaggagttccttgggaaaacattaagttttacaacatcctaagaagtgtttcctgcaaaatgggttaaaattggtttgagataatgaagtcacagtatgagactgatgaatgcctcctccaggagctgttggggcagccagcaatgagccatgggaattggtattagatctggtcagaattggacatcttcactaatgatctggaagaggaagtcaatggctcattaatgaaatccacagataaagtggaatgatggattgattggatgcaagaaagcaaagaaattagtgatattagtaaaatgagatgcaacttatggaaatgttcactcatcctcgaaacagaaaatcaccatctggaagtcatttaaatggagcaatgagtccggaaagcaccactgccagcagaggcctggagatgatgccaggaaggttagacaaagatgggagatggagccagaacaatcagagcttctccctggaaagacctcatgacatttggccagtggagataagcttcccaaagctcctgacacccagccagagcctctgaaaaaccactctgcctctgtgtggtggccagcctgtcctctgacttctagctctggctggaaagatggctccagatgggcttctcattactgttttcaacaaggcaaggttgatggtgtccaacattttgctcctttgaggccaataattaggccaaggccagaggtacaggtccagcatcagtatgaaagactgaatagtgtgtcgattggggtcctctctggcccatacttccattctaagataggtgtgtgccatagtcacagtcctgctgcctgtggcatctgctgcttctgtcaccacacggcttgaccactgacctgctaaagctttcaaggctgtagcattttgagttccttttgctggcatccatgtgccaccccttccatgtcctatgacctcctgacgcaccacgtggaattgaaaaaatgtaagtgttcaccagtgaaaacctgtgacttaaaaaggcctggttgcaaccatctgtttcctccagtttcaggaacatgcaagtccctcctctaggtctggctgaacgtctccctctcaacccctctctactgtggcaaattgagtgtgagtttatcagaggctcctaaccttcctctgatataaatggagctcaggcctcccaaactaatgaccttctttccctctttagtgatgtcctctcccctgtagagcaataagacacagccaatttctctatcacatcacaacgtcttctaagttagcctcacgtcagctttctaaactcttgaaaaaataagtcatttccttgtgagagcccaaaagtccattaaatgagatttttccaacataattttcttgggccatccagaaagcttattttaagtttattgttatttaacatttggaggagttatggattactaggtgaacctggaagtgaattgttacatgattattagattaccaaataaatggcaataataggcagaattgtcatggtcctagcattttaaatcagaagtatctgatggactgtgaatttgaatgggacaccctgaacctgggcttctttaaggttaaggttaattgatccctgttacaaccctgaggtggagagctaaggtcctgctggtgccagctcacatcactttagtccagacctccttacccctgaactctctttagggcactgaatccagcacacacaccccttcctgctctgtgacataaaaagaccagtttcaaggtacagtcctctgagaatgcagtgttggggactacatccaacaagaattttagacagtctggctcagtcctgatggaccaaactcaggtgaagccttcacttggctcatagcccctactggagctagaaccattgcttgtcaaatgtcaactggatgccaccatccagcatttaagagaaaggctctgacatttcccaacccctgcaatctttgcttctgttgttcccatcatgaagactccacttgctccactggtctttccctctgagccattacagtggcagctgctgagattacctttaatgtcaccctcaattaacctgacaggatacagtcctctcaaacccctcttgggactaagagaaaataagagacttagggtgggtaactgaaaatgcttttatattcctggctcttctgcaggtaaatctctcagaaaattgctgctttattgtttccaggcactgagctcacattacaccagcccaagcctggaaggctctgtcagcccatccatcagcttttaaggggtgaaaacctttgggaaacatggaaaccactcaacttggaaacattaatgaaatggttcaagtaaacaccaaatcttcatgcctggatgttaccttccaatttcttctttcagataaaaacaacatgaaactatattgcaatagaaataagcaggaaaaaaaaccagaaaggaaatgtgtgtttgtgcgtgtatacacaggacacagagccaaaagcatggggaattttccaaaggaaatgaaaatgtagttcctgtcaacctttctcagagaagccattctttcctctctggaagctggaccgtatacaaccagaagcattactgtctttaccaaagtaatagggtgttggatatttctccatatacaaatgagttttattacttaattgcttatttttcaagtatacaatatttgagtaacattaattgctcagaaagcaacattgacaatttaaccaaaagacaagaaaggaatctcgctagctagttcaatcttctttcaagtttggaacatgttaagcaaattttatgatacctaatagattatggactattatctcactgaattatattaatcactataagaccaagagatagtatgtacatatttagctcatgaaagtataagatacccagttaattttggttttaaatgaataacaggtaatttttagtataatcaacaaacattgtgtggaatatatactatacaagaaaaatgtatctgaaattcaattttaactggccatattgtattttatttggcaatcccacaaaaagaccagttttacccaaaatgcttctagtgtctgtatgcatcagtacttaccaaacaacgtggcttgccctttagaaaccaactgtttcttaacaattgacctaaccatttggatgtcatcgaggaatatatttagaaaaaaatgagaatgaaggttgaatatgttgtcctttctcatccagatgtcgatgtcatagtttcctgctctttaatccttattctatttttctaataataaagattagataagtgctttttcctagaaggaccccttgaccacagtcaatttcttaatcattctgaaatagaaacttgaacatgtactgaaaaaaacaatatgagaaacaagaattttatgccgatattttgaattggctaattgtgtctggaaatttattgattttttttttcaaaaataagatttccaaattaggcaagtgatagtgtttcatttaacgacaaggagttgaaattgactttgattttcaaatgctttttctcactcttgttaaagttttctaaagattgtcttcattctaagaaattaatatttctagcttcccattaaaaagaaaaaacatatttttgacttgtaaaattattatcatatttaaaaactatcttccaaaatatttctgaggacattatgtttattgagtgaaacttgtgttaggtggaactataccactcttcgttagagttgatcaaatatgattgagtacaaaatatcctaaaacttacaacaatatagaatccaatgatttttttaaaatttattattattatactttaagttttagggtacatgtgcacaaagtgcaggttagttacatatgtatacatctgccttgctggtgcgctgcacccactaactcgtcatctagcattaggtatatctcccaatgccatccctcccccctccccccaccccacaacagtccccagagtgtgatgttcctcttcctgtgtccatgtgttctcattgttcaattcccacctatgagtgagaatatgcagtgtttggttttttgttcttgcgatagtttactgagaatgatgatttccaatttcatccatgtccctacaaaggacatgaactcatcgtcttttatagctgcatagtattccatggtgtatatgtgccacattttcttaatccagtctatcattgttggacatttgggttggttccaagtctttgctattgtgaatagtgccgcaataaacatacgtgtgcatgtgtctttatagcagcatgatttatagtcctttgggtatatacccagtaatgggatggctgggtcaaatggtatttctagttctagatccctgaggaatcgccacactgacttccacaatggttgaactagtttacagtcccatcaacagtgtaaaagtgttcctatttctccacatcctctccagcacctgttgcttcctgactttttaatgattgcctttctaactggtgtgagatggtatctcattgtggttttgatttgcattcctgtgatggccagtgatggtgagcattttttcatgtgttttttggctgcataaatgtgttcttttgagaagtgtctgttcatgtccttcgcccactttttgatggggttgtttgtttttttcttgtaaatttgtttgagttcattgtagattctggatattagccctttgtcagatgagtaggttgcgaaaattttctcccattttgtgggttgcctgttcactctgatggtagtttcttttgctgtgcagaagctctttagtttaattagatcccatttgtcaattttggcttttgttgccatggcttttggtgttttagacatgaagtccttgcccatgcctatgtcctgagtggtaatgcctaggttttcttctagggtttttatggttttagatctaacgtttaagtctttaatccatcttgaattgatttttgtataaggtgtaaggaagggatacagtttcagctttctccatatggctagccagttttcccaccaccatttattaaataggggatcctttccctattgcttatttttctcaggtttgtcaaagatcagatagttgtagatatgcagcattatttctcagggctctattctgttccattgatctatatctctgttttggtaccagtaccatgctgttttggttactgtagccttgtagtatagtttgaagtcaggtagtgtgatgcctccagctttgttcttttggcttaggattgacgtggcgatgcgggctcttttttggttccatatgaactttaaagtagttttttccaattctgtgaagaaagtcactggtagcttgatggggatggcattgaatctgtaaattaccttgggcagtatggccattttcacgatattgattcttcctacccatgagcatggaatgttcttccatttgtttgtatcctcttttatttcattgagcagtggtttgtagttctccttgaagaggtccttcacatcccttgtaagttggattcctaggtattttattctctttgaagcaattgtgaatgggagttcactcatgatttggctctctgtttgtctgttgttggtgtataagaatgcttgtgatttttgtacattgattttgtatcctgagactttgctgaagttgcttatcagcttaaggagattttgggctgagacaatggggttttgtagacatacaatcatgtcatctgcaaacagggacaatttgacttcctcttttcctaattgaataccctttatttccttctcctgcttaattgccctggccaaaacttccagcactatgttgaataggagtggtgagagagggcatccctgtcttgtgccagttttcaaagggaatgcttccagtttttgcccattcagtatgatattggctgtgggtttgtcatagatagctcttattattttgaaatacgtcccatcaatacctaatttattgagagtttttagcatgaagagttgttgaattttgtcaaaggccttttctgcatctattgagataatcatgtggtttttgtctttggtctgtttatatgctggattacatttattgatttgcgtatattgaaccagccttgcatcccagggatgaagcccacttgatcatggtggataagctttttgatgtgctgctggattcagtttgccagtattttattgaggatttttgcatcaacattcatcaaggatattggtctaaaattctcttttttggttgtgtctctgcccggctttggtatcaggatgatgctggcctcataaaatgagttagggaggattccctctttttctattgattggaattgtttcagaaggaatgttaccagttcctccttgtacctctggtagaatttggctgtgaatccatctggtcctggactctttttggttggtaagctattgattattgccacaatttcagagcctgttattggcctattcagagattcaacttcttcctggtttagtcttgggagggtgtatgtgtcaaggaatttatccatttcttctagattttctagtttatttgcatagaggtgtttgtagtattctctgatggtagtttgtatttctatgggatcggtggtgatatcccctttatcattttttattgcatctatttgattcttctctctttttttctttattagtcttgctagtggtctatcaattttgttgatcctttcaaaaaaccagctcctggattcattaattttttgaagggttttttgtgtctctatttccttcagttctgctctgattttagttatttcttgccttctactagcttttgaatgtgtttgctcttgcttttctagttcttttaattgtgatgttagggtgtcaattttgaatctttcctgctttctcttgtgggcatttagtgctataaattttcccctacacactgctttgaatgcatcccagagactctggtatgttgtgtctttgttctcgttggtttcaaagaacatctttatttctgccttcatttcgttatgtacccagtagtcattcaggagcaggttgttcagtttccatgtagttgagcagttttgaatgggattcttaatcttgagttctagttttattgcactgtggtctgagagatagtttgttataatttctgttcttttacatttgctgaggagagctttacttccaagtatgtggtcaattttggaataggtatggtgtggtgctgaaaacaatgtatattctgtttatttggggtggagagttctgtagatgtctattaggtctgcttggtgcagagctgagttcaattcctgggtatccttgttaactttctgtctcattgatctgtctaatgttgacagtgggatgttaaagtctcccattattaatgtgtgggagtctaagtctctttgtaggtcactcaggacttgctttatgaatctgggtgctcctgtattgggtgcatatatatttaggatagttagctcttcttgctgaattgatccctttaccattaggtaatggccttctttgtcccttttgatctttgttggtttaaagtctgttttatcagagactaggattgaaacccctgccttttattgtttaccatttgcttggtagatcttcctccatccttttattttgagcctatgtgtgtctctgcacgtgagatgggtttcctgaatacagcacactgatgggtcttgactctttatccaatttgccagtctgtgtcttttaattggagcatttagtccatttacatttaaaggtaatattgttatgtgtgaatttgatcctgtcattatgatgttagctggttattttgctcgttagttgatgcagtttcttcctagtctcaatggtctttacattttggcatgattttgcagtggctggtagcagttgttcctttccatgtttagcgcttccttcaggagctcttttaaggcagggctggtggtgacaaaatctctcagcatttgcttatctgtaaagtattttatttctctttcacttatgaagcttaatttggctggatatgaaattctgggttgaaaattcttttctttaagaatgttgaatattggcccctactttcttctggcttgtagggtttctgccgagagatccgctgttaatctgatgggcttccctttgtaggtaaccagacctttctctctggctgcccttaacattttttccttcatttcaactttggtgaatctgacaattatgtgtcttggagttgctcttctcgaggagtatctttgtggtgttctctgtatttcctgaatctgaatgttggcctgccttgctagattggggaagttctcctggataatatcctgcagagtgttttccaacttggttccattctccctgtcactttcaggtacaccgatcagacgtagatttggtcttttcacatagtcccatatttcttggaggctttgctcatttctttttattcttttttctgtaaacttcccttctcgcttcatttcattcatttcgtcttccatcgctgataccctttcttccagttgaccacatcagctcctggggcttctgcattgttcacgtagttctcgagccttggttttcagctccatcagctcctttaagcacttctctgtattggttattctagttatacattcttctaaatttttttcgaagttttcaacttctttgcctttggtttgaatgtcctcccgtagctcggagtaatttgatcgtctgaagccttcttctctcagctcgtcaaagtcattctccatccagctttgttccattgctggtgaggagctgcgttcctttggaggaggagaggtgctctgctttttagagtttccagtttttctgctctgttttttcccatctttgtggttttatctacttttggtctttgatgatggtgatgtacagatgggtttttggtgtggatgtcctttctgtttgttagttttccttctaacagacaggaccctcagctgcaggtctgttggaatacccggccatgtgaggtgtcagtctgcccctgctggggtgcctcccagttaggctgctcggggatcaggggtcagggacccacttgaggaggcagtctgcccgttctcagatctccagctgcgtgctgggagaaccactgctctcttcaaagctgtcagacagggacatttaagtctgtagaggttactgctgtctttttgtttgtctgtgccctgcccccagtggtggagcctacagaggcaggcaggcctccttgagctgtggtgggctccacccagtttgagcttcctggctgctttgtttacctaagcaagcctgggcaatggcgggcacccctcccccagcctcgctgctgccttgcagtgtgatctcagactgctgtgctagcaatcagcgagactctgtgggcataggaccctctgagccaggtgcaggatataatctcctggtgcgccgttttttaagctcgtcggaaaagcgcagtattcgggtgggagtgacccgattttccaggtgccgcctgtcacccctttctttgactaggaaagggaactccctgaccccttgcgcttcccgagtgaggcaatgcctcgccctgcttcggctcgcgcatggtgcacacacccactgacctgcacccactgtctggcactccctagtgagatgaacccggtacctcagatggaaatgcggaaatcaccggtcttctgcatcgctcatgctgggagctgtagaccggagctgttcctatttggctatcttggctcctcccc

SEQ ID NO: 10354 - DNA, 5089 bp, Homo sapiens
tttcatttattcatttttttttattattatactttaagttttagggtacatgtgcacaacgtgcaggtttgttacatatgtatacatgtgccatattgttgtgctgcacccattaactcgtcatttagcattaggtgtatctcctaatgctatccctcccctctcccccaccccacaacagtccccagtatgtgatattccccttcctgtgtccatgtgttctcattgttcaattcccacctatgagtgagaacatgcggtgtttggttttttgtccttgtgatagtttgctgagaatgatggtttccagcttcatccatgtccctacaaaggacatgaactcatcattttttatggctgcatagtattccatggtgtatatgtgccacattttcttaatccagtctatcattgttggacatttgggttggttccaagtctttgctattgtgaatagtgccgcaataaacatacgtgtgcatgtgtccttatagcagcatgatttatagtcctttgggtatatacccagtaatgggatggctgggtcaaatggtatttctagttctagatccctgaggaatctccacaccgacttccacaatagttgaactagtttacagtcccaccaacagtgtaaaagtgttcctatttctccacatcctctccagtacctgttgtttcctgactttttaatgatggccattctaactggtgtgagatggtatctcattgtggttttgatttgcatttctctgatggccagtgatgatgaacattttttcatgtgtcttttggctgcataaatgtcttcttttgagaagtgtctgttcatatcctttgcccactttttgatggggttgtttgtttcttgtaaatttgtttgagttcattgtagattctggatattagccctttgtcagatgagtaggttgcaaaaattttctcccattttgtaggttgcctgttcactctgatggtagtttcttttgctgtgcagaagctctttagtttaattagatcccatttgtcaattttggcttttgttgccattgcttttggtgttttagacatgaagtccttgcccatgcctatgtcctgaatggtaatgcctaggttttcttctagggtttttatggctttaggtctaacatgtaagtctttaatccatcttgaattactttttgtataaggtgtaacgaagggatccagtttcagctttctacatatggctagccagttttcccagcacaatttattaaatagggaatcctttctctgctgcttctttttgtcaggtttgtcaaagatcagatagttgtagatatgcagcattatttctgaaggctctgttctgttccattggtctatatatctgttttggtaccagcaccatgctgttttggttactgtagccttgtagtttagtttgaagtcaggtagcgtgatgcctccagctttgttcttttggcttaggattgacttggcaatgcgggctcttttttggttccatatgaactttaaagtagttttttccaattctgtgaagaaagtcattggtagcttgatggggatggcattgaatctataaattaccttgggcagtatggccattttcacgatattgattcttcctacccatgagcatggaatgttgttccatttgtttgtatcctcttttatttcgttgagcagtgttttgtagttctccttgaagaggcccttcacgtcccttgtaagttggattcctaggtattttattctctttgaagcaattgtgaatgggagttcactcatgatttggctctctgtttttctgttattggtgtataggaatgcttgtgatttttgcacactgattttgtatcctgagactttgctgaagttgcttatcagcttaaggagattttgggctgagacgatggggttttctacatatacaatcatgtcatctgcaaacagggacaatttgacttcctctgttcctaattgaataccctttattcccttctcctgcctgattgccctggctagaacttccaacactatgttgaataggagtggtgagagaggacatccctgtcttgtgccagttttcaaagggaatgcttccagtttttgtccattcagtaggatattggctgtgggtttgtcatagatatctcttattattttgagatacgtcccatcaatacctaatttattgagagtttttttagcatgaagagttgttgaattttgtgaaaggccttttctgcatctattgagataatcatgtgttttttgtcttttgttctgtttatgtgctggattacgtttattgattttcgtatgtcgaaccagccttgcatctgagggatgaagcccacttgatcgtggtggataagctttttgatgtgctgctggatttgctttgccagtattttattgaggatttttgcatcaatgttcatcaaggatattggtctaaaattctcttttttggttgtgtctctgcacgactttggtatcaggatgatgctggcctcataaaatgagtcagggaggattccctctttttctattgattggaatagtttccgaaggaagggtaccagttcctccttttacctctggtagaattcggctgtgaatccatctggtcccggactctttttggttggtaagctattgattatttccacaatttcagagcctgttattggtctatttagagattcaacttcttcctggtttagtcttgggagggtgtatgtgttgaggaatttatccatttcttctagattttctagtttatttgcatagaggtgtttgtagtattctctgatggtagtttgtatttctgtgggatcggtggtgatatcccctttatcattttttattgtgtctatttgattcttctctctttttttctttattagtcttcctagcagtctatcaattttgttgatcatttcaaaaaaccagctcctggattcattaattttttgaagggttttttgtgtctctatttccttcagttctgctctgattttagttatttcttgccttctgctagcttttgaatgtgtttgctcttgcttttctagttcttttaactgtgatgttagcgtgtaaattttggatctttcctgctttctcttgtgggcatttagtgctataaatttccctctacacactgctttgaatgtgtcccagagattctggtatgttgtgtctttgttctcgttggtttcaaagaacatctttatttctgcctttattttgttatgtacccagtagtcattcaggagcaggttgtttagtttccatgtagttgagaggttttgagtgagtttcttaatcctgagttctagtttgattgcactgtggtctgagagacagtatgttataatttcggttcttttaaatttgctgaggagtgctttacttccaactatgtggtcaattttggaataggtgtggtgtggtgctgaaaaaaacgtatattctgttgatttggggtggagagttctgtagatgtctattaggtccgcttggtgcagagctgagttcaattcctggatatccttgttaactttctgtctcattgatctgtctaatgttgacagtagggtgtgaaagtctcccattgttattgtgtgggagtctaagtctctttgtaggtcactaaggacttgctttatgaatctgggtgctcctgtattgagtgcatatatatttaggatagttagttcttcttgttgagttgatccctttaccatatgtaatggccttctttgtctcttttgatctttgttggtttaaaatctgttttatctgagactaggattgcaacccctgcctttttttgttttccatttgcttggtagatcttcctccatctctttattttgagcctatgtgtgtctctgcatgtgagatgggtttcctgaatacagcacactgatggatcttgactctttatccaatttgccagtctgtgccttttaattggagcatttagcccatttacatttaaggttagtattgttatgtgtgaatttgatcctgtcattatgatgttagctggttattttgctcgttagttgatgcagtttcttcctagccttgatggtctttacaatttggcatgtttttgcagtggctggtacaagttgtccctttccatgtttagtgcttccttcaggagctcttgtagggcaggcctggtggtgacaaaatctctcagcatttgcttgtctgtaaagtattttatttctccttcacttatgaagcttagtttggctggatatgaaattctgggttgaaaattcttttctttaagaatgttgaatattggcccccactctcttctggcttgtagagtttctgccgagagatctgctgttagtctgatgggcttccctttgtgggtaacccgacctttctctctggctgcctttaatattttttccatcatttcgactttggtgaatctgacaattatgtgtcttggagttgctcttctggaggagtatctttgtggcgttctctgtatttcctgaatctgaatgttggcctgccttgctagattggggaagttctcctggataatatcccgcagagtgttttccaacttggttccattctcctcatcactttcaggtacaccagttagacatagatttggtcttttcacatagtcccatatttcttggaggatttgttcgtttctttttactcttttttctctaaacttcttttcatgcttcatttcattcatttcattttccatcactgataccctttcttccagttgatcacatcagttactgaggcttatgcattcatcacgtagttctcgtgctgtggttttcagctccatcaggtcctttaagcacttctctgcattgattattctagttatccattcgtctaatttgttttcaaagtttttaacttctttgcctttggtttgaacttcctcctttagctcagagtagtttgatcttctgaagccttcctctctcaactcatcaaagtcattctccgtccagctttgttctgttgctggtgtggagctgcattcctttggaggaggagaggtgct

SEQ ID NO: 10355 - DNA, 13859 bp, Homo sapiens
agggaggagccaagatggccgagtaggaacagccccggtctacagctcccagcatgagcgacgcagaaggcaggtgatttctgcatttccatctgaggtaccaggttcatctcattagggagtgccagacagtgggtgcaggtcagtgggtgagcacaccacgtgcaagctgaagcatggtgaggcattgcctcactcgggaagcgcaaggggtcagggagttccctttcctagtcaaagaaaggggtgacagacggcacctggaaaatcaggtcactcccacccgaatactgcacttttccgatgggcttaaaaaacggcgcaccaggagattatatcccgcatttggctcaaagggtcctacgcccacggagtctcactgattgctagcacagcagtctgagatcaaactgcaaggcggcagcgaggctgggagaggggcgcccgccattgcccaggcttgcttaggtaaacaaagcagccgggaagctcgaactgggtggagcccaccacagcttaaggagggctgcctgcctctgtaggctccacctctgggggcagggcacagacaaacaaaaagacagcagtaacctctgcagacttaaatgtcccagtctgacagctttgaagagagcagtggttctcctagcacacagctggagatctgagaatgggcagactgcctcctcaagtgggtccctgacccctgacccccgagcagcctaactgggaggcaccccccaacaggggcagactgacacctcacgtggccgggtactccaacagacctgcagctgacggtcctgtctgttagaaggaaaactaacagaaaggacatccacaccaaaaacccatctgtacatcaccatcatcaaagaccaaaggtagataaaaccacaaagatggggaaaaaacagagcagaaaaacgggaaactctaaaaagcagagcgcctctcctcctccaaaggaacgcagttcctcaccagcaacagaacaaagctggacggagaatgactttgatgagctgagagaaggcttcagacaatcaaattattccgagctatgggaggacattcaaaccaaaggcaaagaagttgaaaactttgaaaaaaatttagaataatgtataactagaataaccaatacacagaagtgcttaaaggagctggtggagctgaaaaccaaggctcgagaactacgtgaagaatgcagaagcctcaggagctgatgcgatcaactggaagaaagggtatcagtgatggaagatgaaatgaatgaaatgaagtgagaagggaagtttagagaaaaaagaataaaaagaaatgaacaaagcctccgagaaatatgggactatgtgacaagaccaaatctacatctcatttgtgtacctgaaagtgacggggtgaatggaaccaagttggaaaacactctgcaggatattatccaggagaacttccccaatctagcaaggcaggccaacgttcagattcaggaaatacagagaacgccacaaagatactcctcgagaagagcaaccccaagacacataattgtcagattcaccaaagttgaaatgaaggaaaaaatgttaaaggcagccagagagaaaggtcgggttaccctcaaagggaagcccatcagactaacagcagatctcttggcagaaactctacaagccagaagagagtggggaccaatattcaacattcttaaagagaagaattttcaacccagaatttcatatccagccaaactaagcttcataagtgaaggagaaatacaatactttacagacaagcaaatgctgagagattttgtcaccaccaggtctgccctaaaagagctcctgaaggaagcgctgaacatggaaaggaacaaccggtaccagccactgcaaaatcatgccaaaatgtaaagaccattgagactaggaagaaactgtatcaactaacgagcaaaataaccacttaacatcataatgacaggatcaaattcacacataacaatattaactttaaatgtaaatggactaaatgctccaattaaaagacacagattggcaaattggttaaagagtcaagacccatcagtgtgctgtattcaggaaacccatctcacaggcagagacacacatgggctcaaaataaaaggatggaggaagatctaccaagcaaatggaaaacaaaaaaatgcagggattgcaatcctagtctctgataaaacagactttaaaccaacaaagatcaaaagagacaaagaaggccattatttaatggtaaagggatcaactcaacaagaagagctaactatcctaaatatatatggacccaacacaggagcacctagattcataaagcaagtcctgagtgacctacaaagagacttagactcccacacgttaataatgggagactttaacaccccactgtcaacattagacagatcaatgagacagaaagtcaacaacgatacccaagaattgaactcagctctgcaccaagtggacctaatagacatctacagaactctccaccccaaatcaacagaatatacatttttttcagcaacataccacacctattccaaaattgaccatatacttggaaataaacctctcctcagaaaatgtaaaagaacagaaattataacaaactgtctctcagaccacagtgcaatcaaactagaactcaggattaagaatctcactcaaaaccactgaactacatggaaactgaacaacctgcttctgaatgactactgggtacataacgaaatgaaagcagaaataaagatgttctttgaaaccaatgagaacaaagacacaacgtaccagaatctctgggacacattcaaagcagtgtgtagagggaaatttatagcactaaatgcccacaagagaaagcaggaaagatccaaaattgacaccctaacatcacaattaaaagaactagaaaagcaagagcaaacacattcaaaagctagcagaaggcaagaaataactaaaatcagagcagaactgaaggaaatagagacacaaaaaaccccttcaaaaaattaacgaatccaggagctggttttttgaaaggatcaacaaaattgatagaaagctagcaagactaataatgaaaaaaagagagaagaatcaaatagacgcaataaaaaatgataaaggggatatcaccaccgatcccacagaaatacaaactaccatcagagaatgctacaaacacctctatgcaaataaactagagaatctagaagaaatggataaattcctcgacacatacaccctcccaagactaaacaaggaagaagttgaatctctgaatagaccaataacaggctctgaaattgtggcaataatcaatagcttaccaatgaaaaagagtccaggaccagatggattcacagtcgaattctaccagaggtacaaggaggaactggtaccattccttctgaaactattccaatcaatagaaaaagagggaaccctccctaactcattttatgaggccagcatcattctgataccaaagccgggcagagacacaaccaaaaaagaattttagaccaatatccttgatgaacattgatgcaaaaatcctcaataaaatactggcaaacggaatccagcagcacatcaaaaagcttatccaccatgatcaagtgggcttcatccctgggatgcaagcctggttcaatatacacaaatcaataaatgtaatccagcatataaacagaaccaaagacaaaaaccacatgattatctcaatagatgcagaaaaggcctttgacaaaattcaacaacccttcatgctaaaaactctcaataaattaggtattgatgggacatatctcaaaataataagagctatctatgacaaacccacagccaatatcatattgaatgggcaaaaactggaagcattccctttgaaaactggcacaagacagggatgccctctctcaccactcctattcatcagagtgttggaagttctggccagggcaattacataggagaagggaataaagggtattcaattaggaaaagaggaagtcaaattgtccctgtttgcagacgacatgattgtatatctagaaaaccccattgtctcagcccaaaatctcctcaagctgataagcaacttcagcaaagtctcaggatacaaaatcaatgtacaaaaatcacaaccattcttatacaccaacaacagacaaacagagagccaaatcatgagtgaactcccattcacaattgcttcaaagataataaaatacctaggaatccaacttacaagggacgtgaaggaactcttcaaggagaactacaaaccactgctcaaggaaataaaagaggatacaaacaaatggaagaacattccatgctcatgggtaggaagaatcaatatcgtgaaaatggccatactgcccaaggtaatttacagattcaatgctgtacccatcaagctaccaatgactttcttcacagaattggaaaaaaactactttaaagttcatatggaaccaaaaaagagccctcatcgccaagtcaatcctgagtcaaaagaacaaagctggaggcatcacactacctgacttcaaactatactaaaaggctacagtaaccaaaacagcatggtactggtaccaaaatagagatatagatcaatggaacagaacatagccctcagaaataacaccacatttctacaactatctgatctttgagaaacctgagaaaaacaagcaatggggaaagtattccctatttaataaatggtgctgggaaaactggctagccatatgtagaaagctgaaactggatcccttccttacaccttatacaaaaatcaattcaagatggattaaagacttaaacgttagacctaaaaccataaaaaccccagaagaaaacctaggcattaccattcaggacataggcatgggcaaggacttcatgtctaaaacaccaaaagcaatggcaacaaaagccaaaattgacaaatgggatctaattaaactaaagagcttctgcacagcaaaagaaactaccatcagagtgaacaggcaacctacaaaatgggagaaaatcttcgcaacctactcatctgataaagggttaatatccagaatctacaatgaactcaaacaaatttacaagaaaaaaacaaacaaccccatcaaaaagtgggcaaaggacatgaacagacacttcttaaaagaagacatttatgcagccaaaaaacacatgaaaaaatgctcaccatcactggccatcagagaaatgcaaatcaaaaccacaatgagataccatctcacaccagttagaatggcaatcattaaaaagtcaggaaacaacaggtgctggagaggatgtggagaaataggaacacttttacactgttggtgggactgtaaactagttcaatcattgtggaagtcagtgtggcgattctcagggatctagaactagaaataccatttgacccagccatcccattactgggtatatacccaaagggctataaatcatgctgctataaagacacatgcacacatatgtttattgcggcattattcacaatagcaaagacttggaaccaaccaaaatgtccaacaatgatagactggattaagaaaatgtggcacatatacagcatggaatactatgcagccataaaaaatgatgagttcatgtcctttgtagggacatggatgaaattggaaatcatcattctcagtaaactatcgcaagaacaaaaaaccaaacactgcatattctcactcataggtgggaactgaaaaatgagaacacatggacacaggaaggggaacataacactctggggactgttgtggggtggggggaggggggagggatagcactgggagatatacctaaggttagatgacgagttagtgggtgcagcgcaccagcatggcacatgtatacatatgtaactaaactgcacattgtgcacaggtaccctaaaacttaaagtatatatataaaaaaagtattgcctcgtgggtaaccactgttacccggtgggtaataagtattgcctcgtgggtaaccactgtcacccggtggataataagtattgcctcatgagtaatcactgttacccagtggataataagtattgcctcatgggtaaccgatgttacccggtggataataagtattgtgtcgtgggtaaccgctgttacccagtggataataagtattgcctcgtgggtcactactgttacccggtggataataaatattgccttgtaggtaactactattacgtactggataataaatattgcctcataggtaacagctactattacctaatagataataattatactttatatataatatataatttaataatatgtaagaattgtatagtataatattattatattgtaaatataatgtaatatataaattatatattataataaaatatattataatttattatgttataaataaaatttatcatataatatataataaataaatgatcatatatacatattatatatgtatatgtatatatgtataatatatatgtatatgtgtatatatgtataatatatatgtatatatactatatatgtatattatccaccaccaccaccaatacttattatccactgggtaacataatagaatatataatatataaatattatatattacatatagttatatatgatataaatataaatatacatatataattttatataatataaatataaatatataatatataatttataagagttatacattatatatactatataatactccataatatatattatagtattttattttatattatattttgctatatatttattatatatgtatatatttgttatatatttacatatatcatatatttattgtatattgatgtatatatttatattttatatatatttatatataataaatgtaaataataaatgtaaaataaatatatagtatatatatttatatatataaatttatatatttatataatataatataatatatataatatataatatatataaaatatattataatatatcatatattatataattatatattatatattatataattatatataattatatattatatatatataatttataataatatattataaaattatataattatataatatataattatataattatatattatataattttatgtaatacaatattatattttatataattatataataatatatattatatgatattttatataattatatattatatattatatatttttatataatatataataatatatattatataatatataatgtaatattttattatataattgcattattattttatattttgttttttataatttatcttttatgtattttatatattttacattatattttatataatttatatttcatatattattttatatatttggtattttattttatataatttatatgattatattttattatgtataaacatgtatattacattatatatataaatatatgtaacatataatatataatatataagaatgttatatagtattatgttatattataaaattctaatgtaataaaatatataattatattatgtggtattacattttattatatgattatattatatatactatataatatattatgtattatattatatattatatattatattttattatatgttatatacaatatagtatagtatacaatgtatattttttcttttttttattttagtattattatacttcaagttttagggtacatgtgcacaatgtgcaggttagttatccatatatacatgtgccatgcttgtgtgctgcacccattgactcgtcatttagcattaggtatatctcataatgctatccctcccaccctgcccccagcccacaactgtccccagagtgtgatgttccccttcctgtgtccatgtgttctcattgttcaattcccacctatgagtgagaacatgtggcgtttggttttttgtccttgcgattgtttactgagaatgatgatttccaatttcatccatgtccctagaaaggatgtgaactcaccattttttatggctgcatagtattccatggtgtatatgtgccacattatcttaatccagtctatcatttttggatattggggttggttccaagtctgctattgtgagtagtgccacaataaacatatgtgtgcatgtgtctttatagcagcatgatttatagccctttgggtatatacccagtaatgggatggctgggtcaaatggtatttctagttctagatccctgaggattcgccacactgacttccacaatgattgaactagtttacagttccaccaacagtgtaaaagtgttcctatttctccacatcctctccagcacctgttgtttcctgactttttaatgattgccattctaactggtgtgagatggtatctcattgtggttttgatttgcatttctctgatggccagtgatggtgagcattttttcatgtgttttttggctgcataaatgtcttcttttgagaagtgtctgttcatgtcctttgcccactttttgatagagttgtttgttattttcttgtaaatttgtttgagttcattgtagattctggatattagccctttgtcagatgagtaggttgtgaagattttctcccattttgtaggttgcctgttcactctgatggtagtttcttttgctgtgcagcagctctttagtttagttagatcccacttgtcaattttggcttttgttgctattgcttttggtgttttagacatgaagtccttgcccatgcctatgtcctgaatggtattgcctaggttttcttctagggtttttatggttttaggtctaacatttaagtctttaatacattttgaattaatttttgtataaggtgtaaggaagggatccagtttcagctttctacatatcgctagttggttttcccagcaccatttattaaatagggaatactttccccattgcttgtttttctcaggtttctcaaagatcagatagttgtagatatgtggcattatttctgagggctctgttctgttccattgatgtatatctctgttttggtatcagtgctatgctgttttggttactgtagccgtgtagtatagtttgaagtcaggtagtgtgatgcctccagctttgttcttttggcttaggatgaacttggtgatgagggcccttttttggttccatatgaactttaaagtagttttttccaattctgtgaagaaagtcattggtagcttgatggggatggcattgagtctataaattaccttgggtagtatggccattttcacgatattgattcttcctacccatgagcatggaatgttcttccatttgtttgtatcctcttttatttccttgagcagtggtttgtagttctccttgaagagttccttcacgtcccttgtaagttggattcctaggtattttattatctttgaagcaattgtgaatgggagttcactcatgatttggctctctgtttgtctgttgttggtgtataagaatggttgtgatttttgtacattgattttgtatcctgagactttgctgaagttgcttatcagcttgaggagattttgggctgagacaatggggttttctagatatacaatcatgtcgtctgcaaacagggacaatttgacttcctcttttcctaattgaataccctttatttccttctcctgcgtaattgccctggccagaacttccagcactctgatgaataggagtggtgagagagggcatccctgtcttgtgccagttttcaaagggaatgcttccagtttttgcccattcagtatgatattggctgtgggtttgtcatagatagctcttattattttgagatatgtcccatcaatacctaatttattgagagtttttagcctgaagtattgttgaattttgtcaaaggccttttctgcatctattgagataatcatgtggtttttgtctttggttctgtttatatgctggattacatttattgatttgcatatattgaaccaggcttgcatcccagggatgaagcccacttgatcatggtggataagctttttgatgtgttgctgtattcggtttgccagtattttatcgagaatttttgcatcaatgttcatcaaggatattggtctaaaattctcttttttggtggtttctctgcccgtctttggtatcaggatgatgctggcctcataaaatgagttagggaggattccctctttttctattgattggaatagtttcagaaggaacggtaccagttcctccttgtacctctggtagaattcgactgtgaatccatctggtcctggactctttcgttggtaagctattgattattgccacaatttcagagcctgttattggtctattcagagattcaacttcttcctggtttagtcttaggagggtgtatgtgtcgaggaatttatccattttttctagattctctagtttatttgcgtagaggtgtttgtagtattctctgatggtagtttgtatttctgtgagatcggtggtgatatcccctttatcattttttattgcgtctatttgattcttctctctttttttctttattagtctgctagcggtctatcaattttgttgatcctttcaaaaaaccagctcctggattcgttaattgtttgaagggttttttgtgtctctatttccttcagttctgctctgattttagttatttcttgccttctgctagcttttgaatgtgtttgctcttgcttttctagttcttttaattgtgatgttagggtgtcaattttggatctttcctgctttctcttgtgggcatttagtgctataaatttccctctacacactgctttgaatgtgtcccagagattctggtacgttgtgtctttgttctcattgatttcaaagaacatctttatttctgccttcatttcgttatgtacccagcagtcattcaggagcaggttgttcagtttccatgtagttgagtagttttgagtgagtttcttaatcctgagttctagtttgattgcactgtggtctgagagacagtttgttataatttctgttcttttacattttctgaggagaggtttatttccaagtatatggtcaattttggaataggtgtggtgtgttgctgaaaaaaatgtatattctgttgatttggggtggagagttctgtagatgtctattaggtccacttggtgcagagctgagttcaattcctgggtatcgttgttgactttctgtctcattgatctgtctaatgttgacagtggggtgttaaagtctcccattattaacgtgtgggagtctaagtctctttgtaggtcactcaggacttgctttatgaatctaggtgctcctgtattgggtccatatatatttaggatagttagctcttcttgttgagttgatccctttaccattaagtaatggccttctttgtctcttttgatctttgttggtttaaagtctgttttatcagagactaggattgcaatccctgcatttttttgttttccatttgcttggtagatcttcctccatccttttattttgagcccatgtgtgtctctgcctgtgagatgggtttcctgaatacagcacactaatgggtcttgactctttatccaatttgccagtctgtgtcttttaattggagcatttagtccatttacatttaaagttaatattgttatgtgtgaatttgatcctgtcattatgatgttaagtggttattttgctcgttagttgatacagtttcttcctagtctcaatggtctttacattttggcatgattttgcagtggctggtaccggttgttcctttccatgttcagcgcttccttcaggagctcttttagggcagacctggtggtgacaaaatctctcagcatttgcttgtctgtaaagtattgtatttctccttcacttatgaagcttagtttggctggatatgaaattctgggttgaaaattcttctctttaagaatgttgaatattggcccccactctcttctggcttgtagagtttctgccaagagatctgctgttagtctgatgggcttccctttgagggtaacccgacctttctctctggctgcccttaacattttttccttcctttcaactttggtgaatctgacaattatgtgtcttggagttgctcttctcgaggagtatctttgtggcgttctctgtatttcctgaatctgaacgttggcctgccttgctagattggggaagttctcctggataatatcctgcagagtgttttccaacttggttccattcaccccgtcactttcaggtacaccaatgagatgtagatttggtcttgtcacatagtcccatatttctcggaggctttgttcatttctttttattcttttttctctaaacttcccttctcgcttcatttcattcatttcgtctttcatcactgatacactttcttccagttgatcacatcagctcctgaggcttctgcattcttcatgtagttctcgagccttggttttcagctccatcagctcctttaagcacttctctgtattggttattctagttatccattcgtctaaattttttttcaaagtttttaacttctttgccttcggtttgaatttcctcctgtagctcagagtagtttgattgtctgaagccttcttctctcaactcatcaaagtcattctccgtccaactttgttccattgctggtgaggaactgtgttcctttcgaggaggagaggtgctctgctttttagagtttcccgtttttctgctctgttttttccccatctttgtggttttatctacttttgtctttgatgatggtgatgtacagataggtttttggtgtggatgtcctttctgtttgttagttttctttctaacagacaggaccgtcagctgcaggtctgttggtgtttgctagaagtctactccagaccctgtttgcctgggtaacagcagcagtgtctgcagaacagcggattttcgtgaaccgtgaatgctgctgtctgattgttcctctggaagttttgtctcagtggagtacccagccgtgtgaggtgtcagtctgcccctactggggggtgcctcctagttaggctgcttgggggtcaggggtcagggacccacttgaggaggcagtctgcccattttcagatctccagctgtgagctgggagaaccactgctctcttcaaagctgtcagactgggacatttaagtttgcagaggttactgctgtctttttgtttgtctgtgccctgcccccagaggtggagcctacagaggcaggcagccctccttgagctgtggtgggctccacccagttcgagcttcccggctgctttgtttacctaagcaagcctgggcaatggtgggcacccctcccccagcctcactgccgcctttcagtttgatctcagactgctgtgcgagcaatcagcgagactctgtgggcataggaccctccgagccaggtgcaggatataatctcctggtgcaccgttccttaagcccgtcggaaaagtgcagtattagggtgggagtgacccgattttccaggtgccgtctgttacccctttctttgattaggaaagggaactccctgaccccttgcgcttcctgagtgaggcaatgccatgctctgcttcggctcatgcacgctgcgctgcccccactgtcctgtgcccactgtctggcactccctagtgagatgaacctggta

SEQ ID NO: 10356 - DNA, 5846 bp, Homo sapiens
ttgtttatcttttattttattttattttattttatttttttaaaattttttttattattatactttaagttttagggtacatgtgcacattgtgcaggttagttacatacgtatacatgtgccatgctggtgtgctgcacccactaactcgtcatctagcattaggtatatctcccagtgctatcccacccccctccccccaccccacaacagtccccagagtgtgatgttccccttcctgtgtccatgtgatctcattgttcacttcccacctataagtgagaatatgcagtgtgtggttttttgttcttgtgatagtttactgagaatgatgatttccaatttcatccatgtccctacaaaggacatgaactcatcattttttatgggtgcatagtattccatggtgtatatgtgccacattttcttcatccagtctatcattgttggacatttgggttggttccaagtctttgctattgtgaatagtgccactataaatatatgtgtgcatgtgtctttatatcagcatgatttatagtcatttgggtatatacccagtaatgggatggctgggtcaaatggtatttccagttctagatccctgaggaattgccacactgacttccacaatggttgaactagtttacagtcccaccaacagtgtcaaagtgttcctatttctccacatcctctccagcaccggttgtttcctgactttttaatgattgccattctaactggtgtgagatggtatcttattgtggttttgatttgcatttctctgatggccagtgatgatgagcattttttcatgtgttttttgtctgcataaatgtcttcttttgagaagtgtctgttcatgtcctttgcccactttttgatggggttgtttgtttttatcttgtaaatttgttggagttcattgtaggttcgggatattagccctttgtcagatgagtaggttgcaaaaattttctcccattttgtaggttgcctgttcactctgatggtagtttcttttgctgtgcagaagctctttagtttaattagatcccatttgtcaattttgtcttttgttgccattccttttggtgttttagacatgaagtccttgcccatgcctatgtcatgaatggtaatgcctaggttttcttctagggtttttatggttttaggtctaacgtttaagtctttaatccatcttgaattgatttttgtataaggtgtaaagaagggatccagtttcagctttctacatatggctagccagttttcccagcacaatttattaaatagggaatcctttccccattgcttgtttttcccaggtttgtcaaagatcagatagttgtagatatgcagcgttatttctgagggctctgttctgttccattgatctatatctctgttttgttaccagtaccatgctgttttggttactgtagccttgtagtatagtttgaagtcaggtagtgtgatgcctccagctttgttcttttggcttaggattgacttggtgatgcggacttttttttggttccatatgaactttaaagtagttttttccaattctgtgaagaaaggcattggtaacttgatggggatggcattgaatctgtaaattaccttgggcagtatggccattttcacgatattgattcttcctacccatgagcatggaatgttcttccatttgtttgtatcctcttttatttccttgagcagtggtttgtagttctccttgaagaggtccttcacatcccttgtaagttggattcctaggtattttcttctctttgaagcaattgtgaatgggagttcattcatgatttggctctccgtttgtctgttgttggtgtataggaatgcttgtgatttttgcacattgattttgtatcctgagactttgctgaagttgcttatcagcttaaggagattttgggctgagacaatggggttttctagatatacaatcatgtcatctgcaagcagggacaatttgacttcctcttttcctaattgactaccctttatttccttctcctgcctaattgccctggccagaacttccaacactatgttgaataggagtggtgagagagggcattcctgtcttgtgccagttttcaaagggaatgcttccagtttttgcccattcagtatgatattggctgtgggtttgtcatagatagctcttattattttgaaatatgtcccatcaatacctaacttattgagagtttttagcatgaagggttgttgaattttgtcaaaggcattttctgcatctattgagatattcatgtggtttttgtctttggctctgtttatatgctggattacatttattgatttgcgtatattaaaccagccttgcatcccagggatgaagcccacttgatcatggtggataagctttttgatgtgctgctggattccatttgccagtattttattgaggatttttgcatcaatgttcatcaaggatattggtctaaaattctcttttttggttgtgtctctgccaggctttggtatcagaatgatgctggcctcataaaatgagttagggaggattccctctttttctattgattggaatagtttcagaaggaatggtaccagttcctccttgtacctctggtagaattcggctgtgaatccatctggtcctggactctttttggttggaaagctattgattattgccacaatttcagatcctgttattggtctattcagagattcaacttcttcctggtttagtcttgggagagtgtatgtgtcaaggaatttatccatttcttctagattttctagtttatttgcatagaggtgtttgtagtattctctgatggtagtttgtatttctgtgggatcagtggtgatatcccctttatcattttttattgcgtctatttgattcttctctctttttttctttattagtcttgctagtggtctatcaattttgttgatcctttcaaaaaaccagctcctggattcattaattttttgaagggttttttgtgtctctatttccttcagttctgctctgattttagttatttcttgccttctgctagcttttgaatgtgtttgctcttgcttttctagttcttttaattgtgatgttagggtgtcaattttggatctttcctgctttctcttgtgggcatttagtgctataaatttccctctacacactgctttgaatgcgtcccagagattctggtatgttgtgtctttgttctcgttggtttcaaagaacatctttatctctgccttcatttcgttatgtatccagtagttattcaggagcaggttgttcagtttccatgtagttgagcagttttgagtgagattcttaatcctgagttctagtttgattgcactgtggtctgagagatagtttgttataatttctgttcttttacatttgctgaggagagctttacttccaagtatgtggttaattttggaataggtgtggtgtggtgctgaaaaaaatgtatattctgttgatttgaggtggagagttctgtagatgtctattaggtccacttggtgcagagctgagttcaattcctgggtatccttgttgtctttctgtctcgtcgatctgtctaatgttgacagtggggtgttaaagtctcccattattaatgtgtgggagtctaagtctctttgtaggtcactcaggacttgctttatgaatctgggtgctcctgtattggatgcatatgtatttaggatagtgagctcttcttgttgaattgatccctttacctttatgtaatggccttctttgtctcttttgatctttgttgttttaaagtctgttttatcagagactaggattgcaacccctgcctttttttgttttccatttgcttggtagatcttcctccatccttttgttttgagcctatgtgtgtctctgcacgtgagatgggtttcctgaatacagcacactgatgggtcttgactctttatccaatttgccagtctgtgtcttttaattggagcatttagtccatttacatttaaagttaatagtgttatgtgtgaatttgatcctgtcattatgatgttaactggttattttgctcattagttgatgcagtttcttcctagtctcgatggtctttacattttggcatgattttgcagcggctggtaccggttgttcctttccatgtttagcgctcccttcaggagctcttttagggcaggcctggtgtgacaaaatctctcagcatttgcttgtctgtaaagtattttatttcttcttcacttatgaagcttagtttgcctggatatgaaattctgggttgaaaattcttttctttaagaacgttgaatattggcccccactctcttctggcttgtagggtttctgccgagagatccgctgttagtctgctgggcttccctttgagggtaacctgacctttctctctggctgcccttaacattttttccttcatttcaactttggtgaatctgacaatcatgtgtcttggagttgctcttctcgaggagtatctttgtggcgttctctgtatttcctgaatctgaacgttggcctgccttgctagattggggaaattctcctggatactatcctgcagagtgttttccaacttggttccattctccccatcactttcaggtacaccaatcagacgtagatttggtcttttcacatagtcccatatttcttggaggctttgctcacttctttttattcttttttctctaaactttccttctcgcttcatttcattcatttcatcttccattgctgataccctttcttccagttgatcgcatcagctcctgaggcttctgcattcttcacgtagttctcgagccttggttttcagctccatcagctcctttaagcacttctctgtattggttattctatttttacattcttctaaatttttttcaaagttttcaacttctttgcctttggtttgaatgtcctcctgtagctcagagtaatttgatcgtctgaagccttctctcagcttgccaaagtcattctccgtccagctttgttccgttggtggtgaggagctgtgttcctttggaggaggagaggcgctctgatttttagagtttccagtttttctgttatgttttttccccatctttgtggttttatctacttttggtctttgatgttggtgatgtacagatgggtttttggtgtggatgtcctttctgtttgttagttttccttctaacagacaggaccctcagctgcaggtctgttggagtaccctgcagtgtgaggtgtcagtgtgcccctgctggagggtgcctcccagttaggctgcttgggggtcaggggtcagggacccacttgaggaggcagtctgcccgttctcagatctccagctgcatactgggagaatcactgctctcttcaaagctgtcagacagggacatttaagtctgcagaggttactgctgtctttttgtttgcctgtgccctgcccccagaggtggagcctacagaggcaggcaggcctccttgagctgtggtgggctccacccagttcaagcttcctggctgttttgtttacctaagcaagcctgggcaatggtgggcgcccctcccccgcagcctcactgccaccttgcagtttgatctcagactgctgtgctagcagtcagcgagactccatggggtaggaccctccaagccaggtgcgggatataatcccgtggtgcgccgttttttaagccagtcagaaaagcgcagtattccggtggaaatgacccgattctccaggtgccctccgtcacccctttctttgattaggaaa

SEQ ID NO: 10357 - DNA, 13972 bp, Homo sapiens
tttttttttttttttttttttttttgtatttttagtagagacggggtttcaccgtgatagccagaatggtcttgatctcctgacctcatgatctgcccgccttggcctcccaaagtgctgggattacaggcgtgagccaccgcacctggccttttttttttttttttttttgagacagggtcttgctgtgctgcccagtctggaatgcggtggcacaatcttggctcactgcaacctctgcctcccaggctcaagccatccttctgcctcagcctcctgactagctgggactacaggcaagtgcctggctaatttttggtattttttgtagaaatggggtttcaccatgttgctcaggctggtctggaactcctggactcaggccatcctcccgccttggtctcccaaagcactgggattataggcgtgagccactgcgcccggccactgtagctcatcttttaaagctgtaatgctccttgctttccttgcttccttctccttttctcttctgtttcaatgagaacaaacttgaaaaccatcagactgaaggccacttcaagaggaatcatggtctggtgtagaagccctaatgctacagactgagtgagccccggcaagcaattttccctctttgggtcttggttttctcatcttttaagccaaagcagtgactcagacctttcttactccacacagttattctggagatccaaagggctcataggtgtgaaatgctttaacttgaataactttccatgttgacatgagggctaactggatccctattccttcatcattggatatcagctggtaacatcctggctggcttttacatctatattgctttccaaaaagagctgtggtatcctataaaataatttatcattgtatctgctatagcaatagggaaatgtactagaatagaagatcgtggccatgggatgtggtgactcagatgtgggtcatgggctctgctgcctcctctgttctctgggaaggactctacttacctcctttcatgcaattttttgtgtccataattgctgcttcttgggccataggtcccattcatacttcctcatagtaaccctgttatttgtcattggtattagccagctccacagtcagcatctcatgagggtaataagaagtgggaaggaccttattttttcctgtactgaattgcctggagagcatctcttgttgattgcagctggaagtgtgacatttagtaagtggagaaacttgaatcaggcaagtggcagcctgtgccagcaggagggtaagaaagggctgaggaagaagggaaatgctcagtggagtaatttggcccaggtgttttcctggctccaggttgggtgttcacattaccacaggtggggattgtagatgctcaaggaattttccattgtgatagaaaccacaaatgagcatgcatagacacctagtttcttctattccatctgacacctgtgttgggaaaataaactccgagaggtaagcacctcacccaaggacttcctgcttttccagtgactagtgcttgagtatgacacaagcctgcattgagatctgtggcttctcaaggcacgggtccagagtgggatgagctggaagggagcttacatcacctctaggcccagtccctcactttataggtggggagacctaggctcaaagagaggccttaacttgataagggattcaggggctgtgctggaactggtgcttagatcattgggacctgattcagagctcttggctgtgcctctccacctatgtgactggatgatgatggttgggttaccctggataaaattaccttcctctcccccagaggctgaaaccacttgtgtccaaactcttgcactttctccatgggtatcatagagatactcatttctagtttatttctaaagagccatctcttccctgcaggtgcattacttctcagagtgatgcctcttccaactcacagcccctgggaacttgagaagtgctgacaatcagcagcagaagacaaatgatgtggggggatcaggaggagggactttgatgggacaggagcctgcaaggaagagggcccacggaggaatttaaaggcagcctggggatggggtgggggaatctggcttctaatacctgttttgtcatttctcaattgtgtgaccttggagaagttacttaatatctctaagccttggtgccctactctgcaaaatggggatggtaacatgtacttcagggttatatgagaatgatatgaaatactgtatttgataatatatattatattatagatgtaatatataagggctaatatatatgaaatatatgtgatatgacagcatcccacggtgcgggatgggcagtaggtgctccacaggagggagtttcttcactcctggcaacagctgcagtgcctggagcacttcctatcttcctccctttgcagagctctctaccctcaagacttctccagttgtgcaggtgacatgttacagtgacaaaggttaagcagtattttttttttttaagaaaaaatggggtatatttattggttcatgtagtttaaccttccagtttctggcatgcctagctccacgggctctaaagatgtcatcaggatgcagtctctccatctctttgccttattctcctccttgttctttccattctcaggcacactctccctgatggagataagagcaaggatgcagacccacattttggtgtcagcagaaagcccagcagaaagaccatcaatagaagtgatattaatatagcattttgtagggggccctggacacctgctttttgcctttgaccatccacctttttctaagtggcccccaggaaaaatatatgcacagaggattataagcattttttcttgcttgggcacggtggcagaaatggctggttggcttccatttttcactctttccttccatggctgcccaactaaagacacatttctatgcctccatttcagcaaagtttaatcatgtaagaatcatgtcacgagatcgtggccaatgaagtatggatgaagtggtagaggatgagatgagtgctgcggaagaaaaggaagaaggcaatagtggtgctgccataccagtcgtagaccacctacctggccgtttgtatgagaaagccatcttatttaacccacttggttaagcctaaccgatacaggcacaaatgcaagccatagcgtcctactgattgagatcagactatacagaagacttctgctgcccaggttggaggctgtcctgggcctggatttggagcttgttggagacaagacagaattttccaaagcaaggaaaattggaacagcttgcctcaggggaattcctgctcttagttggttcagatgtctgtggccaatgaagccttcaggggctggctcgcagaagcctgggaaaagctacaggaatgaaatgaatgcaaagattgtttgacattatttttatcaactcctttacatttactttcccagaaagccttttgaaaccctgttttattatgaaaatattcaaacattcacaaaactagagaaaatacctattcctagattcaacagtgatgaacataatgccatatttgcttcaactttcattcttcctcctccttttctccctccctttttctctctgcccttcttctctctctcttttgttttttcttttggctgtggggttttattttttttttgagacgagtcttgctctgtcacccaggctggaatgcagtggtgcaatctcggctcactgcaagctctgcctcccgggttcatgctattcttgggcctcagcctgctgagtagctggggctacaggtgcccaccaccacgcccggccaattttttgtatttttagtagagatggggtttcactgtattagccaggatggtctcgatctcttgaccttgtgatccgcccgcctcggcctccaaaagtgctgggattacaggtgtgagccaccgcgcacggccagctgtagtctcttaaaggaaacctctggcaatatgtctttgtatccctaaataattctgtatacaattcttaaatataagcatattttcttataggataataccattattacatataataaaattggaagtaattcattgatattatttaatacccaggattaaagctgtattacatttacctagttgtctcaaaactgtgtttttacagtgggtttctgaattaggattcaagccaagtctactcattacatttggttgttacatcaacaaaactttaatgagagctgctgcaacgacaagatctgaaggatagggttattataattctgcctattcttggagagtggacagccagagggaggtaaagaacaacagttctggggatgcacaagccagataatcccatccacaggtccctgatttactcaaagatatgtgatttctttcattttttatgtttgcaataattcattcctggagtggttcgttgaaagtggacagtgtaagggtgagacacttctagcgtctgatttaaatgcagcccttgacttatttaacatatgggttcatttgaaactcactgagctatggcctcttatgtcatgtatgttgagtgcccattatatgccagtactgtttagagacagtacaaaaaatggcaagagaagctagcaaaaaagttcttaattagacggaggacacaggcacgccctttcagctgcagggtgctgtacaggggagtggaaagaaagtgccgtggttaggccgggcgcggtggctcatgcctgtaatcccagcactttgggaggccgaggcgggctgaccacctgaggtcgggagttcaagaccagcctgaccaacatggagaaaccctgtctctactaaaaatacaaaattagccgggtgtggtggcacatgcctgtaatcccagctactagggaggctgaggcagaagaatcgcttgaacctgggaggcggaggttgcggtgagccgagatcgtgccattgcactccagcctgggcagtaagagtgaaactccgtctcaaaaaaaaaaaagaaaaaggaaagtgccatgggcacacaaagggaaggggaagtgtgatcagctcccctgggagaggtcaggagagggtttcctgaagaggtaatcatggtaatgcatgaagaggtaatgcatgttaatattttcctgctagggggaaacgcattccaagcagtgggaacagaataacccaaggcactaaaactctaaaatgcagcgatgatcttgagcagcagtgtttcaagtcacatgatgggtatttgcccccatgaaaataattcagttttgtctacaaaatgtgccttcagatttcaaatacagatgaacatactgtttagaacacattttgacaatgttacctttttaaaaaatctactagggtgtgcaccattcgttcctgccctgcctcccatcccttcccaggccaaacaaacaatattagtttttttttaattttagatatttttatttctccaaatttgttatttatcaggtgtgaatgaaataaaaaatataattgagtcccatcaccatcctcatggaaatggctttaagagaaaactggtcagatgaatattattgcttcccattttcttttcttttcttttcttttctttttttttttttttttgagacagagtctcgctctgttgcccaggctggagtgcagttatgccatcttggctcactgcaacctccgcctcccaagttcaagggattctcctgcctcagcctcctgagtagctgggattacaggcgcgtgccacacgcctggcaaatttgttgtatttttagtagagacagggtttcaccgtgttaaccaggatggtctagatctcctgatctggtgatccatccgcctcggcctcccaaagtgctgggattacaggtgtgagccaccgcacctggcttgcttcctattttcaaccagtaaatagttgctactgataaattgacagccaggagtctgtcaagaatgctcaagatatgttatataatacaacatgactgttcacagtgggggaaatcccaggaaataacttatgtgtacttcttgatttcaccatacaagacaagcacaaaagcaccatccatgcctctgagaacactggaccatgcacccttgaaaaaatctttgcctccttcatcaccaacaatcttcctccagcagtcaagcgtgcctgtgtacatgacgtcaattcctttgcgccctgactgcatcatcatgcggcatcgaacggtgtcaaatggatgggaagtcaacccagcaatggcagtgacagtctgagtgatcatccagctgatgatgatgtgagtgttcctgggatccggaagcattccctttgcagtgtcatagataccaaagtaggcagctcggtagatgataataccctgcacagacacgttaaagccttggtacaggcccttaatcccatcagtttcgtagatcttaaccaggcagttaccgaggcctcagaattccctttcagctccagctttacccacgtcagctgctagacaggtatgggcaaaatcaagagggtacacaaaacacaaggatgtggccccagcggcaccacctgatgccggattccctgcaaagtagctcccaaactgggtcctcttgtccacaccacccaggaagatctgcttgtgtttatctttgaaggccaagttgagagcctgggtggggaagtatctgaggacattgaccaggttacggtgccagaaggacaggactccctgctccttgagaatatggaccacgcagtctataatgcccttgtattgcatatctgcggtgatctgcttgctggcatgctgtacctccagcagcagcttgaccctctcgatgggcgctacccccatcttggagatggctgctgccactccacctgccaggaagtccttggtgaaggacacagcggcatctgtcatgttgaaaggaaagaggaggcaggcggcaggctgctgcaggacgagactgggccgggaactggctttgacgccagggctgcggggaaacaatattagtttttgtcaaattccaaagcttcatttttttcctcaggtccctttataacttcccaatctctcttccttgactgctcaagataaaaccaaaatataatgcgaaaaatatttccattcttttaacaaataaaaacgcctaaatcaattactttttaccttcatggttttggtaatctattcatcatgggtcaatgacacttgatagaaaagtggacttcctatctggtttaaagccaaatcaaggttgtgtcctgaggaattcttgaaactccatgaataaccctgatgcccttagggaggaatgagatgactgagagtgctatcacctgagcagtgggacccagctactttgcgcaatcaactgacaaagtgggtggcctggaactcggaaagtgtgcactcacattctcattcgagtagctctgcaaggctaggacagataggcatgactgtctatgcaacgggcagaggaaatacgtggtgtggtgtcaaagttctgcacttggggacttgtcctggctcacagccaccatcaaagtgatatgaagtaggtgacatttagagtgttttttccttgtgctaggcactgttctaagcatgctattcacaacaactcagtgaagtgggttgtattattcccctcgtatcaatcaagattctccagagaaactgaaccagtaggatgtatgtgtgtacatatttatcaggttgatgcaaaagtaatggcaatttttgccattacttttaatggcaaagactgcagttacttttgcaccaacttaatattatatgtgtgtgtgtatgtatatatatatatatatttatttttttttaatttttttttatttttattttatttttattattatactttaagttttagggtacatgtgcacattgtgcaggttagttacatatgtatacatgtgcaatgctggtgtgctgcacccactaacttgtcatctagcattagatatatttcccagtgctatccctccctgctccctccaccccacaacagcccccagagtgtgatgttccccttcctgtgtccatgtgatctcattgttcaattcccacctatgagtgagaatatgcggtgtttggttttttgttcttgtgatagtttactgagaaggatgatttccaatttcatccatgtccctacaaaggacatgaactcatccttttttatggctgcatagtattccatggtgtatatatgccacattttcttaatccagtctatcattattggacatttggcttggttccaagtctttgctattgtgaataatgctgcaataaacatacgtgtgcatgtgtctttatagcagcatgatttatagtcctttgggtatatacccagtaatgggatggctgggtcaaatggtatttctagttctagatccctgaggaatcgccacactgacttccacaatggttgaactagtttacagtcccaccaacagtgtaaaagtgttcctatttctccacatcctctccagcacctgttgtttcctgactttttcatgattgccattctaactggtgtgagatggtatctcattgtggttttgatttgcatttctctgatggccagtgatggtgagcattttttcatgtgttttttggctgcataaatgtcttcttttgagaagtgtctgttcatgtcctttgcccactttttgatggggttgtttgtttttttcttgtaaatttgtttgagttcattgtagattctggatattagccctttgtcagatgagtaggttgcgaaaattttctcccattttgtaggttgcctgttcactctgatggtagtttcttttgctgtgcagaagctctttagtttaattagatcccatttgtcaattttggcttttgttgccattgcttttggtgttttagacatgaagtccttgcccatgcctatgtcctgaatggtaatgcctaggttttcttctagggtttttatggttttgggtctaacgtttaagtctttaatccatcttgaattgatttttgtacaaggtgtaaggaagggatccagtttcagctttctacatatggctagccagttttcccagcaccatttattaaatagggaatcctttccccattgcttgtttttctcaggtttgtcaaagatcagatacttgtagatatgcggcgttatttctgagggctctgttctgttccattgatctatatctctgttttggtaccagtaccatgctgttttggttactgtagccttgtagtatagtttgaagtcaggtagcgtgatgcctccagctttgttcttttggcttaggattgacttggtgatgcgggctcttttttggttccatatgaactttaaagtagttttttccaattctgtgaagaaagtcattggtagcttgacggggatggcattgaatctgtaaattaccttgggcagtatgaccattttcacgatattgattcttcctacccataagcatggaatgttcttccatttgtttgtatcctcttttatttccttgagcagtggtttgtagttctccttgaagaggtccttcacatcccttgtaagttggattcctaggtattttattctctttgaagcaattgtgaatgggagttcactcatgctttggctctctgtttgtctgttggtgtataggaatgcttgtgatttttgcacattgattttgtatcctgagactttgctgaagttgcttatcagcttaaggagattttgggctgagataatggggttttctagatatacaatcatgtcatctgcaaacagggacaatttgacttcctcttttcctaattgaataccctttatttccttctcctgcctgattgccctggctagaacttccaacactatgttgaataggagtggtgagagagggcatccttgtcttatgccagttttcaaagggaatgcttccagttgttgcccattcagtatgatattggctgtgggtttgtcatagatagctcttattattttgaaatatgtcccatcaatacctaatttattgagagtttttagcatgaagggttgttgaattttgtcaaaggccttttctgcatctattgagataaccatgcggtttttgtctttggctctgtttatatgctggattacatttattgatttgcgtatattgaaccagccttgcatcccagggatgaagcccacttgatcatggcggataagctttttgatgtgctgctggatttggtttgccagtattttattgaggatttttgcatcgatgttcatcaaggatattggtctaaaattctcttttttggttgtgtctctgcccggctttggtatcagaatgatgctggcctcataaaatgagtcagggaggattccctctttttctattgattggaatagtttcagaagaaatggtaccagttcctccttgtgcctctggtagaattcggctgtgaatccatctggtcctggactctttttggttggtaagctattgattattgccacaatttcagctcctgttattggtctattcagagattcaacttcttcctggtttagtcttgggagagtgtatgtgtcaaggaatttatccatttcttctagattttctagtttatttgcgtagaggtgtttgtagtattctctgatggtagtttgtatttttgtgggattggtggtgatatcccctttatcattttttattgcgtctatttgattcttctctctttctttctttattagtcttgctagcggtctatcaattttgttgatcctttcaaaaaaccagctcctagattcattaattttttgaagggttttttgtgtctctatttccttcagtcctgctctgattttagttatttcttgccttctgctagcttttgaatgtgtttgctcttgcttctctagttcttttaattgtgatattagggtgtcaattttggatctttcctgctttctcttgtgggcatgtagtgctataaatttccctctacacactgctttgaatgtgtcccagagattctggtatgttgtgtctttgttctcgttggtttcaaagaacatctttatttctgccttcatttcgttatgtacccagtagtcattcaggagcaggttgttcagtttccatgtagttgagcagttttgagtgagattcttaatcctgagttctagtttgattgcactgtggtctgagagatagtttgttataatttctgttcttttacatttgctgaggagagctttacttccaagtatgtggtcaattttggaataggtgtggtgtggtgctgaaaaaaaatgtatattctgttgatttggggtggagagttctgtagatgtctattaggtctgcttggtgcagagctgagttcaattcctgggtatccttgttgactttctgtctcattgatctgtctaatgttgacagtggggtgttaaagtctcccactattaatgtgtgggagtctaagtctctttgtaggtcactcaggacttgctttatgaatctgggtgctcctgtattgggtgcatatatatttaggatagttagctcttcgtgttgaattgatccctttaccattatgtaatggccttctttgtctcttttgatctttgttggtttaaagtctgttttatcagagactaggattgcaacctctgcctttttttgttttccattggcttggtagatcttcctccatccttttattttgagcctatgtgtgtctctgcacatgagatgggtttcctgaatacagcacactgatgggtcttgactctttatccaatttgccagtctgtgtcttttaattggagcatttagtccatttacatttaaagttaatagtgttatgtgtgaatttgatcctgtcattatgatgttagctgttattttgctcgttagttgatgcagtttcttcctagtctcgatggtctttacattttggcatgattttgcagcagctggtactggttgttcctttccatgtttagcgcttccttcaggagctcttttagggcaggcctggtggtgacaaaatctctcagcatttgcttgtctgtaaagtattttatttctccttcacttatgaagcttattttggctggatatgaaattctgggttgaaaattcttttctttaagaatgttgaatattggcccccactctcttctggcttgtagggtttctgctgagagatccgctgttagtctgatgagcttccctttgagggtaacccgacctttctctctggctgcccttaacattttttccttcatttcaactttggtgaatctgacaattatgtgtcttggagttgctcttctcgaggagtatctttgtggcgttctctgtatttcctgaatctgaacgttggcctgccttgctagattggggaaattctcctggataatatcctgcagagtgttttccaacttggttccattctccccatcactttcaggtacaccaatcagacgtagatttggtcttttcacatagtcccatatttcttggaggctttgctcgtttctttttattcttttttctctaaacttcccttctcgcttcatttcattcatttcatcttccattgctgataccctttcttccagttgattgcattggctcctgaggcttctgcattcttcacatagttcttgagccttggctttcagctccatcagctcctttaaggacttctctgcattggttattctagttatccattcatctaattttttttcacagtttttaacttctttgccattggtttgagtttcctcctgtagctcggagtagtttgatcatctgaagccttcttctctcaactcgtcaaagtcattctccgtccaggtttgttcagttgctggtgaggaactgtgttcctttggaggaggagaggcactctgctttttagagtttccagtttttctgctctgttttttccccatctttgtggttttacctacttttggtctttgatgatggtgatgtacagatgggtttttggtgtggatgtcctttctgtttgttagctttccttctaacagacaggaccctcagctgcaggtctgttggagtaccctgcagtgtgaggtgtcagtgtgcccctgctggagggtgcatcccagttaggctgctcgggggtcagaggtcagggacccacttgaggaggcagtctgccccttctcagatctccagctgcgtactgggagaaccactgctctcttcaaagctgtcagacagggacatttaagtctgcagaggttactgctgtctttttgtttgtctgtgccctgcccccagaggtggagcctacagaggcaggcaggcctccttgagctgtggtgggctccacccagttcgagcttcccggctgctttgtttacctaagcaagcctgggcaatggcgggcgcccctcccccagcctcgctgctgccttgcagtttgatctcagactgctgtgctagcaatcatcgagactccgtggggtaggaccctccgagccaggtgggggatataatctcgtggtgcgccgttttttaagcccgtcggaaaagcgcagtattctggtgggagtgacccgattttcccgattttccaggtgccgtccgtcagccctttctttgattaggaaagggaactccctgaccccttgcgcttcccgagtgaggcaatgcctcgccctgcttcggctcgcgcacggtgcgcgcacccactgacctgcgcccactgtctggcactccctagtgagatgaacccggtacctcagatggaaatgcagaaatcacccgtcttctgcgtcgctcaggctgggagctgtagaccggagctgttcctattcggccatcttggctcctcc

SEQ ID NO: 10358 - DNA, 6038 bp, Homo sapiens
ttattttattttatttatttatttttttattattataatttaagttttagggtacatgtgcacattgtgcaggttagttacatacgtatacatgtgccatgctggtgtgctgcacccactaactcgtcatctagcattaggtatatctcccagtgctatccctcacccctccccccagcccaccacagtccccagagtgtgatgttccccttcctgtgtccatgtgatctcattgttcaattcccacctatgagtgagaatatgcggtatttggttttttgttcttgtgatagtttactgagaatgatgatttccaatttcatccatgtcactacaaaggacatgaactcatcattttttatggctgcatagtattccatggtgtatatgtgccacattttcttaatccagtctatcattgttggacatttgggttggttccaagtatttgctattgtgaataatgccgcaataaatatacatgtgcatgtgtctttatagcagcatgatttatagtcctttgggtatatacccagtaatgggatggctgggtcaaatggtatttctagttctagatccctgaggaatcgccacattgacttccacaatggttgaactagtttacagtcccaggaacagtgtaaaagtgttcctatttctccacatcctctccagcacctgttgtttcctgacgttttaatgattgccattctaactggtgtgagatggtatctcattgtggttttgatttgcatttctctgatggccagtgatggtgagcattttttcaagtgttttttggctgcctaaatgtcttattttgaaaagtgtctgttcatgtccttcgctcactttttgatggggttgtttgtttttttttcttgtaaattggtttcagttcattgtagattctggatattagccctttgtcagatgagtaggttgcaaaaattgtctcccattttgtaggttgctcttcactctgatggtagtttcttttgctgtgcagaagctctttagtttaattagatcccatttgtcaattttggcttttgttgtcattgcttttggtgttttaaacatgaagtccttgcccatgactatgtcctgaatggtaatgcctaggttttcttctagggtttttatggttttaggtctaacatttaagtctttaatccgtcttgaattgattttttataaggtgtaaggaagggatccagtttcagctttttacatatgtctagccagttttcccagcaccatttattaaatagggaatcctttccccattgcttgtttttctcaggtttgtcaaagatcaggtagttatagatatgcggctttatttctgagggctctgttctgttccactgatctatatctctgttttggtaccagtacaatgctgttttggttactgtagccttgtagtatagtttgaagtcaggtagtttgatgcctccagctttgttcttttggcttaggattgacttggtgacgtgggctcttttttggttccatatgaactttaaagtagttttttccaattctgtgaagaaaggcattggtagcttgatggcgatggcattgaatctgtaaattaccttgggcagtatggccattttcatgatattgattcttcctacccatgagcatggaatgttcttccatttgtttgtatcctcttttatttccttgagcgcggtttgtagttctccttgaagtggtcctgcacatcccttgtaagttggattcctaggtattttattctctttgaagcaattgtgaatgggagttcactcatgatttggatctctgtttgtctgttgttggtgtataggaatgcttgtgatttttgcacattgattttgtatcctgagactttgctgaagttgcttatcagcttaaggagattttgggctgagacaatggggttttctagatatacaatcatgtcatctgcaaacagggacaatttgacttcctcttttcctaattgaataccctttatttccttctcctgcctaattgccctggccagaacttccaacactatgttgaataggagtggtgagagagagcatccctgtcttgtgccagttttcaaagggaatgcttccagtttttgcccattcagtatgatattggctgtgggtttgcaatagatagctcttctcattttgaaatatgtcccatcaatacctaatttatggagagtttttagcatgaagggttgttgaattttgtcaaaggccttttctgcatctgttgagataatcatgtggtttttgtctttggctctgtttatatgctggattacatttattgatttgcatatattgaaccagctttgcatcccagggatgaagcccacttgatcatggtggataagctttttgatatgctgctggattctgtttgccagtattttattgaggatttttgcatcaatgttcatcaaggatattggtctaaaattctctttttcggttgtgtctctgcctggctttggtatcagaatgatgctggcctcataaaatgagttaaggaggattccctctttttctattgattggaatagtttcagaaggaatggtagcagttcctccttgtacctctggtagaattcggctgtgaatccatctggtcctggactctttttggttggtaagctattgattattgccacaatttcagatcctgttattggtctattcagagattcaacttcttcctggtttagtcttgggagagtgtatgtgtcaaggaatttatccatttcttctagattttctagtttatttgcgtagaggtgtttgtagtattctctgatggtagtttgtatttctgtgggatcagtggtgatatcccctttatcattatttattgcatctatttgattcttctctctttttttctttattagtcttgctagcggtctatcaattttgttgatcctttcaaaaaaccagctcctggattcattaattttttgaagggttttttgtgcctccatttccttcagttctgctctgattttagttatttcttgccttctgctagcttttgactgtgtttgctcttgcttttctagttcttttaattgtgatgttagggtgtcaattttggatctttcctgctttctcttgtgggcatttagtgctataaatttccctctacacactgctttgaatgcgtcccagagattctggtatgttgtgtctttgttctccttggtttcaaagaacatctttctttctgccttcatttcgttatgtacccagtagtcattcaggagcaggttgttcagtttccatgtagttgagtggttttgagtgagattcttaatcctgagttctagtttgattgcactgtggtctgagagatagttttttataatttgtgttcttttacatttgctgcggagagctttacttccaagtatgtggtcaattttggaattaggtgtggtgtggtgctgaaaaaaatgtatattctgttgatttggggtggagagttctgtagatgtgtattaggtctgcttggtgcagagctgagttcaattcctgggtatccttgttgactttctgtctcgttgatctgtctaatgttgacagtggggtgttaaagtctcccattattaatgtgtgggagtctaagtctctttgtaggtcactcaggacttgcttaatgaatcttggtgctcctgtattgggtgcatatatatttaggatagttagctcttcttgttgagttgatccctttaccattatgtaatggccttctttgtctcttttgatctttgttggtttaaagtctgttttatcagagagtaggattgcaacccctgccttttttgttttccatttgcttggtagatcttcctccatcctttaattttgagcctatgtgagaatctgcacgtgagatgggtttcctgaatacagcacactgatgggtcttgactctttatccaatttgccagtctgtgtcttttaattggagcatttagtccatttacatttaaagttaatagtgttatgtgtgaatttgatcctgtcattatgatgttagctggttattttgctcgttagttgatgcagtttattcctagtctcgatggtcattacattttggcatgattttgcagtggctggtaacggttgttcctttctatgtttagtgcttccttcaggagctcttttagggcaggcctggtggtgacaaaatctctcagcatttgcttgtctgtaaagtattttatttctccttcacttatgaagcttagtttggctgaatatgaaattctgggttgaaaattgttttctttaagaatgttgaatattggcccccactctcttctggcttgtagggtttctgccgagagatctgctgttagtctgatgggcttccctttgagggtaacccgacctttctctctggctgcccttaacattttttccttcatttcaactttggtgaatctgacaattacgtgtcttggagttgctcttctcaaggagtatctttgtggtgctctctgtatttcctgaatctgaatgttggcctgccttgctagattggggaaattctcctggataatatcctgcagagtgttttccaacttggttccattctccccatcactttcatgtacaccaatcagacgtagatttggtcttttccacatagtcccatatttcttggaggctttgctcgtttctttttattcttttttctctaaactttccttctcgcttcatttcattcatttcatcttccattcctgataccctttcttccacttgatcacctcggctcctgaggcttctgcattcttcacgtagttctcgagccttggttttcagctccatcagctcctttaagcacttctctgtattggttattctagttatacattcttctaaatttttttcaaagttttcaacttctttgcctttggtttgaatgtcttcctgtagctcagagtaatttgatcgtctgaagccttcttctctcagcttgtcaaagtcattctccatccagctttgttccattgctggtgaggagctgcattcctttggaggaggagaggcgctctgatttttagagtttccagtttttctattctgttttttccccatctttgtggttttatctacttttggtctttgatgatggtgatgtacagatgggtttttggtgtggatgtcctttctgtttgttagttttccttctaacagacaggaccctcagctgcaggtctgttggagtaccctgcagtgtgaggtgtcagtgtgcccctgctggagggtgcctcccagttaggctgctcgggggtcaggggtcagggacccacttgaggaggcagtctgcctcttctcagatctccagctgggtactgggagaaccactgctctcttcaaagctgtcagacagggacatttaagtctgcagaggttactgctgtctttttgtttgtctgtgccctgcccccagaggtggagcctacagatgcaggcaggcctccttgagctgtggtgggctccacccagttcgagcttcctggctgctttgtttacctaagcaagcctgggcaatggtgggtgcccctcccccagcctcgctgctgccttgcagtttgatttcagactgctgtgctagtaatcagcgagactccgtggggtaggaccctccgagccagatgcgggatataatctggtggtgcgccgttttttaagcccgtcggaaaagcacagtattccggtgggagtgacccgattctccaggtaccgtccgtcacccctttctttgattaggaaagggaactccctgaccccttgtgcttcctgagtgaggcaatgcctcaccctgcttcggctcgcgctcggtgcacacacccactgacctgcgcccactgtctggcactccctagcgagatgaacccggtacctcagatggaaatgcagaaatcacccgtcttctgcgtcgctcatgctgggagctgtagactggagctcttcctattcggccatctt

SEQ ID NO: 10359 - DNA, 11712 bp, Homo sapiens
tttaattatttgtgtcatttttttattattattatactttaagttttagggtacatgtgcacaacgtgcaggtttgttacatatgtatacatgtgccatgttggtgtgctacacccagtaactcgtcatttacattaggtatatctcctaatgctatccctctcctctcccctcaccccacaacagtccctggtgtgtgatgttccccttcctgtgtccaagtgttctcattgttcaattcccacctatgagtaagaacatgtggtgtttggttttttgtccttgtgatagtttgctgagaatgatagtttccagcttcatccatgtccctacaaaggacatgacctcatcattttttatggctgcatagtattccgtggtgtatatgtgccacattttcttaatccagtatatcattgttggacatttgggttggttccaagtctttgctattgtgaataatgccacaataaacatacgtgtgcatgtgtctttatagcagcatgatttataatcctttgggtatctacccagtaatgggatggctgggtcaaatggtatttctagttctagatccctgaggaattgccacacctacttccacagtggttgaactagtttacagtcccaccaacagtgtgtcattgtttagtgtttatgttgcttcttctctgtatcacattctatcttaatgtatcagttttggatcatttgtatttgcctgatacgttcttaagtatttttgttcagttaagttctctgggtgatattctctgatttcttgtataagctcaaatgccaatctgtttttttcttttcctttgtaggtaacatgttctttttgccagactacttgttaagagtttcttttttattgttatgtatattttgttacccgttctttagtttggagcttagtgagttctttattttggaacttagtgactttcagtctacagagtcaaacctttgtgttagggaagaaattttcttgtttcctattattgcctttgcctctattaagtccccttaatcttttattttatgatatatttctttttacattttactttgtgaattgaagtttttttgtacttgttctcttagctaatttcatcttcttttttaattgttcaaattcaatttgagtagataaattatttttaagggttcttcacgtatagatacatacacacaaggtatttttataataaatttaggttattttctttctttttgagctttggagctttattcattcagtgtacatgttctgttttattctgactgttcagaacctatcttttagctgctaagcaaagtatctgcgcttctttgccctttcccctgctgtgttttcttcagtagcccccatgatgcatatggctctgccttgcttgtcttaggtgcacacacccacattaggagccctagtccttctggtcagttgttaaattactttacagggtaattttccagtttttgttagtaccctgggggcaagcatctctcttgttgtggaaaggggtggggtatagcctttgaacttctgtttttctctttaggtcagtatgataccacttgcttttaagtttttcagtcttttagtctttcagaagtgtatcaaagtctgatctctggccttctggtgccattcataccattctgttaaggatttattttttcctatttaacttaatgatttttgagacacttggagaaggagagatttgcttcctcacatatatgcagtctaggattggaagtccactgggaagtttttttcataggttttgagaggaaacttttctgcagggaacattcactgaggcagaatcgtggtgcctttcatgcaatttggtgggtcttaggagtgtgaatggctgcttcagtgtcttcttcagctggcaggtggggtcttccagaaaaaaatagtttaccacatcaggaatgatgaagatatggtcaagcattccacttttcctatctgcaaaacagggcttaaaatagtatatcaaacaataactagttagaagatacaatggaagaaaaagtgccactttcaggagcaacaaagatgagataccagaaataaacttaacaacaaactctaaaacctacatgataaaaatgtaaaacatcattgaagaacataaaagaagtttggaacaattgaagaatatgtcttcttcataactggaaatacacagcaccataaagatgttagtttaaggtaatttataaatttaatgtgatgataagaatcctttttaaaaaactaaataaattgatcttggctaaataatttaaccaagaaactttgtaggaaaaagaaaaagaacaagggtagtggatatagaggacttttgcaactagatgttgtattgtgaagtcttagtctcagtaattaaaacccattggttgtgggacatgaagagaagtattatggggtagaatggaaatcctagaaaatatacccacgttcataggaatatttaggtatggtaaagatggcttctcaaaagccaatggagatgatatgtactattcagtaaatagttttggagaaactgaatattcacctgtggaagtaaagaaaataggaatcctacctcataccaaggatgaattacaaatgatcaaagatttaaatgtactaaatgaaaacataaaaaattttttaaggccgggtgcagtgactcatgtctgtaatcccagcattttgggaggctaaagtggcaggatcccttgaggccaggagtttgaaaccagcctagtcaacatagcaagaccccgtcactacaaaagaaaaataaaaaacttagcctggcatggtggtacctgcctgtagtcccaggtactcaggagactgaagtgggaggatctcttgagcccaggagtttgaggctatagtaagctacgattacaccaccgccctccagccctggaaatagagcgagaccctgtctccagaaaaaaaaaaaaggtaatagaaaacatagagaattaacacaatttttttttataataggaaggcattttgaactatgatttaaagcagtaaaagaaaaagccatgaaggaaagggttgagaaatgaggctacataaaacaaaaaacatctacattacataaaatatctacattacaatatataaaacatctgcattacaaaaaacaaagtaagcaaggacatatgacgacctgggaaaaatacctgaaactcatattacagatgaaggattaatctccttgatatacaaagaactaaaaatggttaaggaaaagtccaacaacccaatagaaaaatgggctaatatataaaaatattttttttactgtagaaaatttgtttttcagatatatttgtacatatatagaatgacatataaatgcacaaacttattgtagcattgtttgtaatagcagtaggttggaaagaatttattcaagtactcatcagtaggggattagttaaataaattaaggaatagctacacaggggaacattatatagttgtaaaaacagcaaagaagttctatgtattgatatggaaagtctccaggaaaagttagaggaaaacaaggtatacaacaatgtgtaaacctactaagaagcagcatatttacacattgcttttatactctgtgtggctgtattttttcatacatatgaataatttatgtgtgaatatatgcagctatagtaataaagtttagaagactctattggaaattgattaccttggcaggtagagaatttaatgggttggaattgggcagattggagacagggatgggaataatttttctttatatgcctttttgatttgtgtatggttcaattgtaatacatatgaagaattatagtatataagacattttgagtgggaagtgaccaaaactgaattccaactggcttcagcaaacctctgttccatagtcaccaccaatgtaactgtcctcatcggtgttagagggttagtttctttattttttaggaattctgggaatattagatttatgtaagtgattattagtccacataggctaaccagaacagagttcctgtattttaagaggctttacaatttaatttattaatatcctttgaaaagtaggaaaatttattgcaccctatgataagcagataatgacttttatcagttccaggcacacagaacgctggtagtctcagatttatatcatcagccgtgggtaaaatgaatagagaacaccaaactgagcacttcggacatatctcaaagagctgttctctccagtggaattgaggcatatttgtacacagacagacaaaaattgactaacaaaccaaattctctgttgctaatagagagtagatatcaaatggtctgaccataaaatggacttccagccattgttgccaccagtggatagtaactggcgacaactgttgcagagccagaaccaaatttggcgaagaataagaaataaacaaaaaccgatcggaagaatagaaagagaaagatatcctgcttggaatttattccagggatgaagaaaagatattcctgggagtgaacagtccctgaggtgcagttcctgggtaatatgctatatttgtcttgagaaggaaatccgcttggacttctctgtggaacttcaacattgtcaagtgtaatttttcataagttatgagcaagaatctcatacaaataaagtgaatatgtgacagatatttacataatttcttagtgagggaaacagcaagatgataaggctggttcccataatctttcaatttgggggaagtagttttctctcctatttttcattttcattgaatgcattcaggtttaagtctgaagatgttttacagaaaactctggtaaaaaatacagcagtaggttacttaggtattatggttggcagcccttaactacagcttttttgttagatatgaaactacaatcaaacactttaagcataaaatttgtccataattttaaaagcatagaacaagagagtcaaataaatggatactaaatttcttattgagttggttcatcattgcatggcccataatgtatatataaatataatttttatacctcttaaactgtgtaacatttaccaataaacttttacactttgaggtataacacatataataaagtctacaaatcataaatgtacagcttgataaatttatacaaaatatatacccagataatcacaacccaatcaaggtatagattatttctagcacacacaaaacctttgtcccttctagtcagtacttctcccaaaggtaacttattctgactttgtcacaatagattaatttagcctgttcttgaacttaatgccaatagaattatatagcatgtactctaatgtctgacttctgttgcacaacatttatgagattcatctactttttgcaaattcctttttatttatgagtagtagtctattgtatgaaaaatattaaaactagtattgttgatttattttttctcttaataaataattgtatatagtggtatatgtaaatacacgatttttttaatatattgaccatgtaaaccagtgatcttgctaatgtattaattctaaattgcttatagagtcttttagattgtttatttacatgttatgtcttcaaataaagaaaaatgttttcttttccaatttttttttattattatactttaagttttagggtacatgtgcacaatgtgcaggttagttacatacgtatacacgtgccatgctggtgcactgcacccactaactcgtcatctagcattaggtatatctcccaatgctatccctcccccgtccccccaccccacaacagtccccagagtgtgatgttccccttcctatgtccatgtgttctcattgttcagttcccacctatgagtgagaatgtgcggtgtttggttttttgttcttgagatagtttactgagaatgatgatttccaatttcatccatgtccctacaaaggacatgaactcatcattttttatggctgcatagtattccatggtgtatatgtgccacattttcttaatccagtctatcattgttggacatttgggttggttccaagtctttgctattgtgaataatgccgcaataaacatacgtgtgcatgtgtctttatagcagcatgatttataatcctttgggtatatacccattaatgggatggctgggtcaaatggtatttctagttctagatccctgaggaatggccacactgacttccacaatggttgaactagtttacagtcccagcaacagtgtaaaagttttcctatttgtccacatcctctccagcacctgttgtttcctgactttttaatgatcaccattctaactggtgtgagatggtatctcactgtggttttgatttgtatttctctgatggccagtgatgatgagcattttttcatatgttttttggctgcataaatgtcttcttttgagaagtgtctgttcatgtccttcgcccactttttgatggggttgtttgtttttttcttgtaaatttgtttgagttcattgtagattctggatattagccctttgtcagatgagtaggttgcaaaaattttctcccattttgtaggttgcctgttcactctgatggtagtttcttttgctgtgcagaagctctttagtttaattagatcccatttgtcaattttggctcttgttggcattgcttttggtgttttagacatgaagttcttgcccatgcctatgtcctgaatggtaatgcctaggttttcttctagggtttttatggttttaggtctaacgtttaagtctttaatccatcttgaattgatttttgtatcaggtgtaaggaagggatccagtttcagctttctacatatggctagccagttttcccagcaccatttactaaatagggaatcctttccccattgcttgttcttctcaggtttgtcaaagatcagatagttgtagatatgcggcattatttctgagggctctgttctgttccattgatctatatctctgttttggtaccagtaccatgctgttttggttactgtagccttgtagtatagtttgaagtcaggtagtgtgatgtctccggctttgttcttttggcttaggattgacttggcgttgtgggctcttttttggttccatatgaactttaaagtagttttttccaattctatgaagaaagtcattggtagcttgatggggatggcattgaatctataaattaccttgggcagtatggccattttcacgatattgattcttcctacccatgagcatggaatgttcttccatttgtttgtatcctcttttatttccttgagcaatggattgtagttctccttgaagaggtccttcacatcccttgtaagttggattcctaggtattttattctctttgaagcaattgtgaatgtgagttcactcatgatttggctctctgtttgtctgttgttggtgtataagaatgcttgtgatttttgtacattgattttgtatcctgagactttgctgaagttgcttatcagcttaaggagattttgggctgagacaatggggttttctagatatacaatcatgtcatctgcaaacagggacaatttgacttcctcttttcctaattgaataccctttatttccttctcctgcctaattgccctggccagaacttccaacactatgttgaataggagtgagtggtgagagagggcatccctgtcttgtgccagttttcgaagggaatgcttccagtttttgcccattcagtatgatattggctgtgggtttgtcatagatagctcttattattttgagatatgtcccatcaatacctaatttgttgagagtttttagcatgaagggctgttgaattttgtcaaaggccttttctgcatctattgagataatcatgtggtttttgtctttggttctgtttatatgctggattacatttattgatttgcttatattgaaccagccttgcatcccagggatgaagcccacttgatcatggtggataagctttttgatgtgctgctggattcagtttgccagtattttattaagggtttttgcatcaatgttcatcaaggatattggtctaaaattctcttttttggttgtgtctctgcccggctttggtatcaggatgatgctggcctcgtaaaatgagttagggaggattccctctttttttattgactggaatagtttcagaaggaatggtaccagtttctccttgtacctctggtagaattcggctgtgaatccatctggtcctggactctttttggttggtaagctattgattattgccacaatttcagctcctgttattggtctattcagagattcaacttcttcctggtttagtcttggtagagtgtatgtgtcaaggaatttatccatttcttctatattttctagtttatttgcgtagaggtgcttgtagtattctctgatggtagtttgtatttctgtgggatcggtggtgatatcccctttatcattttttattgcgtctatttgattcttctctctttttttctttattagtcttgctagcggtctatccattttgttgatcctttcaaaaaaccagctcctggattcattaattttttgaagggttttttgtgtctctatttccttcagttctgctctgattttagttatttcttgccttctgccagcttttgaatgtgtttgctcttgcttttccagttcttttaattgtgatgttagggtgtcgatgttggatctttcctgctttctcttgtgggcatttagtgctataaatttccctctacacactgctttgaatgcgtcccagagattctggtatgttgtgtctttgttctcgttggtttcaaagaacatctttatttctgccttcatttcgttatgtacccagtagtcattccggagcaggttgttcagtttccatgtagttgagcggttttgagtgagattcttaatcctgagttctagtttgattgcactgtggtctgagagatagtttgttataatttgtgttcttttacatttgctgaggagagctttacttccaagtatgtggtcagttttggaatgggtgtggtgtggtgctgaaaaaaatgtatattctgttgatttggggtggagagttctgtagatgtctattaggtccgcttggtgcagagctgagttcaattcctgggtatccttgttgactttctgtctcgttgatctgtctaatgttgacagtggggtgttaaagtctcccattattaatgtgtgggagtctaagtctctttgtaggtcactcaggacttgctttatgaatctgggtgctcctgtattgggtgcatatatatgtaggatagttagctcttcttgttgaattgatccctttaccattatgtaatggccttctttgtctcttttgatctttgttggtttaaagtctgttttatcagagactaggattgcaacccctgcctttttttgttttccatttgcttgatagatcttcctccatccttttattttgatcctgtgtgtgtctctgcatgtgagatgggtttcctcaatacagcacactgatgggtcttgactctttatccaattttccagtctgtgtcttttaattggagcatttagcctgtttacatttaacgttaatattgttatgtgtgaatttgatcctgtcattatgatgttagctggttattttgctcgttagttgatgcagtttcttcctagtctcaatggtctttacattttgtcatgattttgcagcggctggtaccggttgttcctttccatgtttagcgcttccttcaggagctcttttagggcctgcctgtggtgacaaaatctctcagcatttgcttgtctgtaaagtattttatttctccttcacttatgaagcttagtttggctggatatgaaattctgggttgaaaattcttttctttaagaatgttgaatattggcgcccactctctaatggcttgtagagtttctgccgagagatccgctgttagtctgatgggcttccctttgagggtaacccgacctttctctctggctgcccttaacattttttccttcatttcagctttggtgaatctgacaattatgtgtcttggagttgctcttctcgaggagtatctttgtggcgttctctgtatttcctgaatctgaacgttggcctgccttgctagattggggaaattctcctggataatatcctgcagagtgttttccaacttggttccattctccccgtcactttcaggtacaccaatcagacgtagatttgatgttttcacatagtcccatatttcttggaggctttgctcatttctttttattcttttttctctaaacttcccttctcgcttcatttcattcatttcatcttccattgctgataccctttcttccagttgatcgcattggctcccgagtcttctgcatttttcatgtagttctcgagccttggttttcagctccatcagctcctttaagcacttctctgtattggttattctagttatacattcttctaaatttttttcaaagttttcaacttctttgcctttggtttgaatgtcctcccatagctcagagtaatttgatcgtctgaagccttcttctctgagctcgtcaaagtcattctccatccagctttgttccgttgctggtgaggaactgcgttcctttggaggaggagaggcgctctgctttttagagtttccagtttttctgttctgttttttccccatctttgtggttttatctacttttggtctttgatgatggtgatgtacagatgggtttttggtgtggatgtgctttctgtttgttagttttccttctaacagacaggatcctcagctgcaggtctgtgggagtacccggccatgtgaggtgtcagactgcccctgcttgggggtgcctcccagttaggctgctcgggggtcaggggtcagggacccacttgaggaggcagtctgcctgttctcagatctccagctgcgtgctgggagaagcattgctctcttcaaagctgtcagacagggacatttaagtctgcagaggttactgctgtctttttatttgtctgtgccctgcccccagaggtggagcctacagaggcaggcaggcctccttgagctgtggtgggctctacccagttcgagctttctggctgctttgtttacctaagcaagcctgggcaatggtgggcgcccctccccgagccttgctgccgcctagcagtttgatctcagactgctgtgctagcaatcagcgagactccgtgggcgtaggaccctccgagccatgtgcgggatataatgtcctggtgcgccattttttaggcccgtcggaaaagcgcagtatttgggtgggagtgaaccgattttccaggtgccgtctgtcacccctttctttgactaggaaagggaactccctgaccctctgcgcttcccgagtgaggcaatgcctcgccctgctttggcttgtgcacggtgcgcgcacccactgtcctgtgcccactgtctggcactccctagtgagatgaacctggtacctcagatggaaatgcagaaatcacccgtcttctgcgtcgctcacgctgggagctgtggaccggagctgttcctatttggccatcttggctcctctttctt

SEQ ID NO: 10360 - DNA, 6057 bp, Homo sapiens
tatttactccaatttttacttttctttttttttattattatactttaagttttagggtacatgtgcacattgtgcaggttagttacatatgtatacatgtgccatgctggtgcgctgcacccactaactcgtcatctagcattaggtatatctcccaatgctatccctcccccctccccccaccccaccacagtccccagagtgtgatattccccttcctgtgtccacgtgatctcattgttcaattcccacctatgagtgagaatatgcggtgtttggttttttgttcttgcgatagtttaccgagaatgatggtttccagtttcatccatgtccctacaaaggacatgaactcataattttatatggctgcatagtattccatggtgtatatgtgccacattttcttaatccagtctatcattgttggacatttgggttggttccaagtctttgctattgtgaataatgccgcaataaacatacatgtgcatgtgtctttatagcagcatgatttatagtcatttgggtatatacccagtaatgggatggctgggtcaaatggtatttctagttctagatccctgaggaatcgccacactgacttccacaatggttgaactagtttacagtcccaccaacagtgtaaaagtgttcctatttctccacatcctctccagcacctgttttttcctgactttttaatgattgccattctaactggtgtgagatgatatctcatagtggttttgatttgcatttctctgatggccagtgatgatgagcattttttcatgtgttttttggctgcataaatgtcttcttttgagaagtgtctgttcatgtccttcgcccactttttgatggggttgtttgtttttttcttgtaaatttgtttcagttcattgtagattctggatattagccctttgtcagatgagtaggttgcaaaaattttctcccatgttgtaggttgcctgttcactctgatggtagtttcttttgctgtgcagaagctctttagtttaattagatcccatttgtcaattttggcttttgttgccattgcttttggtgttttggacatgaagtccttgcccatgcctatgtcctgaatggtaatgcctaggttttctcccagggtttttatggttttaggtctaacgtttaaatctttaatccatcttgaattgatttttgtataaggtgtaaggaagggatccagtttcagctttctccatatggctagccagttttcccagcaccatttattaaatagggaatcctttccccattgcttgtttttctcaggtttgtcaaagatcagatagttgtaggtatgcggcattatttctgagggctctgttctgttccattgttctatatctctgttttggtaccagtaccatgctgttttggttactgtagccttgtagtatagtttgaagtcaggtagtgtgatgcctccagctttgttcttttggcttaggattgacttggcgatacgggctcttttttggttccatatgaacattaaagtagttttttccaattctgtgaagaaagtcattggtagcttgatggggatggcattgaatctgtaaattaccttgggcagtatggccattttcatgatattgattcttcctacccatgagcatggaatgttcttccatttgtttgtatcctcttttatttcattgagcagtggtttgtagttctccttgaagaggtccttcacatcccttgtaagttggattcctaggtattttattctctttgaagcaattgtgaatgggagttcactcatgatttggctctctgtttgtgtgttgttggtgtataagaatgcttgtgatttttgtacattgaatttgtatcctgagactttgctgaagttgcttatcagcttaaggagattttgggctgagacgatggggttttctagatatacaatcatgtcatctgcaaacagggacaatttgacttcctcttttcctaattgaataccctttatttccttctcctgcctgattgccctggccagaacttccaacactatgttgaataggagcggtgagagagggcatccctgtcttgtgccagttttcaaagggaatgcttccagtttttgcccattcagtatgatattggctgtgggtttgtcatagatagctcttattattttgaaacacgtcccatcaatacctaatttattgagagtttttagcatgaagggttgttgaattttgtcaaaggctttttctgcatctattgagataatcatgtggtttttgtctttggctctgtttatatgctggattacatttattgatttgcatatattgaaccagccttgcatcccagggatgaagcccacttgatcatggtggataagctttttgatgtgctgctggattcggtttgccagtattttattgaggatttttgcatcaatgttcatcaaggatattggtctaaaattctcttttttggttgtgtctctgcccggctttggtatcagaatgatgctggcctcataaaatgagttagggaggattccctctttttctattgattggaatagtttcagaaggaatggtaccagttcctccttgtacctctggtagaattcggctgtgaatccatctggtcctggactctttttggttggtaaactattgattattgccacaatttcagctcctgttattggtctattcagagatttaacttcttcctggtttagtctttggagggtgtatgtgtcgaggaatgtatccatttcttctagattttctagtttatttgtgtagaggtgtttgtagtattctctgatggtagtttgtatttctgtgggatcagtggtgatatcccctttatcattttttatcgtgtctatttgattcttctctctttttttctttattagtcttgctagtggtctatcaattttgttgatcctttcaaaaaaccagctcctggattcattgattttttgaagggttttttgtgtctctatttccttcagttctgctctgattttagttatttcttgccttctgctagcttttgaatgtgtttgctcttgcttttctagttcttttaattgtgatgttagggtgtcaattttggatctttcctgctttctcttgtgggcatttagtgctataaatttccctctacacactgctttgaatgcgtcccagagattctggtatgttgtgtctttgttctcgttggtttcaaagaacatctttatttctgccttcatttcgttatgtacccagtagtcattcaggagcaggttgttcagtttccatgtagttgagtggctttgagtgagattcttaatcctgagttctagtttgattgcactgtggtctgagagatagtttgttataatttctgttgttttacatttgctgaggagagttttacttccaactatgtggtcaattttggaataggtgtggtgtggtggtgaaaaaaatgtatattctgttgatttggggtggagagttctgtagatgtctattaggtctgcttggtgcagagctgagttcaattcctgggtatccttgttgactttctgtctcgttgatctgtctaatgttgacagtggggtgttaaagtctcccattattaatgtgtgggagtctaagtctctttgtaggtcattcaggacttgctttatgaatctgggtgctcctgtattgggtgcatatatatttaggatagttagctcctcttgttgaattgatccctttaccattatgtaatggccttctttgtctcttttgatctttgttggtttaaagtctgttttatcagagactaggattgcaacccctgcctttttttgttttccatttgcttggtagatcttcctccatccttttattttgagcctatgtgtgtctctgcacgtgagatgggtttcctgaatacagcacactgatgggtcttgactctttatccaacttgccagtctgtgttttttaattggagaatttagtccattgacatttaaagttaatattgttatgtgtgaatttgatcctgtcattatgatgttagctggtgattttgctcgttagctgatgcagtttcttcctagcctcgatggtctttacattttggcatgattttgcagcagctggtaccagttgttcctttccatgtttagtgcttccttcaggagctcttttagggcaggcctggtagtgacaaaatctctcagcatttgcttgtctgtaaagtattttatttctccttcacttatgaagcttagtttggctggatatgaaattctgggttgaaaattcttttctttaagaatgttgaatattggcccccactctcttctggcttgtagagtttctgccgagagatccgctgttagtctgatgggcttccctttgagggtaacccgacctttctctctggctgcccttaacattttttccttcatttcaactttggtgaatctgacaattatgtgtcttggagttgctcttctcgaggagtatctttgtggcgttctctgtatttcctgaatctgaacgttggcctgccttgctagattggggaagttctcctggataatatcctgcagagtgttttccaacttggttccattctccgcatcactttcaggtacaccaatcagacgtagatttggtcttttcacatagtcccatatttcttggaggctttgctcatttctttttattcttttttctctaaacttcccttctcacttcatttcattcatttcatcttccattgctgataccctttcttccagttgatcgcgtcggctcctgaggcttctgcattcttcacgtagttctcgagccttggttttcagctccatcagctcctttaagcacttctctgtattggttattctagttatacattcttctaaatttttttgaaagttttcaacttctttgcctttggtttgaatgtcctcccgtagctcagagtaatttgatcgtctgaagccttcttctctcagctcgtcaaaatcattctccatccagctttgttccgttgctggtgaggaactgcgttcctttggaggaggagaggtgctctgcgttttagagtttccagtttatctgttctgttttttccccatctttgtggttttatctacttttggtctttgatgatggtgatgtacagatgggttttcggtgtggatgtcctttctgtttgttagttttccgtctaacagacaggaccctcagctgcaagtctgttggaataccctgcagtgtgaggtgtcagtgtgcccctgctggggggtgcctcccagttaggctgctcgggggtcaggggtcagggacccacttgaggaggcagtctgcccgttctcagatctccagctgcgtgctgggagaaccactgctctcttcaaagctgtcagacagggacatttaagtctgcagaggttactgctgtctttttgtttgtctgtgccctgcccccagaggtggagcctacagaggcaggcaggcctccttgagctgtggtgggctccacccagtccagcttcccggctgctttgtttacctaagcaagcctgggcaatggcgggcacccctcccccagcctcgctgccgccttgcagtttgatctcagactgctgtgctagcaatcagcgagattccgtgggcgtaggaccctctgagccaggtgtgggatatagtctcgtggtgcgccgttttttaagccggtctgaaaagcgcaatattctggtgggagtgacccgattttccaggtgcgtccgtcacccctttctttgactcggaaagggaactccctgaccccttgcgcttcccaggtgaggcaatgcctcgccctgccccagctcgcgcacggtgcgcgcacccactggcctgcgcccactgtctggcactccctagtgagatgaacccagtacctcagatggaaatgcagaaatcacccatcttctgcatcgctcccgctgggagctgtagaccggagctgttcctattccgccatcttggctcctcccccaat

SEQ ID NO: 10361 - DNA, 5977 bp, Homo sapiens
atcttttattttattttattttattattattatactttaagttttagggtacatgtgcacaatgttcaggtttgttacatacatatacatgtgccatgttggtgtgctgcacccattaactcatcatttagcattaggtatatctcctaatgctatccctcccccctcccccccacctcatgacagtccccagagtgtgatgttccccttcctgtgtccatgtgttctcatggttcaattcccacctatgagtgagaacatgcggtgtttggttttttgtccttgcgatagtttgctgagaatgatggtttccagtttcatccgtgtccccacaaaggacatgaactcatccttttttatggctgcatagtattccatggtgtatatgtgccatattttcttaatccagtctatcgttgttggacatttgggttggttccaagtctttgctattgtgaatagtgctgcaataaacatacgtgtgcatgtgtctttatagcagcatgatttataatcctttgggtatatacccagtaatgggatggctgagtcaaatggtatttctagttctagatccctgaggaattgccacactgacttccacatggttgaactagtttacagtcccaccaacagtgtaaaagtgttcctatttctccacatcctctccagcacctgttgtttcctgactttttaatgatcgcaattctaattggtgtgagatggtatctcattgtggttttgatttgcatttctctgatggccagtgaagatgagcattttttcatgtgttttttggctgcataaatgtcttcttttgaggagtgtctattcatatccttcgcccactttttgatggggttgtttgtttttttcttgtaaatttgtttgagttcattgtagattctggatattagccctttgtcagatgagtaggttgggaaaattttctcccattttgtaggttgcctgttcacctgatagaagtttcttttactgtgcagaagctctttagtttaattagatcccatttgtcaattttggcttttgttgccattgcttttggtgttttagacatgaagtccttgcctatgcctatgtcctgaatggtattgcctaggttttcttctagggtttttatggttttaggtctaacatgtaagtctttaatccattttgaattaatttttgtgtaaggtgtaaggaagggatcaagtttcagctttctacacatggctagccagttttcccagcaccatttattaaatagggaatcctttccccatttcttgtttttgtcaggtttgtcaaagaccagatggttgtagatatgcatcattttttgagggctctgttctgttccattgatctatatctctgttttggtaccagtaccatgctgttttggttactgtagccttgtagtatagtttgaagtcaggtagcgtgatgcctctggctttgttcttttggtttaggattgacttggtgatgcgggctcttttttggttccatatgaactttaaagtagttttttccaattctgtgaagaaagtcattggtagcttgatggggatggcattgaatctataaattaccttgggcagtatggccattttcacgatattgattcttcctacccatgagcatggaatgttcttccatttgtttgtatcctcttttatttccttgagcagtggtttgtagttcttgttgaagaggtctttcacatcctttgtaagttggattgctaggtattttattctctttgaagcaattgtaaatgggagttcactcatgatttggctctctgtttgtctgttattggtgtataagaatgcttgtgatttttgtacattgattttgtatcctgagactttgctgaagttgcttatcagcttaaggagattttgggctgagacaatggggttttctagatatacaatcatgtcatctgcaaacagggacaatttgacttcctcttttcctaattgaataccctttatttccttctcctgcctaattgccctggccagaacttccaacactatgttgaataggagtggcgagagagggcatgcctgtcttgtgccagttttaaaagggaatgcttccagtttttgcccattcagtatgatattggctgtgggtttatcatagatagctcttattattttgagatacgtcccatcaatacctaatttattgagagtttttagcatgaagggttgttgaattttgtcaaaggccttttctgcatctattgagataatcatgtggtttttatctttggttctgtttatatgctggattacatttattgatttgcgtatattgaaccagccttgcatcccagggatgaagcccacttgatcatggtggataagctttttgatgtgctgctggatttggtttgccagtgttttattgaggatttttgcatcaatgttcatcaaggatattggtctaaaattctcttttttggttgtgtctctacctggctttggtatcaggatgatgctggcctcagaaaattagttagggaggattccctcgttttctgttgattggaatagtttcagaaggaatggtaccagctcctccttgtacctctggtagaatttggctgtgaatccgtctggtcctggacttttttttggttggtaagctattgattattgccacaatttcagagcctgttattcatctattcagagattcaacttcttcctggtttagtcttgggagggtgtatgtgttgaggaatttatccatttcttctagattttctagtttatttgcatagaggtgtttgtagtattctctgatggtagtttgtatttctgtgggatcggtggtgatatcttctttatcattttttattgcgtctatttgattcttctctcttttcttctttattaatcttgctagcggtctatcaattttgttgatcttttcaaaaaagcagctcctggattcattaattttttgaagggttttttgtgtctctatttccttcagttctgctctaattttagttatttcttgccttctgctagcttttgaatatgtttgctcttgcttttctagttcttttaattgtgatgttagggtgtcaattttggatctttcctgctttctcttgtgggcatttagtgctataaatttccctctacacactgctttgaatgcgtcccagagattctggtatgttgtgtctttgttctcgttggtttcaaagaacatctttatttctgccttcatttcattatgtacccagtagtcattcaggagcaggttgttcagtttccatgtagttgagcagttttgagtgagtttcttagtcctcagttctagtttgattgcactgtggtctgagagacagtttgttataatttctgttcttttacatttgctgaggagagctttacttccaagtatgtggtcaattttggaatagatgtggtgtagtgctgaaaaaaatgtatattctgttgatttggggtagagagttctgtagatgtctaccaggtctgcttggtggcagagctgaggtcatttcttgggtatctttgctaactttctgtctcattgatcggtctaatgttgacagtggggtgttaaagtctcccattattaatgtgtgggagtctaagtctctttgtaggtcactcaggacttgctttatgaatctgggtgctcctgtattgggtgcatatatatttaggatagttagctcttcttgttgaattgatccctttaccattatgtaatggccttctttgtctcttttgatctttgttggtttgaagtctgttttatcagagactaggattgcaacccctgcctttttttgttttccatttgcttggtagatcttcctccatccttttattttgagcctatgtgtgtctctgcacatgacatgggtttcctgaatacagcacactgatgggtcttaactctttatccaatttgccagtctgtatcttttaaattggagcatttagtccatttacatttaaagttaacattgttatgtgtgtatttggtcctgtcattatgatgttagctggttattttgcttgttagttgatccagtttcttcctagccttgatggtctttacattttggcatgttttttcagtggttggtaccagtttttcctttccatgtttagtgcttccttcaggagctcttttagggcaggcctggtggtgacaaaatctctcagcatttgcttgtctgtaaagtattttatttctccttcacttatgaagcttagtttggctggatatgaaattctgggttggaaattcttttctataagaatgttgaatattggcccccactcccttctggcttgtagagtttctgctgagagatccactgttagtctgatgggcttccctttgagggtaacccgacctttctctctggctgcccttaacattttttccttcatttcaactttggtgaatctgacaattatgtgtcttggagttgctcttcttgaggagtatctttgtggctttctctgtatttcctgagtctgaatgttggcctgccttgctggactggggaagttctcctggataatatcctgcagagtgttttccaacttggttccattctctctgtcactttcaggtacaccaatcagacgtaggtttagtcttttcacatagtcccatatttcttggaggctttgtttgtttctttttattcttttttctctaaacttcccttcttgcttcatttcattcatttcgtcttccatcactgatatcctttcttccagttgattgcattggctcctgaggcttctgcattcttcacatagttcttgagccttggctttcagctccatcagctcctttaaggacttctctgcattggttattctagttatccattcatctaattttttttcacagtttttaacttctttgccattggtttgagtttcctcctgtagctcggagtagtttgatcatctgaagccttcttctctcaactcgtcaaagtcattctccgtccaggtttgttcagttgctggtgaggaactgtgttcctttggaggaggagaggcactctgctttttagagtttccagtttttctgctctgttttttccccatctttgtggttttacctacttttggtctttgatgatggtgacgtacagaagggtttttgatgtggatgtcctttctgtttgttagttttccttctaacagacaggaccctcagctgcaggtctgttggagtttgctaggggtccactccagaccctgtttgcctgggtatcagcagcggtggctgcagaacagcagtggctgtagaacagcggatcttggtgaaccgcaaatgctgctgcctgattgttcctctggaagttttgtctcagaggagtacccagccgtgtgaggtgtcagtctgccactactggggggtgcctcccagttaggctgctcaggggtcaaggacccacttgaggaggctgtctgcccgttctcagatctccagctgcgtgctgggagaaccactactctcttcaaagctgtcagacagggacatttaagtctgcagaggttactgctgtctttttgtttgtctgtgccctgcccccagaggtggagcctacagaggcaggcaggcctccttgagctgtggtgggctccacccagtttgagcttcccggctgctttgtttacctaatcaagcctgggcaatggcaggcgcccctcccccagccttgctgccaccttgcagtttgatctcagactgttgctgtgctagcaatcagcgagactccgtgggcgttggaccctctgagccatgtgcgggatataatctcctggtgtgccatcttttaagcccattggaaaagtgcagtattagggtgggagtgaccggattttccaggtgccatctgtcaccccattctttgactaggaaagggaactccccgacc

SEQ ID NO: 10362 - DNA, 5035 bp, Homo sapiens
ttttgtttttttctttcatttttattatttactagtttcttttttttctgtttttattatactttaagttttagggtacatgtgcacaacgtgcaggtttgttacatatataaacatgtgccatgttggtttgctgcacccattaacttgatatttaacattaggtatatctcctaatgctatccttcccccctgcccccaacccatgacaggccccggtgtgtgatgttccccttcctgtgtccatgtgttctcattgttcaattcccacctatgagtgagaacatgtggtgtttggttttttgtccttgcgatagtttgctgagagtgatggtttccagcttcatccatgtccctgcaaaggacatgaactcatcattttttatggctgcatagtattccatggtgtatatgtgccacattttcttaaaccagtctatcattgttggacatttgggttggttccaagtctttgctattgtgaatagtgccacaataaatatacgtgtgcacgtgtctttatagcagcatgatttataatcctttgggtatatacccagtaatgggatggctgggtcaaatggtatttctagttctagatccttgaggaatcgccacactgacttccacaatggttggactagtttacagtcccaccaacagtgtaaaagtgtttctatttctccacatcctctccagcacctattgtttcctgactttttaatgatcgccattctaaatggtgtgagatggtatctcattgtggttttgatttgcatttctctgatggccagtgatgatgagcattctttcatgtgtctgttggctgcataaatgtcttcttttgagaagtgtctgttcatatcctttgcccacttgttgatgaggttgtttgtttttttcttgtaaatttgtttgagttcatcgtagattctggatattagccctttgtcagatgagtagattgcaaaaattttctcccattctgtaggttgcctgttcactctgatggtagtttcttttgctgtgcagaagctctttagtttaactagatcccatttgtcaattttgtcttttgttgccattgcttttggtgttttagacatgaagtccttgcccatgcctatgtcctgaatggtattgcctaggtttccttctagggtttttatggttttagttctaacatttaagtctttaatccatcttgaattaatttttgtataaggtgtaaggaagggatccagtttcagttttcgacataaggctagccagttttcccagcaccatttattaaatagggaatcctttccccatttcttgtttttgtcaggtttgtcaaagatcagagagttgtagatatgtggcattatttctgagggctccgttctgttccattggtctatatctctgttttggtaccagtaccatgctgttctggttactgtagccttgtagtatagtttgaagtcaggtaacatgatgcctccagctttgttcttttgacttaggattgacttggcaatgctggctctttggtggttccatatgaactttaaagtagtttttttccaattctgtgaagaaagtcattggtaacttgatggggatggcattgaatctataaattaccttgggcagtatggccattttcatgatattgattcttcctacccatgaacatggaatgttcttccatttgtttgtgtcctcttttatttcattgagcagtggtttgtagtgctccctgaagaggtccttcacatcccttgtaagttggatacctaggtattttattctctttgaagcagttgtgaatgggagttcactcatgatttgactctccatttgtctgttattgatgcataagaatgcttgtaatttttgcacattgatttcatatccagaaactttgctgaagttacttatcagcttaaggagattttgggctgagacaatggggttttctagatatacaatcttgtcatctgcaaacagggacaatttgacttcctcttttcctaatggaataccctttatttctttctcctgcctgactgccctggccagaacttccaacactatgttgaataggagtggtgagggggcatccctgtcttgtggcagttttcaaagggaatgcttccagtttttgcccattcagtatgatattggctgtgggtttgtcatagatagctcttattattttgagatacatcccatcaatacctaatttattgagagtttttggcatgaagggctgttgaattttgtcaaaggccttttctgcatctattgagataatcatgtggtttttgtcattggttctgtttatatgctggattacatttattgattttcatatgttgaaccagccttgcaatgcaggaatgaagtcctcttgatcatggtggataagcttcttgatgtgctgctggattcggtttgccggtattttattgaggatttttgcatcgacgttcattgggatattggtctaaaattctctttttttgttgtgtctctgccaggctttggtatcaggatgatgctggcctcatgaaatgagttagggaggttttcctctttttctattgattggaatagtttcagaaggaatggtaccagctcttccttatacctctggtagaatttggctgtgaatccgtctggtcctggacttttttttggttggtaagctattaattattgcctcaatttcagagcctgtcattggtctattcagatattcaacttcttcctggtttagtcttcggagagtgtatgtgttgaggaatttatccatttcttccagattttcttgtttatttgcatagaggtgtttgtagtattctctgatggtagtttgtatttctgtgggatcggtggtgatatcccctttatcattttttattgcggctatttgattcttctctctttttttctttattagtcttgcaagcagtctgtcaattttgttgatcttttcaaaaaaccagctcctggattcattgattttttaagggttttttgtgtctctatttccttcagttctgctgtgatcttagttatttcttgccttctgctaacttttgaatgtgtttgctcttgcttctctggttcttttaattgtgatgttagtgtgtcaattttagatctttcctgctttctcttgtgggcatttagtactataagtttccctctacacactgctttgaatgtgtcccagagattctggtatgttgtgtctttgttctcactagtttcaaagaacttctttatttctgccttcatttcattatgtacccagtagtcattcaggagcaggttgttcagtttccatgtagttgagcagttttgagtgagtttcttaatcccgagttctagtttgattgcactctggtctgagagacagtttgttataatttctgttcttgaacatttgctgaggagtgctttacttccaactatgtggtcaattttggaacaggtgtggtgtggtgctgaaaagaatatatattctgttgatttggggtgaagagttctgtagatgtctattaaggctgcttggtgcagagctgagttctattcctggatatccttgttaactttctgtctcactgatgtgtctaatgttgacagtgggttgttaaagtctcccattattattgtgtgggagtctaactctctttgtaggtctctaaggacttgctttatgaatctgggtgctcctgtattgggtgcatatatatttaggaaagttagctcctcttgttgaattgatccctttaccattaagtaatggccttctttgtctcttttgatctttgttggtttaaagtctgttttatcagagactaggattgcaatccctgcctttttttgttttccatttgcttggtagatcttccttcatccctttattttgagcctacgtgtgtctgtgcacatgagatgggtttcctgaatacagcacactgatgggtcttgactctttatccaatttgccagtctgtgtcttttaattggagcatttagcccatttacatttaaggttaatattgttatgtgtgaatttgatcctgtcattatgatgttagctgattattttgcttgttaattgttgcaatttcatcctagcatcaatgatctttataatttggcatgtttttgcagtggctggtagaagtttttcctttccatgtttagtgcctccttcaagagctcttttagggcaggcctggtagtgacaaaatctctcagcatttgcttgtctgtaaaggattttatttctccttcacttatgaagcttagtttggctggatatgaaattctgggttgaaaattcttttctttaagaatgttgaatattggcccccactctcttctggcttgtagagtttctgctgagagatcagctgttagtctgatgggcttccctttgtgggtaacctgacctttctctctggctgcccttaacattttttccttcatttcaactttggtgaatctgacaattatgtgtcttggagttgctgttctcagtgagtatctttgtggcattgtctgtatttcctgaatttgaatgttggcctgcctttctagattggggaagttctcctggataatatcctgcagagtgttttccaacttggttccattctccctgtcactttcaggtacaccaatcagacgtagctttggtcttttcacagtcccatatttcttggaggctttgttcatttctttttattcttttttctctaaacttctcttcttgcttcatttcattcatttgatcttccatcactgataccctttcttccagttgattgaatcggctaatgaggcttgtgcatttgtcatgtagttcttgtgcctcggttttcagctctgtcaggtagttaaaggacttctctgtattggttattctagttagccattcatttaatctttttccaaggtttttaacttctttgccatgggttcaaacttcctcctttagcatgaagtagtttgattgtctgaagccttcttc

SEQ ID NO: 10363 - DNA, 12043 bp, Homo sapiens
gaaaaaaagttttttttttcttattatactttaagttttagggtacatgtgcacattgtgcaggttagttacatatgtatacatgtgccatgctggtgtgctgcacccactaactcatcatctagcattaggtatatctcccgatgctatccctccccgctccccacaacccacaacagtccccagagtgtgatgttccccttcctgtgtccatgtgatctcattgttcaattcccacctatgagtgagaatatgcggtgtttggttttttgttcttgcgatagtttactgagaatgatgatttccaatttcatccatgtccctacaaaggacatgaactcatcgttttttatggctgcatagtattccatggtgtatatgtgccacattttcttaatccagtctatcattgttggacatttgggtggttccaagtctttgctattgtgaatagtgccccaagaaacatacgtgtgcatgtgtctttatagcagcatgattgatagtcctttgggtatatacccagtaatgggatggctgggtcaaatggtatttctagttctagatccctgaggaatcgccacactgacttccacaatggttgaactagtttacagtcccagaaaaaaagttttttgataaaagatttggttaagccctgggagcagatctggatccaattccaactctgtttatttactaacttaaaacaaccaagcctcagttcccagaagagaaaaaattattgtacctatatttgtagggctgctgtgaacagtaaatgagttaatatttgtacatctggaataacattttggtgtattagctgatatatttccagggagaatttagcacaatgtcaaactacaaatgtaaattcttattcttggagtacctaatagatgtgaatgaatatctactgaatcagatctttatgtcacagaggctgaagcataccctgggataggagaaaagatgggcaaggtggaaaggagagtactgatgttaatgagacagaaaacctgagaaaatgtaggaaggagggcacacccttccttgaccttcatagagaaatatagttccctcctatatgcttggtaatctcagattatagagaacagcaacatgttgtaagagtagcagagtagaagcactgaatgttatgttagaggattttgaggctgacaagttcccacccatgcatggtacaggagcagctgactgtttcccagtgtaatcagcactggagcagaggggacactgagagttctagatctggagggctattgcggtgcaggtggagaatgcaacagtaggtgccagggaatcaagtaagaccaaaaaatgctagtgaaaaataaccgtctcaatcaaatgagacaatgaagaccccaggagaggttaacctagatagaacacagctgaggacaaaatactttctttgcccaaaaactggatactgcataaatatctccagctgccctccagtgcctaccacaataccaagaaaactgaagggagagtggaagaaaccctgaatggacttagttcatccagagattaggattccatctttgccaccagtggaatcaattttgaaataaaagttcagtcatagaaaaaaaatggttacatttctagttcactaaatttatagtcagtaaaacttggactttctatacttacaaagggctaagccctgtgactggcacagaaaattagatctataaaagatagcttgtattactatcaagaaggagaatttgtgaggtggaaagaattggaggtttaagaaaattgaaaagcttgtgcttggtaacaagaagggtctcaatcaatatttgttaaaaaaaatcatagattaaagctggaggcaaggtggttggatcataaccttattgtggcaggagcacaccttaatcttctttcgttcctcataacacctagcacagttttggatccattgttttttgcttcctacatatttgttaaaataatgaaaattgaagaacactattggtgatattggagtaggagaatagggaaatacatggactagagccttcagagggagacttatatttatgaaggtcaagtcagcgaacaagacttcagaagtcatgatttaaagaaaggtggagggtgagcatgttcatattaagcagatatttgtagtaaattgagaggaatggagatatcaaatatggtagaagaaaacccttgaaaaagataaatttgcatttgaagagataatctatatcataataccataatatttctccagaaaaatgagaggtttttccagctataccaaatatgtgtcagaggttttcaatatttttgaaattttatttccaattgacagataataattgtatatattggatatttatagggtacaatgtaatattttggtatgtttacatcactgaatgattaaatcaagctgaaatcaatcctctctgagattgtatagcgtgagtacttaggtgccaggcagtgaatgagggttttcagttatcctagtatgttctgttacattggaattcttttgttgttgttgcttaactttttgtgtcatgattcctaaaatatttgaattagtaattactcctagttcagaagtcacaaaatataataataaatatagtgaaaagtcttccacccgctccctatcctctgtgtcttcagtttcaagcaatctctcaacacataggtaataattattaggttcttgatactttggatgcatctatggcaattataactatattgtcttaaccccactccttttttcccaagacagcttcatatacacactgtttaatatctttatttctttctttaatttaacaatatattttgaagatattataaataaaatttgggggggtgtcataatttacctactccactaatgctggacatttgtgtgaatttctatctttacaattattaatgcagaagtaagtaacacgtgtgtcattttcacacatgctagtatttatagcataagttctcagttttcttacccaggaattatcgggcaaagagttatacacttattttgataatgcagtctttccttggtattcatggtttcaggacccctacagataccaaaatctgtggggatgctcaagtctcttatataaaatggtgtggtatgtatttgcatataatgtactcacattctccgtttatatactttaaatcctctctagactacttataatatcgaatacaatgtaaatgctatgtaaatagttgttatactgtatttctttttaaatttgtatcatttttattgttatgttatttcttccaagtattttcaattggtagttggttgaatccacagacgcagaacccacagatgctgaggactgactgtatccccaaagtacccttcataagatttgtttctttggattcattttaaatctcatcacctagagtagattttctttgagaaaatcctcaatgacatctgtgttaggccatccttgcactgctataataaaatagttgagactgcatgatttaaaaagaaaagtttaattggcccacagttctacagtctttacagaaagcaggctgttggtatctgctcctggggaggccccaggaagcttacaatcatggcggaaagtgaagcaggagcaggcacatcacatggtgaaagcaggagcaagagagagagagtaacagggaggtgctcacatttttaaacaaccgggtctcttgagaactcactcaccatcacaagaacagtatcaagcaatgaggcatcctcctccatgacccaaacacctcccaccagccccacctccaacattggggattacatttcaacatgagatttggagagggtatggattcaaactataacaacatctaaatgtgacaagactagaaagtccaaataagggagtcatttattaaaatttttctaagactttaaatgttaaaaataatgaaaggttaccactgatctttataattaagcatcacgactgaaccaaattactcagaaagataatcacagagtcagttggtttatgttgtaactccacagagggcctgaaagtcgatttaatcttagggattggtaaagggcttgcatttatttgacaggatactttcagtttactaggcactgtagagttatccgtctctaagactcagacatattatgcttctcacgctttctaaaatggttcaaccaaaatgtcactgaagaaagaagttggcatcaaagttaataattaaaaatcctaatattcacctgcagtggagagaaaccctaaggatcatcatatgtggatatttgaagatactttagtagactacaattttaacttaaaggtttaaacttatgcaaaaatattcatgtgtttttgttttgttttgctgtttatttgtttgtttttgtgacagagttttgctcttgttgcccagactggagtgcaatggtgcgatcttggctcaccacaacctccgcctcctggattcaagtaattctcctgcctcagcctcccgagtagctgggattacaagcatatgccaccacatccggctgattttgtatttttaatagagatggggtttctccatgttggtcaggctggtcttgaactccacccaaaggtgatctgcccacctcagcctcccaaagtgttgggattacaggcgtgacccacagtgcccagccatttcatgtgtttttgtatatatatttatacatcaaataatttatctgtagggcttagcagtcacacaataatccttagaatatcagctctaatgggctaattggggagtgctttaacatgtgtagaaatctttgttcaaagtacaggatgccaagaggggcttggtgcagctgtagaatcctgaagcaagaaaagaggtatagactgaagaaaagaacaaggtcataccatggaggtagagaagataaaactcttattgggcatctgtctgggcactgacactccaacaaaaacagatgcatggataaataaataatggttatgatttttttaaatcaatagttattatagaatattgaagatattccactgtatctagttttcattgttgctgatgggatatcaattagttatggtctttattcagaagtcacttattttcttctaactctatttttaaatttcatttttaattgataacatgatatttgtacctacttatagggtacacgtgaattttgtcacattcatagattgtataatgatctagtcatcacttcaaatacttatcatttctatgtgttgggtacacttcaacactttaagtcctcttttctagctattttgaaatataaatacattacaatacattattgttaactgtagtcaccctacttacagtaggacattagaacttatttcttctatctctatctaactgtgtgtgtggttttttttttttttttttttgagacggagtctcgctctgtcacccaggctggagtgcagtggttccatctcggctcgctgcatgctccgcctcctgggctcatgccattctcctgcctcagcctctggagtagctgggactacaggcgcccgccaccatgcccggagaattttttgtatttttagtggagacggggtttcaccgtgttagccaggatggtctcgatctcctgacctcgtgatccacccgcctcggcctcccaaagtgctgggattacaggcgtgagccaccgcgcccagcctaactgtgtgttaatacccattaagcaacctctcttcatctcccttaccacaccagacaatacaaaaactattccaagcctctagtatctatcattctactctctacctccttgagattaactttgttagctcccacatatgagtgagaacatttgctgtctccctttctgtgcctggcttatttcacttaaaataatgacctccaaaggccaggcgcggtggctcatacctgtaatcccagcactttgggaggccgaggcaggcggatcacgaggttaggagatcaagaccatcctggctaacatggtgaaaccccatctctactaaagtacaaaacaattagccgggtgtcgtggcgggcgcctgcagtcccggctacacaggaggctgaagcaggagaatggcgtgaacccgggaggcagagcttgcagtgagctgagatcatgccactgcactccagcctgggcaacagagcgagactccatctcaaaaaaaaaaataatgataataataataataataatgacctccagttccatccctgttgctgcaaatacatgatttcattttcttttatagccaagtagtattccattgtgtgtatacatcacatttgtctttatccatttttccattgatggacacaggttgattccctaataaacatgaggacgcagatattctttgatatgctgattttcttttctttggataaatatctaatagtggattgctggtttgttttgtagttctatttttagtttttttttttttttgagaaatttccatactgttctccacagtggctctagtaatttacattcccagcaacaatgtataagagttcctgtttctctcatcctcaccagcatctgctactttttgtctttttaaaaatagccattctaaatggggtaagaggatctcttattatggttttgatttgcgtttcctcatgattagtgatattgagcatttttttgtgcacctgttagctatggttatgtgtgcttttgagaaatgtctattcatgtccttggcccatttgctaaatggcattatttgggtcttccctgttgggttccttgtattttttttttttttttttttggtctattcagggattcaatttctttttctttttcttttttttaattatactttaagtcctagggtacatatgcacaacgtgcaggtttgttacatatgtatacatgtgccatgttggttgctgcacccattaactcgtcatttacattaggtatatctcctaatgctgtgtcatgtgccccaaccccatgacaggccctggtgtgtgatgttccccgtcctgtgtccaagtgttctcatcgttcaattcccacctatgagtgagaacatgtggtgtttgattttttgtccttgtgatagtttgctgagaatgatggtttccagcttcatccatgtccctacaaaggacatgaactcatccttttttatggctgcatagtattccatggtgtatatgtgccacattttcttaatccagtctatcatagatggacatttgggttggttacaagtctttgctattgtgaatggtgccacaatgaacatacatgtgcatatgtctttatagcagcatgatttataatcctttgggtatataccaagaaatgggatggctgggtcaaatggtatttctagttctagatccctgaggaatcgccacactgacttccacaatggttgaactagtttacagtcccaccaacagtgtaaaagtgttcttacttctccacatcctctccagcacctgttgtttcctgactttttaatgatcaccattctaactggtgtgagatggtatctcattgtggttttgatttgcatttctctgatggccagtgatgatgagcattttttcatgtgcctgtcggctgcataaatatcttcttttgagaagtgtctgttcatatccttcacctgctttttaatgggtttttttttttttttttttttgtaaatttgtttgagttctttgtagattctggatattagccctttgtcaaatgagtagattgcaaaaatattctcccattctgtaggttgcctgttcactctgatggtagtttcctttgctgtgcagaagctctttagtttaattagatcccatttgtcaattttggcttttgttgccattgcttttggtgttttagacatgaagtccttgcccatgcctatgtcctgaatggtattgcctaggttttcttctagggtttttatggttttaggtctaacatttaagtctttaatccatcttgaattaatttttgtataaggcgtaaggaagggatccagtttcagctttctacacatggctatccagttttcccagtaccatttattaaatagggaattctttccccattgcttgtttttctcaggtttgtcaaagatcagacggttgtagatgtgtggcattatttctgagggctctgttctgttccattggtctatatctctgttttggtaccagtaccatggtgttatggttactgttgccttgtagtatagtttgaagtcaggtagtgtgatgcctccagctttgttcttttggcttaggattgtcttggcaatgagggctcttttttggttccatatgaactttaaagtagtttttttccaattctgtgaagaaagtcattggtagcttgatcgggatggcattgaatctagaaattaccttgggcaatgtggccattttcacgatattgattcttcctatccatgagcatggaatattcttccatttgtttgtatcctcttttatttccttgagcagtggtttgtagttctccttgaagaggtccttcacatcccttgtaagttgtattcctaggtattttattctctttgaagcaattatgaataggagttcactcatgatttggctctctgtttgtctgttattgatgtataagaatgcttgtgatttttgcacattgattttgtattctgagattttgctgaagttgcttataagcgtaaggatattttgagctgagatgatggggttttctaaatatacaatcatgtcatctgcaaacagggaaaatttgacttcctcttttcctaattgaataccatttatttctttctcctgcctgattggccctggccagaacttccaacactatgttgaataggagtggtgagagagggcatccctgtcttgtgccagttttcaaagggaatgcttccagtttttgcccattcggtatgatattggctgtgtgtttgccataaatagctcttattattttgagatacgtcccatcaataccaaatttattgagggtttttagcattaaaggctgttgaattttgtcaaaggccttttctgcatctgttgagataatcatgtggtttttgtctttggttgtgtttatatgctggattacgtttattgatttgcatatgtttaaccagccttgcatcctatggatgaagcccacttgatcatggtggatgagctttttgatgtgctgctggaatcggtttgccagtattttattgaggatttttgcattgatgttcatcaggggtattggtctaaaattatcttttttttgttgtgtctctgccaggctttggtaacaggatgatgctggcctcataaaatgagttagggaggattctctcttttgctgttgattggaatagtttcagaaggaatggtaccagctcctccttgtaccactggtagaattcggatgtgaatccgtctggtcctggagtttttttggttgataggctattaattattgcctcaatttcagagcctgttattggtctattcagggattcaagttcttcctgatttagtcttgggaggttgtatgtgtccaggaatttatccatttcttctagattttcaggttatttgcgtagaggtgtttatagtattctctgatggtattttgtatttctgtgggatcagtagtgatatcccctttatcattttttattgtgtctatttgattattctctcttttcgtctttattagtcttgctagtagtctatcaattttgttgatcttttcaaaaaaaacagctcctcgattcattgatttttttgaaggattttttgtgtctctgtctccttcagttctgctctgatcttagttatttcttgccttctgctaacttttgaatgtgtttgctcttgcttctctagttcttttaattatgatgttagggtgtcaattttagatctttcctgctttctcttgtgggcatttagtgctataaatttccctctacacactgctttaaatgtgtcccagagattctggtatgttgtgtctttgctctcattgggttcaaagaacatctttatttctgccttcattttgttatgtacccagtagtcattcaggagcaggttgttcagtttccacgtagttgagcggttttgagtgagtttcttaatcctgagttctagtttgattgcactgtggtctgagagacagtttgttataatttctgttattttacacttgctgaggagtgctttacttccaactatgtggtcaattttggaataagtgtaatgtggtgctgagaagaatggatattctattgatttggggtggagtgttctgtagatgtctgttaggtctgcttggtgcagagctgagttcaattcccggatatgcttgttaactttctgtctcgttgatctgtctaatgttgacagtggggtgttaaagtctcccattattgtgtgggagtgtaagtctctttgtaagtctctaaggacttgctttatgaatctgggtgctcctgtattgggtgcatatatatttaggatagttagctcttcttgtttgaattgatccctttaccattatgtaatggccttctttgtctctcttgatctttgttggtttaaagtctgttttatcagagtctgggattgcaaaccctgcctttttttgttttccatttgcttggtagatcttcctccatccctttattttgagcctatgtgtgtctctgcacttgagatgggtctcctcaatacagcacactgatgggtcttgactctttatccaatttgccagtctgtgtcttttaattggagcatttgacccatttacatttaaggttaatattgttatgtgtgaatttgatcctgtcattatgatgttagctggttattttgctcgttagttgatgcagtttcttcctagcatcgatggtctttacaatttggcatgtttttgcagtggctggtactggtttttcctttccatgtttagtgcttccttcaggaggtcttgcagggcaggcctgatggtgacaaagtctctcagcgtttgcttgtctgtaaaatattttatttctccttcacttatgaagcttagtttggctggatatgaaattctgggttgaaaattctttcctttaagaatgttgaataatggccctcactctcttctggcttgtagagtttctgctgagagatccactgttagtctgatgggcttccctttgtgggtaacccaacctttctctctggcttcccttaacactttttccttcatttcagctttggtgaatctgacaattatgtgtcttggagttactcaaggagtatctttgtggctttctctgtatttcctgaattggaatgttggcctgtcttgctaggttggggaagttctcctggataatatcctgcagactgttttccaacttggttccattctccccatcactttcgggtacaccaatcagacgtagatttggtcttttcatatagtcccatatttcttgcaggctttgttcatttctttttactcttttttctctaaacttctcttctcacttcatttcattcatttgatcttcaatcactgatacccttacttccagttgatcaaatcagctactgaagcttgtgcattcatcacgtagttctcatgccatggttttcagctccatcaggtcatttaaggatttgtgtacactggttattctagttagccattcgtctaatcttttttcaaggtttttagcttctttgcgatgggttctaagttcctcctttagcttggagaagtttgatcgtctgaagccttcttctctcaactcatcaaagtcattctctgtccagctttgttctgttgctggtgaggagctgtgttcctttggagggggagaggcactctgatttttagaattttcagcttttctgctctgtttttcccccatctttgaggttttatttacctttggtctttgatgat

SEQ ID NO: 10364 - DNA, 45698 bp, Homo sapiens
ttttcattttttttgagacagagtcttgctctgtcacccaggctggagtgcagtggctcgatcttggctcactgcaagctccgcctcctgggttcacgccattctcctgtctcagccacccgagtagctgggactccaggcacccgccaccacacccagctaattttttgtatttttagtagagacgcggtttcaccatgttagccaggatggtcttgatctcctgacctcgtgatcctcctgcctcggcctcccaaagtgctgggatttcaggcgtgagccaccgtgcccggcctgtattttttaaattattattttgttgttgttgttgttgttgttgttgagacagggtctcactctgttgcccaggctggagtgcagtggtgtgattatggctcactgtagccttgacctcccaagcccgagcgatcctctgagtagctgggactacaggcgcatgacaccatgcctggctaatttttgtattttttgtagagacagggttttgtcatgttgcccaggctgatctcaaactcatgggctcaagtgatctgtccccctcagcctctcaaagtgctgggatttcaggcatgaaccaccatgcctggctcctcaccaaatttttttttttaatttttttttaaattttattttatagagatggggtttcaccatgttgtccaggctagtctcgaactcctgggctcaagtgatctgcccaccttcgcctcccaaagtgctgggattacaggcttgagccactgtgcccagccatcaccaccaaatttttaagacaaaaaaattttattttccatagaaaataaatccttttcttaggggatgctgccccattgagaataattttaaaaacgattttgattttcagatgaaatcaggacttcccagattgtgttttgtgatgaactagtttttgacatgttaacagaatacccatggggggcagggaatagtctaaggttgaattaaaatagttttctttttctcctaattgcatgatttttcatggcctttaatgtgtcaatgaatatttttcaatttactagaggaagatgcattatttccccaaacaatttcattgtggattcctttggaaattgctgaactcacttgtttaaaatataacccctgtaggcatattagattctgtgggttgcactttgaagataaagacaagaatgtctgtaatgtgttccatttacagtaggatctaggcagcctttggtcacctagagaactttgagttgcatatgtcttgctattatttgtaagcatgtctgttctaccagaaggttatggaataattcaaccctgagctgtgaaatttaataaacctaggaaaagttatgaaaaaaattatggaaaactaatatgcaaaactatattgtatatcaacctaaaagtggcaggaagatggagtggccaaaataagtaaaccctaggtttcctatgttgataatactggtaaaatttttcttctgttaatagttcaaataattttcataacgggattatatgcaaattagaggagacagcgcattcaatgaaaaatatatgaatgcatctctaaaaatgtactaaaatggacatataaataaattagattctttggagaaatctgaaggaaaattgatgatcagatagaaatatcagtgaaacacacaaaagaacacaaagaaaacaaatcaatgaaataggtggaaaccattacattttaaaaattttagtttcagggggtacatgtgcaggtttattttgtggatatattgagtgatgctgaggtttgggcttctaatgatcccattgcccaagtattgagcatactacctgataggcagtttttcagcccttgttcctttccctccctccctccccacttttggagtccacaatgtctgttgttcctatctttgtgtccatgtgtacccagtgtttagctcccacttacaagtaagaacctgccttacttggctttttttctgtgttagtcctcttaacataatggcctccagctgcatccatgttgctgcaaaggacatgatttcattcttgttgatgactgcatagcattccatggtgtatatgtaccacattttctttatccaatccaccattgataggcacttgggttgattccatgtctttgctattttgaatagtgttgtgataaacatgtgagtgcaggtatctttttggtagaatgatctattttcctttgggtatatacccagtaatggaattgttgggttgaatggtaattctatttttagttctttgagaaatctccaaactgttttccacaggggctgaactattaataatttgcattcctgccacaggaatttcttctcaacctcaccaatatctggtatttttcatttatttatttattttgagacggagtctcactctgtcgcccagactggagtgcggtggcgtgatatcagttcactgcaacctctgcctcctgggttcaagtgattcttttgcctcagcctcctgaatagctgggactacaggcatctgccaccatacctggctaatttctgtatttttagtagagacggggtttcaccatattggccaggcttgtctcgaactcctgacctcatgatccacccacctcggcctcccaaagtgctaggattacaggcgtgagccaccgtacctggcctatctgttactttaaaatttttttcataatagccattctgactggtggtatctcattgtggttatgatttgcatctctctgatgattagtgatgttgaacattttttatatgtttgttggctgctgtatgtcttcttttgagaagtgtctatatcctttgcccattttttaatgggatttttgtttttctcttattgatttaagttccttatagactctggatattagtctgttgttggatccatagtttgcaaatattttctcccattctgtaggttgtctgtttactctgttcatagtttcttttgctgtgcagaagcgctttagtttaattaagtcctgtttgtttattttttattttgtggcatttgctttggggatcttcatcatacattttttgcctaggccactgtttagaagagtatttcttggttgtcttctaggattttttatagtttcaggtcttacatttaagtctttaattcatcttgagttaatgtttatacatggtaagaagcaggagtccaatatttctttcttctgcgtgtggttagccagttttcctagcactatttcttgaagaaggtattttttcctcattgtttatttttgtcaactttgttgaagatcagttggtttaggtgtgtgactttctttcaggggtctctattctgtttcattggtctatgtgtatatttttataccagtactatgctgtttaggttactgtagccttgtagtattgtttgaagtcaggtaatgtgatacctttggctttattctttttgcttaagattaccttggctatttggtctaattttttggttccatatgaattttaagtagtttttctaattctaggaaaaatgttactggtaattagataggaaagcattgaatctgtatattaatttgagcagtacggacatttgaatcatattgatttttccaactcatgagcatggaatgcttttctatttgttaatgttgtctctgatttctttcatcagtgctttgtagtcttccttacagagttgcttcacctccttggctagatgtattccaaggtactttttttcctgtggctattataaatgggattgtgttcttgatttggttctcagcttgaatgttattggaggagttcttcctccttgaatttttgtaatagtttcagtagggtcagtaccagctcttctttgtatgtctagtagaattcagctgtgaatccatctggtccagggctttgtttgattggtatgtttttagaaaaattactgatccagttccatgacttgttattggtctgttcagaatttttgtttcttcctgattcaatcttggaaggttgtgtgtttccaggaatgtatcagtttcctctagatttgctagtttgtgtgcatagagatgttaatagtactctctgagggtcttctgtatttctatgagcttggtagtaataactcctttgtcattctaactgtaattatttggatacgccctctttttttctttgttaatctggctagtgatctgtctagtttattgtttcaaataaccaatttttcatttcattgatcgtttgcatgttttttttgggtctccatttagttctgctctgattttagttatttcttttcttctgctaactctgggtttagtttgtctttgttttttttagttcctttaggtgtgaggttaggttgttaatttgagatctttctatctttttgacataagcattcagtgctataaacttttctcttaacactgcttttgccacatcacagaggttttggtacattgtgtctctattttcatttgtttcaaagcattttttcatatctgccataattttgttgttatccacatgtcattcaggaggcagttttttagtttccatgtatttgttggaaaccattacttgttgctcaagtgaagtccagaaatttattacagaagttttcaaagaagttccacttgaagaacaagggagtctgttttttggctgacaaacattgtagttttatgaattacatacattatcatcactcacggtgtgcagaattacttaatttcacattgccttggtggcaaacaatctgtgatgataatatcaaagaaccagaaaaaataatgaatgaatatgataggcaaaaataaagactttagtctctctctcaatatctagaacgcatcaaccttcatcagtaatagaaacaacataattagatcaaaagcatactacacacttatgtccaccctacctctccattgaaagtacccagctcctttagccagaacatataccagatctttgactgataagtttaacagcatgttaacagttccagagggttgagaaaggataaataatccacaaatacttcaaattatccttgttaacagtgactggtttctgttgtaactggactgaacatgatgaaaaaacataaaatcgattttttcacatactgctgataagaccttaactttgtacaaggtgacatcatcatcacactgtctctgaaggaaaaggtggctgattttatgggaatttaggcatggggttggttatcattctcatatacagatttgctagaagaaaatgagaaggaaatagtgactatggcagctccatgtcctgaatccatccataggattagcattattagcatggtgagtttatctgagaaatgtagggtcattccattcaccaaattctccaaaacattatttggaatgtttgtcaataagagcagctgcttctaaaagtgattgtacttttgaggcacatgtgtccaagctagaaatcatatctcctaaaaatttaaaggtagcaaaactgcctaagtggagaaaacctcttggctactgtgaaactctgatcatcagtggtaaatgatccacagtaccaataatatgtgaaaaacattattgaaattcaccaagatcaaatgcaggtaaaggaatgtgagtgtggacacttcaggttgttggtcccaggatccttcctgttgagttaagtaaaatcatagcttgtctctcccaggatagcaaaatagataattctaccaaatgttaatgacaggaccatgttatttctactccaggactcacaaaggggaacataaagtttaagttatcctaaatgcagttgttttgaggggagatgctccagccaggaaagaaattgtaagtgtgtttaattaaatggctcattacttctctcaccatttaagagttgagacatctttgttttctttttttattttattttattattattatactttaagttttagggtacctgtgcacaatgtgcaggttagttacatatgtatacatgtgccatgctgttgtgctgcacccattaactcgtcaattagcattaggtatatctcctaaagctatccctcccccctacccccaccccacaacagtccccagaatgtgatgttccccttcctgtgtccatgtgttctcattgttcaattcccacctatgagtgagaatatgcagtgtttggttttttgttcttgcaatagtttactgagaatgatgatttccaatttcatccatgtccctacaaaggacatgaactcatcattttttatggctgcatagtattccatggtgtatatgtgccacattttcttaatccagtctatcattgttggacatttggcttggttccaagtctttgctattgtgaatagtgccacaataaacatatgtgtgcatgtgtctttatagcagcatgatttatagtcctttgggtatatacccagtaatgggatggctgggtcaaatggtatttctagttctagatccctgaggaatcaccacactgtcttccacaatggttgaactagttgacagtcccaccaacagtgtaaaagtgttcctatttctccacatcctctccagcacctgttgtttcctgactttttaatgatcaccattctaactggtgtgagatggtatctcattgtggttttgatttgcatttctctgatggccagtgatggtgagcattttttcatgtgttttttggctgcataaatgtcttcttttgagaagtgtctgttcatatccttcgcccactttttgatggagttgtttgtttttttcttgtaaatttgtttaagttcattgtacattctggatattagccctttgtcagatgagtaggttgcaaaaattttctcccattttgtaggttgcctgttcactctgatggtagtttcttttgctgtgcagaagctctttagtttaatgagatcccatttgtcaattttggcttttgttgccattgcttttggtgttttagacatgaagtcctggcccatgcctatgtcctgaatggtgatgcctaggttttcttctagggtttttatggttttaggaataacgtttaagtctttaatccatcttgaattaatttttgtataaggtgtaaggaagggatccagtttcagctttctacatatggctagccagttttcccagcaccatttattaaatagagaatcctttccccattgcttgtttttctcaggtttgtcaaagatcagataggtgtagatatgtggcgttatttctgagggctgtgttctgttccattgatatatatctctgttttggtaccagtaccatgctgtttttgttactgtagccttgtagtatagtttgaagtcaggtagcgtgatgcctccagctttgttcttttggcttaggattgacttggcgatgcgggctcttttttggttccatatgaactttaaagtagttttttccaattctgtgaagaaagtcattggtagcaggatggggatgacattgaatctataaattaccttgggcactatggccattttcacgatattgattcttcctacccatgagcacggaacattcttccatttgtttgtatcctcttttatttcattgagcagtggttcgtagttctccttgaagaggtccttcacgtcccttgtaagttggattcctaggtattttattctctttgaagcaattgtgaatgggagttccctcatgatttggctctctgtttgtctgttattggtatataagaatgcttgtgatttttgtacattgattttgtatcctgagactttgctgaagttgcttattagcttaaggagattttgggctgagacaacagggttgtctagatatacaatcatgtcatctgcaaacagggacaatttgacttcctcttttcctaattgaataccctttatttccttctcctgactaattgccctggccagaacttccaacattatgttgaataggagtggtgagagagggcatccctgtcttgtgccagttttcaaagggaatgcttccagtttttgcccattcagtatgatattggctgtgggtttgtcatagatagctcttattattttgagatatgtcccatcagtacctaatttattgagagtttttagcatgaagggttgttgaattttgtcaaaggccttttctgcatctattgagataatcatgtggtttttgtctttggttctgtttatatgctggattacatttattgatttgcatatattgaaccagccttgcatcccagggatgaagcccacttgatcatggtggataagctttttgatgtgctgctggatttggtttgccagtattttattgaggatttttgcatcaatgttcatcaaggatattggtctaaagttcttttttggttgtgtctctgcccggctttggtatcaggatgatgctgacctcataaaatgagttagggaggattccctctttttctgttgattggaatagtttcagaaggaatggtaacagttcctccttgtacctctggtagaatttggctgtgaatccatctggtcctggactctttttggttggtaaggtattgattattgccacaatttcagagcctgttattggtctattcagagattcaatttcttcctggtttagtcttgcgagggtgtgtgtgtcgaggaatttacccatttcttctagattttctagtttatttgcttagaggtgtttgtagtattctctgatggtagttggtatttctgtgggatcagtggtgatatcccctttatcattttttattgcgtctgtttgattcttctctcttttcttctttattcatcttgctagtggtctatcaattttgttgatcctttcaaaaaaccagctcctggattcattaattttttgaagggttttttgtgtctctatttccttcagttctgctctgatcttagttatttcttgccttctgctagcttttgaatgtgtttgctcttgcttttctagttcttttaattgtgatgttagggtgtcaattttggatctttcctgctttctcttgtgggcatttagtgctataaatttccctctacacactgctttaaatgtgtcccagagattctggtgtgttgtgtctttgttctcgttggtttcaaagaacatctttatttctgcctttatttcgttatgtacccagtagtcattcaggagcaggttgttcagtttccatgtagttgagcggttttgagtgagtttcttaatcctgagttctagtttgattgcactgtggtctgagagacagtttgttataatttatgttcttttacgtttgctgaggagagctttacttccaagtatgtggtcaattttggaataagtgtggtgtggtgctaagaagaatgtatattctgttgatttggggtggagagttctgtagatgtctattaggtctgcttggtgcagagctgagttcaattcctgggtatccttgttaactttctgtctcatggatctgtctaatgttgacagtgggttgttaaagtctcccattattattgtgtgggagtctaagtctctttgtaggtcactcaggacttgctttatgaatctgggtgctcctgtattgggtgcatatatatcgaggatagttagctcttcttgttgaattgatccctttaccattatgtgatggccttcctttgtctcttttgatctttgttggtttaaagtctgttttatcagagactaggattgcaacccctgcctttttttgttttccatttgcttggtagatcttcctccatccttttatttggagcctatgtgtgtctctgcacgtgagatgggtttcctgactacagcacactgatgggtcttgactctttatccaatttgccagtctgtgtcttttaattggagcatttagtccatttacatttaaagttaatattgttatgtgtgaatttgatcctgtcattatgatgttagctggttattttgctcattagttgatgcagtttcttcctagcctcgatggtctttacaatttggcatgattttgcagtggctggtaccggttgttcctttccatgtttagtgcttccttcaggagctctttcagggcaggcctggtggtgacaaaatctctcagcatttgcttgtctgtaaaatattttatttctccttcacttatgaagcttagtttggctggatatgaaattctgggttgaaaattcttttctttaagaatgttgaatattggcccccactctgttctggcttgtagagtttctgctgagagatccgctgttaatctgatgggcttccctttgtgggtaacccgacctttctctctggctgcccttaacgtattccttcatttcaaccttggtgaatctaacagttgtgtgtcttggggttgctcttctcgaggagtatctttgtggcattctctgtatttcctgaatttgaatgttggcctgcctcactaggttggggaagttctcctggataatatcctgaagagtgttttccaacttggttccatctccccatcactttcaggtacaccaatcagacgtggatttggtcttttcacatattaccatatttcagatatggtacataaaagctatttgtttttagggtagtgggattatgggtaatagttaatttttaaaaattggactatctttacgattactattaaaagtagaaagtgttttgtaattgagggttctttgcttatctgtgtaatatgagatgaccaaatcagtggtgcatgagaagggtcaattttgttgtacaaatgcctgaagaagagctggatataacattttgttcagagccaattagctgtgatttttttatctgaaatgttacagcttatttttcaagcctaaattctctctgtgctatggggttacttcaggcagtctcaatgtatgaccaaaggcagagtgtttaatttgctgataattattacaggcccctataattcataagtatatttttagattggggaggggaggaggaagcaaacattttgtataactgtcataatttgcacattattacaataaatattttacagttaattaaaatgttctaaattagagaactatgttacgtatgaattttaatatattattagactattaaatttagtcttcattattttcttagcttaccagttgtgaaagtgtaataacaaatgggctgtttgctgtaattgctctttgctgtaattaatttataggttccatgttaaggaagctattctgcttagaaacatttgaaagttttaagtgctgactaggaaattttaaaatgttatattatctgaaaaagattttcttgacagacaaatcagcatctctgccaggttttgcatcattatttttggcaggataattagctgtaatgccagaattcagatatatggtagttggagttatagatgatccaaaaattcattctcaaactgtgatttatctcacaaccataggaagtagggtgtagattacaaataactaggtgtgtacgtggttttaaagctacccaaataaaaataggtagcctaataaaaagatgagagcttttgaactattataactttgattattttaagttaacaaaacattcaaagtcttagcactctgtcaagattttggcagtacataatggtatatatacagtacagtaatgctcagcatttcttgagggaaaaggtataactttggacagtttctgacatatgtatcttttacccatgagggagtagttgaagttacagcctaaaggagttaactggtagaataagatttctgaggaggtggttagtaaggccaacttaaatggttgtgcataaggatactgggccaagtgggtgaggagggactgaaattgtgtgctttgtctgctaaacctgtgcccttgtgtagagattgtgtacctagaggaggagcctttctcttaacaaagtgtaacagcatgagccctcagaggctctggtggacagagatgagttccagaggccagaagtgattgattcctgttccgtaatgatagtaggagtgtagaaaggaaaatctaaagagtctccttcaaatatttgtttaatattttattcagagtaaggagatatttactttctagtaagaaatattgcatacctctgtatgttcataataaaagatttattaacatgcacagaacatagtttaatattttaatttatatgtatttttaaaaactcattgatatactaccactgaaaattaggtaacattatttattcacactcattaaggattggggtagtggcctatacttgatctgactcctccctccctttttgaagtcatctcctgtaatttacttccttgttcatttcagccacagagaggtccttgtttctgtttttggtacttgccattttcctctgcttagaatgtgctgttctctactcttctctatctttgcatggctatttcctttttatcctttaggtcttttgtacctcagtgtggcttttccttacttttaatctctattggcaacttctttatccccagtcttctctatgtgtccccctatgttattctaaaaatagtgtttattatgtatcatcttcatttataagtttggtatctgttcctcctagaatgtaaatcccacaagagcagggaccttgtttgtcctgtttaccattatatccttggtttcccagaactgtacctggtatataattggtgctcaataatattgttgaatacattattaaagtcgaaaactcttgttcaaaatatattttcaggttacttttatggtttttgtgttggcaacatgcttctcacttttctgtatttttttctttaatcagttttcttgtgctgttttctgaaccagacagcttcctgtgaggcatattaaagatttcaaatttaaatttaaaaaataaattacttgctcctggtaaatagcaccgtgcaatgcatggtttaatttcaagttttctggagattgtgactatcagttttaagtccctgttaaccatctggatcaggattggtggtacaaccttcagtagtactgtatagtacagtctgcaaaaatatttgatgaggataggttgatgttggcaagaggtattaaaattttttttaaaaatgctttcaactttgaggacttagggaccattacacatttgcctggttatgaagcagttgcattaaatggttctttattatcagtttattccagtgatgttatagtgccacttgaagactggtgctcaggcttctatttggtcagtcaaccctttaatccagctccgagaaatggatagttatgggtatatgtcactttaagtgtgatagcgagaattcgaggagttcttagctgatgtcttttactaaaatagcaggcaaggtcatttgctgagaccaagcagagaaacagcaggatgggaggtgtcaggaaagtaaagaagaatgggagggaactgactagggaagtgaagaagggttgtttggtagagctgagaaccaaactgagataggtaactgtgcattttcagtggtaccagtctgttcatttgtgtgaacaactggaatggtaaatatcataaacagttttttttttagttctttagtaaatgttttacagttgaaataaaaaataacactgtctaatggggttttcaatgtgtatagatatatagataactataacacaaaggggagagcaaaaggacctatatgatggtaatgtttctgtagtctactttaattgttaaattgtgattctaagaagactgagtagtttttattgtaatccctaaagctaccactaaaaaagatacaaagatatatagtaatagcacaatagataaatttaaatcaaatactaaatagtattcaaattgtcaaaaaggcaggaaatgggaaacagaagaaaacagagacaaacagaaaacaataaaatggtagtcctaaatccaaacatatctgtatctatatctatatgcatataagtggtctaaatacaagaactaaaatacagcaattgtcagattcaataataataataaaaagaccccacaatatctgtctatacaagaaacccactttaaatacaatgatacagacagattaaaacaagaggatggaaaaagatataccttgcaaatactaatcaaaagatacttggatgatacctcaccaaatagatttcagtacaaggaaaattagtaggtgcattacgtactgataaaggggtctatttgccaagaagactctaccaatttaaaacaactgtgtgcctaacaacagtgctttgaaattcatggagcaaaaactggtagaaaggagaaatgggaaaatccacttgtaggtggagacttcaagactcctttcctatccactccaatcactatcctaagtgatgaagaaagaagagagaggccgggcatggtgtctcacacctgtcatcccagcactttgggaggccgaggtgggcagatcacttgaagtcaggagttcgagaccagcctggccaacatggtgaaaccccgtctctactaaaagtacaaaaattagccaggtgtggtggtacatgcctgtagtctcggctactcgggaggctgaggcaggggaattgcttgaatctgggaggcagaggttgcaatgagccaagatcataccactgcactccagcctgggtgacagagtgagagtctgcctcaaaaaaaaaaaaaaaaaaaaaaagagaagatcaacaattgaataacatcatcaatcaactagatctaattgaatttaaagaacatatcacccaagagagccaaatatatattcttttcaaatactcatggaacataccaagataaggggtcagcaaatattttgtgtaaagtgccagatagtaaatattttaagcattgtgagccgtgtggtctgtgtcacaactactcagttctgtcattgtagtgcaaactcagccttagataattcataaataaatgggtgtgactatgttccaataaaagtttatacattgacactgacatttgaatttcatgtaattttcacatcatgaaatattcttcttttgatattttcagtcatttaaaatataaatataatccctagtacatgggccatacaaaaattgtcagcggctgggtttggtgcaaaggccgtagtttgcactcccctgaccaaaataaacaatattctggttcataaaacaaaccttaacacatttaaaaacattgaaatcctgcaaagtctgttctctggcagtaatggatttaaactagaaaaatatcaaaaaaagatatctagaaagtctgaaaatatttagaaagtaaacaacatagttctaaataactcatgggtcaaagacatctcatgagaaattgacatagtttgaattaaatgaaaatacaacataacataatttgtgggatacagaatacagggaaatttatagcactaaaaatagacagaaatttattatttttatttctatttttatttttgagacagagtctcactctgtctcccaggctggagtgcagtggcatgatctcagctcactgcaacctttgcctcccaggttcaagtgattctggtacctcagcctcccaagtaggtgggactacaggcacgcaccaccacaatgcctgactaatttttgtatttttagtggagacggggtttcaccatgttgggcaggctagtctcgaaactcctgacctcaggtgatctgcccaccttgacttcccaaaatgctgagattacagtcatgagccactgtgcctggcctaaaaatagagggaaattaatagaattaaacgcttatgttagaggcgtttaaaccggagcaactccatcttgaataggagctgggtaaaatgaggctgagacctactgggttgcattcccggatggttaaggcactctaagttacaggataagataggaggttggcacaatatataggtcataaagacattgctgataaaacaggttgcagtaaagaagccagcaaacccctccaaaaccaagatggtgatgagagtaacctctggttgtcctcactgccacactcccaccagtaccatgacagtttacagatgccatggcaacatcaggaagttaccctatatggtctaaaaggagaggcatgaatagtccaccccttgtttagcgtataatcaagaaataaccataaaaatgggcaaccagcagccctcaggctgctttgtctatggaatagctattcttttattcctttactttcttaataaacttgctttcactttgctctatggactctccctgaattctttcttgcacaagatccaagaaccctctcttggggtctggatccagatgcctttcctgtaacacttagaaaagaacaacttggctgggcgtggtggctcatgcctgtaatcctagcactttgggaggccgaggtgggtggatcatgaggtcaggagttcgagaccatcctgaccaacatggtgaatccccgtttctagtaaaaatacaaaaattagcagggtgtggtggtgcgcacctgtaatcccagctactcgggaggctgaggcagaggaattgcttgaacccgggaggcggaggttgcagtgagctgagatcgcaccactgcactccagcctgggcaacagagcgagactccagagcaagactccatctccaaaaaaaaaaaaaaaacaactcaactcaataatctaagcttctgtctttggattttccatatagacagttttcttcttttcattatgctactgtatgattttctagttgatttgctattccttttatcttgttcattctttttttttttttttttttttttttctgagacagagtctcgctctgttgcccaggctggagtgcagtggcgcgatctcggctcactgtaagctccgcctcctgggttcatgccattctcctgcctcagcctcctgagtagctgggactacaggcacctaccaccacgctcagctaattttttgtatttttagcagagacagggtttcaccattcacaggatagtcttgatctcctgacctcgtgatctgcccacctcagcctcccacagtgctgggattacaggcgtgagccactgcgcccggccttatcttgttcattcttaaggtctgggtccttaccccaactttctatttgctctactgcaatatggatgaatttttctagacttctctgtgaccagtttgtcttttctgagctacagtttggtggttggataatgccttgtacctgctttctgtactcgtaaagttgggaatgtgaggggagtagggagagttattcagctgaggttttgcaagtttttgtaaaggacatgggttttgtttcctctttcaggttttattaagtgtccttgaccagggttcattcctcctgatgagtgggtatccttttcctgtgtgggatgtgctcagggttgacatgttttcctccaatgtgttatgtaactctagtgccttttcttccattagggaaaaacatcctaccccattttacttactcatttccatctcaatacttatagtttataacaattcacattccttttgtgtttggttttggtaaattcctatttaatgttgggtatagttggttgggtaaattcctatttaatgttgggtaaaatagcctgtattttaaatgatgcgtctgagagtacctcatttcctcgctagaatctagcttttttatgtagagtttgtctactctaaaaatattttcatctgggtgtggtggctcacgcctgtaatcccagcactttgggaagccaaggtgagtggatcacttgaggtcaggagtttgagaccagcctggccaacatggtgaaaccctgtctctactaaaactacaaaaataagctgggtgtggtggtgcatgcttgtagtcccagctacttgggaggctgaggcaagagtattgcttgaacctgggaggcggaggttgcagcgagcccagattgcaccactgccctccagcctgggctacagagtgagactctgtctcaaaataaataaataaataaataaataaataaatataaataaaaagatagttttggtttcttttccatgagccacttactcacttattcatttcctcagtctgcttttttccaaattggggcaccagtgagaaacctcataatttttatttttgttaccaaaataaataaatttaattaattataatgtgcagcaataaaatattttacatatttatgggatacatatgagtatttttacatgtatagactataatgatcaagccagggtatttggggtatccatcaccttgggtatttatcatttctaagtgttgggaacatttcacatctgctcttctagctactttgaaatatgcaatatattgttgctaactatagtcaccctactctgctattaaatattggagcttatttcttctatctaactgtatgtttgtacctactaaccaacctctctttatgccactctcccacccacactcaccccactctctggtatctatcattctattcactacctctgtgggaccaacatttttagctcctacatatgagtgagaacacattatctgtctttgtgtgtttggtgtttggttttgctaaattcctgtttattgttggggatagttagcactgcctgtattttaaatgatgtgcctgagagtttgtgtgtctggcttatttcccttaacataatgtcctccagttccatttatgttgttgcaaatgacaggaattcattcttcgggctgactagtattccattgtgtatatataccaccatttcctttattcatttatctgttgatagacacttaggttggttccatataatggtgccatataatatgccagtgcaggtatccttttgatatacagatttcttttccttggataaatatccattagtgggattgccagatcatagggtagttctgtttttagttttctaaaaaatgtccatactggttttcatagtggttttactaatttacattcccaccaactgtgtataagaattcccttttctcagcaccctcaccagcatctgttattttttgtctttttaataacagccattctaactggggtaagatgatctctcactgaagttctcatttgcatttccctgataattagtgatgttgaacttttatcttcataaacttcttagccatttgtttgtcttcttttaacaaatgtctattcagatcctttgcccattgtttcaggggattttttttcctgttgtttgaatttcttgtatattctggatgttagtttattaggtgaataatttgcaaatattttctcccattcaacaagttgcctcttcactctgttgattgtttcctttgctgtgcaggagctttttggtttaatatagtcccatttgtctatttttgtttttattgtctgtgcttttgaggtcttaggcataaaatctgcctaccaattgtccttaagtgtttcccctatgtcttcttccagtagttttatggcttggggtcttatatttaagtctttaattaatcttgagttgattttacacgtagagaagggtccagtttcattcctgtgtgtatagatattcagttttcccagcaccatttattcaagatcgtgttctttccccaatatatgttcttggtgccttcattgaaaattagttggctgtaaacatgtggatttatttcttggttccctcttctgtttcattggtctgtatgtctgattttataccaataccatgctgttttggttactatagccttttaatatattttgaagtcaggcaatgtgatgcctctcactttgtttgctcaggattgctttggctattcatgctcctttcttgttccatatgaattttaggatttttttttaattctataaaaaagacattggtattttgatagggattatattgaatctatagattgctttgggcagtttagtcattttaatgagattaattcttccagtccatgagcatgggatgtctttccatttgtttgtgtgtgtactcttcaatttatttcattaatgttttgttgttttcctggtatacatatttcacctccttggttagaagcattactagatttttttttttgtaactattttaaatgggattgctttcttgattgctttctcagctagttgattattggtatatggaaactactgatttttttatgcagattttgcatacaattattgaatttattaatctaatccaggaagtttttggtggaatctttaggtttttctaaatataggatcatatcagtaaaggagtacaatttgacttcctcttttccaatctggatgccttttatttctttctcttgcctggttgctctggctaggacttacattatgacattgaatagaagtggtaaaagtggacagcctcgtctttttctagatcttggagaaaaggcttttagcttttttcccgttcagtatgatgttagcaatgtgtttgttatacttggtctttattattttgaggtatgtttcttctattcctagtttgttgagagtttttaccatgaagggatgttgaattttatcaaatgccttttttctgcatctattaagatgatcatatttttttttccttcattctgttgatgtgatatgtcacatttattgacgtttgcatatcttgaaccatccttgcatcactggtataaatcccacttggtcatggtctattgcctttttgctgggttgctggattcagtttgttacaatgttgttgaggatttttatatctatgttcatcagggatattggcctgtcattttccttttttattgtgttattgtctggttttagtatcagggtgatgttggcctcttagaacgagttagggagagcttcctcttcagtgttctaggatagtttcaggaagataggtattaattcttctttctacagtaatagaatttgactgtgagtatatccagtcctgggcttttctttggagactttttattactaattcaatcttgacactcattactggtctgctcaggtttttgatttttgttgttgttgttttttttgagatggagtctcactctgtcaaccaggctggagtgcaatggtatgatctcggctcactcaacctctgcctcccaggttcaagcaattctcctgcctcagcctcctgagttgctgggattacaggcatgtaccaacatgcatgctaatttttgtatttttagtagaaatgaggtttcaccatgttggtcaggctgatctcaaacctctggcatcaagtgatctgcccctgttggtctcccaaagtgctaggattacaggcatgagccagcacacccagcctgctcaggttttctatttcttcttgattcagtcttggtagcatgtatattttcagcaatctattcatttcctctaggtttttcagtttgttagtgtagagttgtatataatagtctgtgatcttttgtatttctgtggtatcagttgtactgtttcatttttctgattttgtttatttgagtcttctctctttttttttcttggttagtctaactagcagtttagcaattttgtttatctttttgaagaaccagcttttcattttgttgctcctttgtattgttttcttagtctctattttgtttagttctgctttgatctttattctttctttctgccaatttggggattggcttgttcttggttttctagttcctttaattgtattgttaggctggttttttttgaaatgtttctacctttttgatgtaggtattgtaataaaattccctctttgctgtaacccaatggttgttcaggagcatgttgtttaattttccacatatttgcatagtttccaaagttcctcttggtgttgatttctacttttattttattgtggtctgagaaggcacttgatatcatttagattttttaaaaatgttgacttcttttgtggcctaacatatcttagagactgttccatgtgctgataagaagaatgtatattcagcagttgtttgataaaatgttctgtaaatgtctttaggaccatttggtctaaagtccagtttaaattgaatgcttctttgttgattttctgtgtacatgatctgactaatgctgagaatagagtgttgaagttccttactattattaaattggagtctatctctctctttagatctagtaatattgctttatgaatctgtgctgcagtattgggtgcacatatgtctagaattattatatcctcttgtgggattgatacctttatcatcatataatgacattctacatcttttaaaaatgtgtttgactcgaagtctgttttctctgatgtaagtatagattcttctgcttgcttctggtttctgtgtatacggaatatttttttccattcctttgctttgagtctatatttgtctttacaggggaagtgcatttcctgtaggcagcatatagttggtccctgtttctttatccattcagccagtctctatcttttaagtggagaatttaatctgtttacattcaaggttattattgacatgtgaggttttttatttgttcttgttaattgttttcttgtggttttctgtattctttgtgttttttttctttttctgttattgctggttattgtagtttgatagttttctatagtgataccttttgagtcctttctcttctttatttgtatttggtttatgagtgagttttatagtttcatgtgttttcttgatgataaatgtcatcctttcatttccaggtttaggacttccttgagcattttttatagatctggcccaggggtgatgaattcccttagtgtttgcttgtctgggaaagaccttatttcttcatttatgaaggcttattttggtggatatagtatccttgcttggcagtttctttctttcagcttgttgaatatgtcattccattctcctctggggtgtaaggttttagctgagaaatccagtgatggggtttcctttatagatatatcgatacttgcctctttctgtttttagaatcctgtctttgtctttgactttagacattttgattataacgtgctgtggagtaagcctttttgcattttatctgttgggggaatctctgaacttcctggatctgcatgtcagtctcctgccagacttgggaagtttttatcaattattttgtcaaataggttttctaggcctttcattctccctttgcccttggggacaccagtcattcaaatatttggttgctttatgttgtcccagatgtcacaaaggctttgcttattcctttaaatccttattttttctttatttttctctcattggactatttcaaaaaacccgtcttcaagttctgagattctttcttctgcttaaactagtctattgttgaagcttttgaatgtattttgtatttcaattaattctccattccagaatttgtttgatccttttaaaaaatatctatctggtagatttctcatgcatatcctgaattgtttttcgaatttctttgtattgtttttcagaattttcttgtatctcatcgagcctctctaaatgagcattttgaattctttgtctaaggtttaacgaatttctttttaattggtatctgttgctagagaattattgtgtttctttgggggtgtcatatttctttgctttttgtgattcttatgttcttttattgatatctgtacatctggtgtaactgttgcttcttccacatttttgaatttgcctttgtagtggaggactttttcctgaagatgtatctatgaccttggttgggtagggcactttggtgttgattcaggtgcatgcagtagtgtagttcctgtatggtttctttggctataaacagtgttagtggtacctgtgacttctgtgtagcttaggtgcaattattagtggaggttgtgctgaagttttgctcaggactgggatgccaggtaggccagtctttgggccccaggggtggcagtggtagactgaagtgattatcctcgagccctggagtggtgtatgctgattctagcattagtgggtccagatggctggttcctgggcctccaggtggtttgcttggatgctggcactggcagtggtaggccaggcatgtggggatgttcttgggctcctgggcagcaggtgtgatgtgggtgatggtagtggcagtggtggggcaaatcactggaacccaagtggttcaagctgctgttggtggtggctgcaatgggttgggaagaccaatcctctgatccacaggtggcatatgtgtttgggtgccagctgtggtggtattgaccagttgcatcagcctgatctcagacctcaggaggagtgctcagatgtcaacagtgatgggctgggttgggcaatttttaggcacctggacagcatgctcaagtgttagggggacacactggtccagcagacttgttatcaggtccctggtagtgtgtttaggcactagctatgataataggggtggagttgtctctaggccactggaaaaatgctcagatagggacagtggcaactgtgctgcagaagcctgccactggggaaagtggggccactctcagtgggagcagcaaacgcagacagttctggagtgtatgattttcttgcacttcagtcctgcaacagcttgcagcagcagcagtcatcggatttgtctttggggcacatgaaagtgctcagcctcccctctccctccttggcctgggagtagcagcagtagcatcggctccagggcaggacacagtcctttcgggactagggtctcagaatggtgccttgtggtagctactcaaggcttaggggcctgtgggtcacagtgtcagctccctctctgtagcaatgcctctgcacaatctttaggcagctccctatgtgagtctcaaggcccatgagtgtcaaggggctctcctctagctaggattgtaagagtttgtggcaggagtgtggacccttggggtctctgacttaccttttctctgtgtcacagagcttctcctggcttccagtgcatcttggccaaggaggctgcctcatttctgtcctttccttgctttcggtgcttcctagaacttctcggttgaattccagtgttttctcctagaggatctattctaactgtaagtatctatatgatatttggttcctttccatggatgaggtgcatactagtaggatctagtcagtcatcttgaatcaactcgcctcatgatttttctgaagctgcttcttttcttagaacctcttctttgggatagagattatagccatcccacacatttccttagttattattttttgaagattcatagcatatcgtttagcctttactgtttgtttttttttgccatttaaagtactcttaaattgcttttgttaggctttgacaaagagaaactgtgatgtggttttactctgccttccaaccagctctcggaagacctataatttttgtacttagaaaaattaataaagatatttctactttagaaggtagaatataaagttttcaaaaaataaaatgagacatatttgaaaaattgttcacaatataataagtgcaatgaaaatagcttgtcaaatttacaaagaaaaatgaaaccgatatattgaggattcagtttaaaaaatgccacatacaaacatgtttcctcagaatttataaaacttcgtggaaaacaatgtggtaatgtattttacaattcttaaaaatacttattttctttcacacaacattccagtttgtcctaaggaaataaccagaaatatgtatatataaacaacaaaaagacattagtattaatataaaccttaaactgaaaagtgattaaaatgttaatcaacagataaatgtttaagtgtaattacaaaatgctcattacaaaaaacaggatggtaaactatacatattatgtgaccctagttttataagaaaaatatatttataatgacaatgaaaggaagcacacattttttattttattttttaataacttacgtaattttttcaaatgttccatcatgaatatatattcttaaatttagaggaaaaataataagattaagagatatctgttctctgatggttctagagctgggaagggttgcagtggaagaaaggttggttaatgggtataaaatagatggaaggaaaaagtgctagggttgtatagcacagtagcatgactatagttaacaataatcccactgggccttgtgtttaagagcagggtctctgaagccatccttgttgaagacagttttgcccaaggggatatcacagagtatttgtgggcatgaaatgattgtatttataaatttgcgcaacagacttgatctttgaccttttggtgatcttcttgcctatggcacctgtcactttgtagggacagtggtcaattccagacaccagagatacggttgtaggggtgatctgaagtgccgtcatcgatgttctacatgatgatgtgttggctttgagtccagagtagcatcaggccaggaccagcaccactctcccaggtttcacaaacttgcccatttcgacaacaaccaagtaggcctacatcagaaaggaagaaggggcacttctgctaactgtatatttcaaaaaagttagaagatttgagatgttcccaaaacaaattataaatgtttgaggtaatagatatcctaattaccctgatttgatcattgcacattgtatgcatgtataaaactatcatatgtactccatacatttgtataattatcaataaacaaatttaagatatctattgcatatgaaagaaataaaaagaaatgaatgcaaacttaagtattcataagaggataaaaatatgagtttaaagtgataagatagcaaaaatggtaagacaataatgtatgctaagattaatcaatataagccaattaaaaccagaaggtaaaagattgaataataaagtgatacaatgtttaaataatataataaaataatctaatattaatgaattttaaaaacaaaatcacactaaactgaaagaagtaaataaggtagatacccagattaaatcttcacgttaacattctgtaagaatgagaataaaaagagttttctgagctgaggaagtttcatagctttagtgactgtctgaagattgctgagaggtagaagacaatatctatttaatggtgccattttcccctggtttctcacacttgaaaaagcagcagctcttagatattttaaaaggaatataaggagttttggggttgtttctttgttgtcatgtttttggaagttcttagttacggtctcatcgtgaccatctcagaatgatagcctcagacccacagtctacatgacttctggctctcccacacgtaattaagtgttcatgttctaattccaaatccccaagaaagagtatctaattgcttcagtcatttatgttctggggacagggttgggagtgaaggaacagggtcaaatagtacaaaggatctgttccttccagggttataagcaggacagattctcaaagaagaaattattggcatctctgatacatgttgtgaataattttaatttttatatgtaatgtgaataatcacagataaagcaaaggatttttttttaagtctcagtgtcttccactgtacttgtgaattatgtgaacacagtaatggtagcttcatagagtggtcacaaaatgagaacatattgatgtctagatagaattatcttaagtaaatctctggattgaagatttcagcatgttctcacttatttgtgggatctaaaaatcatgtcaattgaactcacgaacacagagagtagtaggatggttaccagatgctgggaagcgtagtaggaggttagggaggaagtagggatggttaataggtacaaaaaaaaaaatagaaagaatgaataagacctactatttgatagcacaattgggtgactatagtcaataataacttaaatttattttttaaataacctaaataatgtaatttgattatttgtaactcaaagaataaatgcttgaggggatacataccccatttgtatgatgtgcttatttcacattgcatgcctgtatcaaaacatctcatgtaccctgtaaatatatacatctactctgtaccctcaaaaattttaaaaagttttaaaaaattataaaatgttatcaaatgatgattttaattctaccccataaaattaaataagcattgtatttcaccttttaaaataagtccattcatggtatgtagatattaaaactaaatattttaggaaaattgcttttgttctatgtacatgtttagcattacttcctgtgtaattttaaaatctgaaattcttctagcatacagagtaagtagattatgatatattgaaggattaagcttcactgtcttgtgtcagattaatctctcaaacatagattgtcacttgacctgatagaaatatgactgtaattcaccaaaaaaattcaatggataagtaaccatttcattattttatgtagaatgaagaatgtatgcttcttgactgattgtataattctccaaattaaatttaaataaacctcataatcacgcatttttctcagagtttcataaggattcatggaaaaggtatctctgatagcttatgtggtgaaatagaacaatatacatattctgtgattcttcccactttattaggcttaaagtgtgttaaagttactgaatgaggataattttgtatttttatataaaagtttctgcattattttaaacttaaattttctcatgaaacaagtacagataaacttttgcatttaaacaaaatagttaatactatgagaacattactccatttgcttatatgtttttgaatgaaataggtaaaattatatgcatataaatgaatgttaaaagggagtgtgaaaaataaagatagcagtgaggattatagtttgaaattaatgtgtatttaatagttaaaggaaatttaaataaagtaaagcaatgtgtttttgtcctaacgggaggttgcatgaaagaatttaaatgtatcatatttaggtaaatagttcagctatagagcagaaatattaacataaaaaattaattaaaaagttgaaaataaataggtgggcacagtggctcacgcctgtaatcccagcactttgggaggctgaggcaggaggatagtttgagttcagaagtttaagaccagcctgggtaacatagtgagaccctgtctctataaaaaaattaaaaattagtcaggtgtggtggcatgcacctatagtcccagcttctcaggaggctaagccgggagaactgtgtgagcctgggaggtgaggctgcagtgagctgtggtcgtgccactgcactccagcctgagtgacaaagcaagactctgtctcaaaaaaaaagttaaaagtattaataaacttttacataacacatgaacaatattatgtaatttatgttagaatccattgtaagaggataaaggaatactgcttttttcgaaaagttgagaataaaagtagaatactgaactagattgttaaaatctgatttttaaaatgaattgtattttaaacgtcatgacttgttttttacaagacctaatttttttttttttagacggagtctcactctgtcacccaggctggagtgcagtggcatgatctcggctcactgcaacctccacctcctgggttcaagcgattctcctgtctcagcctcctgagtagtaaacttcatgacttattttttataagacctaattttttttttagacaagagtcttgctctgtcacccagggtggagtgcagtggcatgatctcggctcactgcaacctccgcctcctaggttcaagtgatcctcctgcctcagcctcccgagtagctgggactacaggcacatgccgtcacacccagctaatttttgtatttttagtagagatggggtttcaccatattggccaggctggtctcgaactcctgaccttgtgatccaccagcctcggcctcccaaagtgctgggattacaggcatgagccaccgcgcctggcaagacctaatttttttagagcagttttaagttcacaacaaagttgagaggaaggtacagagatttcccatatatgtactgtccccacagatgcaatagcttccccccatcaacatcccccaccagaatggtgtatttgttacagatgatgactctccattgatatatcatcacccaaagtccatagcttatattagggtttactcttgatgttgtacattctctgggtcttgacaaatgtatgatgagctgtatctactctatcgtatcatataaaatagttttactgccctaagaatcctctgtgctccacctgttcatccctccttttcctgtaacccctggaacccactgatctttttattgtcttcatagttttccagagtccccttttccagaatgtcatattgatggaatcatacattatgtagccatttcagattgacttctttcacttggtattatgcatttaaggtttcttcatgtcttttcatggcttgatagctaatttattttagtgttgaataatactccattatttggatgtactacagtttatccattcacctactgaagggcgtcttgattgcttccaagttttgttacttatgaataaaactttgataaacatccatgtgcagcttttgtgtggacataatttttccactcttttggataaataccaaggagctcaattgctgaatgatatatatggtaagagtatgtctagttttgttgagaaaccacaaaactttcttccaaactgcctgtaccattttgtgttcccatgtacaataaatgatatttcttgttccacctccctgctagcatttggtgctatcaatgttctggattttggccattctaataagtgtgcagtggttatcttctttttttaatttgcatttccctcatgacatatgatgtggagcatcttttcatatgcttttttttgcatctctatgtcttctttggtgagaagtctgttaaggtctttggtccttttctttttttttttttcttttttttgagatggagtctcgctctgtcgcccaggctggagtatagtggtgcggtctcagctcactgccagctccgcctcccgggttcacgccattctcctgcctcagcctcctgagtagctgggactacaggtgcccgccaccacgcccagctaattttttgtatttttagtagagacggcgtttcaccgtgttagccaggatggtggtccattttttaattgggttgttttcttatttttgagttttgggaattctttgtatattttggataatagtcctttatgagataggtcttttgcaaatattttctcctagtctgtgaccatgttttcattctcttggcagtgtcttttgtagagcagaaatgtttaattttaatgaaatccagctaattgactcttttcttttataaatcatgtcttcagtgtcacatctaaaaagtcatcaccaaatctaaggtcatctagattttctcctgttatcttctaggagttttatagttttgtattctacattaaggcttgtgatacattttgagttaatttttgtgaaggtcttcctctaaatttatcttttttttttttttaataagagaaatctcgttcttgtcccccaagtttgagtgcaatggcttgatctcagctcactgcaacctccgcctcctgggttcaaatgattctcctgcctctgcctcccaagtagctgggattaaggcgcctgccaccacgcccagctaatttttgtatcttttttagtagagatggggtttcaccatgttggccaggctggtctcgaactcctgacctcaggtgatccgcccacctcggtctcccaaagtgctgggattacaggcgtgagccactgcacccggcccagattcatcttttgcatgtgggtgtccattgttccaacatcatttattggaaaggctatatatatatatatatatatatttttttttttttttttttttttttttacaatgtattgcctttgctcctttgtcaaagattaggtgactgtatttagtggctccgtttctgtgctctctattctattccattgacctatttgtccttcaccagtaccacactgtcttgattattgtagtgttacagtaagtctttaagttgagtagtgtcagtcctctaactttatgccccttcaatattgtattggctattctgagtcttttgcctctgcatataaacattagaattggtttgttcatgtttacaaaataacttgttgggattttgattgggatggcattgaatttatagatcaagttggaaaaactgatgtcttgataatattaagtcttcctatctatgaatatggaatatcttccaatttatttatagttttcctcatatagatcttctaaatattttgttagatttatacctaagtatttcagttttttggtgcttatgtaaatggtatcgtgttttttatttcaaattgcacttgttcattgctggtatataggaaagcaattgacctttgtatattagctttgtatcctgcaatcttgctataattgcttattccagatttcttgtgaattcttttggattttcttccatgattttttttaaaaaagcaaattggtagttatgtaactagggttatagttgtagattattaaaatatagaaatattcttagcaaaatcttgctacttctgaaagtcagcttttttggagttattttaggagatagcagatctcagtgaatttcagtcttcaaagtcatattaaggaaaaactatgttacatatatatttctcaaaattgtgataaatacacataacatataatttaccatcttacccattttaagtgtacagcttagtgggctatgtatattcacactgctgtgcagccaacctccagaactttttttatcttgcaaaactggaactctctatcaattaaataacaactcacaattttcctctcccctcatcccctggcaactaccattctatttttgtttttatgaatttgactattttggatacctcatataggtggaatcataaaatatttgtctttttgtgactaacttatttcacttagcataatatattcaaggttcatgtatgttgtagcatgtgtcacaatttacgtccttttttaggctcaatgttctattgtgtgtgtgtgtgtgtgtgtgtgtgtgtgtacagacatacataagcaccacattttgtttatgtatctgtcggtggacatttgggttctttttgccttttggccattgtgaataacaatactgttattaacatgggtgtacaaatatctatttgagtcactgcttaaaattcttttgggtatatactggaagtggaattgttggatcatatgatctttgtattttcaattttttgaggaatgaacgtactgttttctgtaatggctgtgcaattttaactttctaccaacagtgtataaatgttctacatccctggtaacacttgttattttctttctttcttttataatgtaatagccatcctaaggtatgtaaagtagtatgtgattgtggttttgattttcatttccactggcgactacattagcaatgttgagcattatttcatgtgctcattggccatttgtatatcttccttggagaaatgtctgttcaagttctttgcccatttaaaaatattttgctattttttgtgtgagttgtaggagttctttatatagtctagatattaagcccttatcagatatgacttgcaaatgttttcttccatttcatagactgctttttcaatctgctggtagtgtcctttgatgcacagaagtttttgatttggagtccagtttatctgtttttacttttgttgctgggctttatatccaagaaatcatcaccaaatcaaatgtaaagaagctttccttgtgttttcttctaatagttttatattttcaggtcttatgtttgggtctttgatcacttttgagttatttttgtatatggcataaggtaagggtccaacttcattcttttgcatgtggatatccagttttcccagcagcagcatatgttgaaaagactgccctttccctccccatttaatggtcttggcaccctcatcaaaaataatttgaccatatactctaaggtttatttcttggctctgtatttcttcaattggtctatatgtctgtttgtatatatatatatatatatatttaaataatataattaattaattagtattttctttctttctgtttctttttttctttttttcatagagagtctcatgctgtcacccagcctagagtgcagtggtgcgatcttggctcactgcaacctccacctcctgggttcaagcaattctcctgcctcagcctccatgagtagttgggactacaggtgcgcaccacatgcccaactaatttttgtatttttagtagaaatggggtttcgccatgttggccaggctgttcttgaacacctgacctcaggtgatctgctcacctcggcctcccaatgtgctggaattacaggcgtgagccaccatgcctggccaattagtatgttttaaaataaagtcttagttgtaaatttgatagtctttactaatgtagagatggtgaaacttcacctacattctcttagggtcctgactgggcccaataactaaactgatataagttagattaacgggagaaaagcatgcacatttattcaatataagttttatgtggcatgggagccttcataaagaaatgaagaactgaagaagctgttagagtcaattacttaaatactgaattggacaaagaacagtaagttgggaaaatgtgataaggcaaaggggattaggctaggatagctaattgtgtaggtaagtagccaggaagataagcgttggtgtaactaggtttgtttgtacacaattcctttggcctcagctttttgtcctccatggtaagaatgttgcatcttttatataggaatttcatttcttgccttaggaaccagcatgaatgtcatagcgatctttttttcacctgctgcttttcaagtgctctattaacttaaatagttaatatgccagaatggtataatttttttcattagtgagtcctgagattttcttttcttttcacagtaaccatagaaaaatcttgctcctaccccatctgcatcagtcccatttcccctgcatcctataggtaacgacgtcataaggaaatacacatatataaatcctattgtttctccttttttaaacttaatctatcttacagttactttttactgtcctaattacagcacatttttactttttaggttctatgatttgaagagtggtatggctatgtattacagcttgtaagttgttaccatattttggagcaaaatgtattattatttctactatttacatttaacatgaatcatgatcctaaaagcatcaaaatgtcttcataacatcctacaaggaagacagaacagcactgctgttctacactgtggctcttgcccagtctatagttacaagaaatagttctttagttgttgtgatgccctgggtaggcttcattcttaagtaatgtactttgtctatattaactccctgcaaatatgtatatgtgaacagaatatcttgaagatacatggtgaggtttggttgcctttgttctctgaagtcttttttttttttttttttttggagatggagtctcactttgtcgcccaggctggaggccagtggcatgatctcggcttactgcaacctctgccttctggcttcaagcgattctcctgccccagcctcccaagtagctgggagtacaggcacgtgccaccaggcccagctaattttttttttttgcatttttagtagagacggggtttcaccatgttagccaggatggtctcaatctcctgacctcgtgatccatccaccttggcctcccaaagtgctaggattacaggcataagccaccacgcccggtctgttctctgaagtctttacggttgttgtttctattattgttcccagcaagaactggaactgacctgatgtcatgatctatgaatataatttttaattaaggaagaagtaccaggaaatctcatgtcactatagacctgcttcgctgaataccatttagcagtctatactccagccaccaggcatattggttgtgcaatgatgcctccacgataactaacagtgaggagtagaagttgggcttagacactctggctcttgcataggtcgaggggtatgttgtgttcttgtaacaaatcccacatatacatacatatgcatattgttccacaaacatccccaagcagaaaccagagttaggggcagaataacctcaagaaaattttggttgctaggccatagatgcgtctttctgaggctggtattttgacactatgtgctccattgtttctcatctgctgtattgtgctgcatcaattgtttcaccacattatcactaaaaacttggtctccctaaaaacattaacttcttagggcctgtgtgccaatggggccttttggacttgacttcagctttttggaggacagagtccctttccccttatagtgctgggttattagtgaatcaaccctgaagaggtaaagggttggagcctcagcctcccaagaggctgtcactggagaatggtctcactgacctcagcccttgggcatttccatagcacattttccccctaacccctctactcctgccaaatgcctacctaactcttataataggaaagctgggaactccactcaaaaccatacaaaaaaccagtttgtacatttggacacctcccgagcactcacagtcactgtgtttctcttttccagcagcagacagtcactctcatgcagtttaagtgatttattgatgtctcagctaaacttgctttggtttcaggacatttcagccatcaaggtttttaaggaagagcattctgtaccagaggagccatgctgctttccttgtgtttgctaatgtgtccttagccagcctcattcttcttcagcttttctactttggcaacatagatcctcatggtgtccatcttagacatccctttgttcacattccatgcctcctacttggccttggctttcacatctgaggctgaaggggcagggatgttgcagtcgctctgggtgggctgtttgcagaagctgtacaccagcagttttctcctgatcgcacacagtacccttcagctgcttgagggcagtgtgggccagctcaaactccacttggcacattgtgggaggggaggccaggcccctctgtcctttctaggtgacacctggtgctagaaggctcatcaggtttcttcatcgatagagtagggatgatgatgatgatgtatcttcctcactgagtttcattgagaatccctatgtaggtacagggctatgtgtgttgtagcactgatcaaactctcagtagagagtggtataattataactccttaacaaacatttcaagatactaagaagaaagtataataccaagttttggttacacagccttttaatgaagcaaaaacttttagacattagcattccaagcaaagtttattctagcaataagacacaatgtgacagctaatataaattactgtggaaattacctcagatctgagaaatctggaaaatagttgaaaaagctcatgggtctattcctaaaggacaacctgtgaacctgtcagtgctaggacagatactacctagctgttcctgcctataccactcttcttactttagagctatggtagccccttcataatcctttcaggttctagcagaggaggaatatcaatttaattaatattctcagatttacaacatctgggaaataacagcatttataaatcatggacattatcaaagatcattcataatatattcttactatctaaacttggttttctgtacatttaacttttctagaggtatgtgaagtggggaaaatgggtactttaagaactatgatttgtttaattttcacctacataactggcaaacattttcattattattatcattatgtagaaaaacatagatgtatcaatatccatattttatctttagtatctcacaggaaaggtattttgggttaatgactatttacccggaaaatctggagaaaattctgcaatcttgacaaaaccctatttttttaaatacaattttttctctaaaaattagttaacttttgattatctgtgtgataaagaaggttgggaataggagaatgaaaatttgctggtaactcagtttggcttacatgttatgcattattaaaattttttcagagcaataacaaaatgaaaaatctaatttgagtttcacctttttttgtcataccctctggtagaggtacagataaatgggaagtagaaagaaaaatttgaagtataaaagccttcagtctgattaactttgaactctaagatttaattatataatgtaattattgtctaatattaaacaatgttgattattattatagatgtctataattttttttttttttttttttgcaacggagtcttactttgtcacccaggctggagcgtaatggtgcgacctcagctcactgcagcctccgccctccgggttcacgccattctcctgcttcagcctcccaagtagttgggactacaggtgcacgccaccacgcccggctaattttttttttttttgtatttttagtagagacggggtttcaccatgttgtctaggatggtctccatctcctgacctcgtgattcgcccgccttggcctcccaaagtgctgggattacaggcgtgagccaccgtgcctggcctatagatgtctataattgtgaaatatcagttatctgctaaagaatgggtgtcaataactgtgaagggtatgagattttaccctacttactagctaacaagttaccacactatagtttcatggatgctgttagaagacatgagactcctgagtcagagacaaatgatagtaaccagggtatcggcatttttttcttttcttcatggattctctgagccctattcctatagagcaatgttaagagggctagatgacacctgcacactcaatgggcagtgtaaaggagaggcattctgagtttaaagaactcaaatctcatataaaagttgataagcatgcctgcccctttctccagagggaaacagtatctgtgttctaaggggcagtcagggcaaattactcatagcagtaattcgagagaaccatggagaattgtcttctaacaatggatctgggctgaaaaatttgcataataaatactgtatttgtaatgtaaattaataatgtaaacaagagcagaagaggactttctttctttcttttctttctttttttttttttttttttttggagacagggtcactctctgttgcccaggttagagtgcagtggcgcgatcacagctcactgtagccttgaactcctgggctcaagcaattcttctgcctcagcttcacaagcatgtaccaccatgcctggctaatttttaaaattttttctagagacagcgtttcactatgttgcacaggctagtcttgaactcctgggctcaagtgatccttcagccttggcctcctaaagcactgggactacaggcatgagcactatgcctgccccctactgccccttttttaaagtacctgggagaacaaagtttaaatattctatttttgtagcacctaattaacatacaatttaagacactttcaaaattttacattattgaaaataagtaggttgaagacttttacttacgatcactttgctgttatgctgcatgtttttgaaataataaaactttattttgaaaacaaacactcaactcaaaactcttaactaatttatatgattcatactgtctcttgttaaaaatccacacgggggattttaagtctgtatcaggccatgaaaagtttagatatgaagaaggcagttttctttttttcttaatgtttacaccagaccaaagtgaatcattttgagagaaccaccatctctgatttcctgcaaataaacaaataaaaataatgtttaagcagagtaaaaagtaattgacttaacatttgtatctttattatttttaagtactgaaaaatagtgaaacaaaataaaatagtttaaaatgtactgcacatagatacataagataactgtatacttacctgacttggtcatcaaaattttgatacgatatttataaaaactagtcaagaaataataagcattaaaaggcaaagaaaggacaggatgttaattgaaatttagaagcatctgagggttcctccaatgaaaaattgcaaactgtgggtcatcatttggattctacagtgtgattttaaaatactgtgtgttctaaaaggtattatatagcatatatttcctaattttggtgttttactgagtatttgataatggctattgagataatagtttataaaatagaaaagattgtggttttataagactttcataacattttatgaagctgcaaagaaatattaacaacttcatctatttcccatttgttattctttcttttgcaccttctgcccatccctgtcagttacagaaaaacagaagatcttatgggcttctgaagttggatgatgtgtgaagataagactaaagatgagtgatattatgtgaaaaataatacagtggggacagtttttaaaatttgaagataacctacttagagttgaaatggtaaaagtaaaaggtaaagagagtagggataacagcacttacactatcatgtcataattggagacattttacttaaagtataggtgaaagtaattttaaaaaataaatttaaagttattctgtaagttatatcttaaaagttatttttactaagaaaagcctttcagaaagtctgcatttatactattttaagtagtcacatatcaaaggaaacagatatgcggctaaaaaataagggcaacacatgtatgtaggtatgtgcctgtagaccttgatgtacacaaaattgaaaaaaaaaaaaaaacctggaaaaacaggtagcaagaagaatgcgtaatttaatagtgcctgaggcttgagtgtgtgctggcaagttccaggcttttaggtagctttcaatttaaaaagaaaactaagcactgtcattttttaaaacataagcttcaactcttggcttataaactaccataccaaagtctagtttctataccacgagaatggtcattgagaaaatgagttaggttttggccttgttcatcaactggcagagatcctaggtaaattattttattttcttaatatctagatatacttgttgctagaaggctgatggcatacctaagaactatcgtgtcgttcagccatgttgctgttgttatgtagtgtcttctatccatgatttaatcctctcttaccttaggaattacattttaaaaagtaagaatcatagaattaacttctcaagatcttccaggatttaaaaaaacaaaacaaaaaatattcctttgggggattttctttaaaatccattgcattttaaaaagacttcagggcatttccaaggtttccattgctatataaccttgacttatactctacgtaccttagacggatattttgaagatttataaaataatttattttacattcaagtttttaaacattatttgaagtaaaacataatcattaaataaaatttggaaaacaggaaactatgaaaatttacccatagtcctactagttatacaaaactaaagttaacatgaatttgcttctagtctctttttctccacgttttatttatttattttaaacacagcttgaattatattgtgtatatatatatataattctgtatcttttcttttctttttttttttggccttataacacttcaaaactttttaatgttcctacatagtctgtttttaatggctgaattttattattccattaaatactatagctttatttaaccactccttttttggttaaatttatattgtttccaatttcttctttttcataaataaccctatgatagataggcatgaagtttttttttttttttctgtttgtaggattatttccttggtatagaactgtagaaatagaattattggaccaaaagctatgaaattttaagcttctggataaacactgtagaattggtagttttgctttgtttgtttcctagtttgggaggaggtgattttgttcaataataggaagttgtggttccaaggaagactgatcttcatttttttttttaatgtgttgaaattgtgctcagccttgactgaatgaaactacgtgttaattcttgtagtaattttacagcaacgaaagggttttccccagtccctcattgctttctacatgtggttaagtgcattttctgagccacacccttttgctgttacctaatattgggtgatatcaggtcactttcctttaaatgtacacagacttttgtaagtaaattcagcagacaagttaagctttgctttgctataaactggattttgacctgtggctcacttaatgcagatttttaaattttaatacagtaagtgatcatctcagtttattatgttaggtttcctctgtgttactaacagtctgtcttgaagtttctgatttggtttaataataattaaatcccagaagtataatattttagacatggaagaaatcttaaaactccctaatctgaaattgttttattttatagatgaacaagttgaggctcatatgggttaagtgttttgtccaaagtcagttagtggcagagttgggattataattttgttcgtatttctctgtaaagggtttttttttttccactatagttttttaatgtactaacaatacttgttccacaggctgctttatgattaacttctctgattccctattcctctcatttaaggcttttgcttataagcatgctagctagtggtccaccctatgtggcaggagacgcttttctgagtaagttgaccagctattcaagtttcactactgaacattgtgaaattgaactctgcttcttgcatatttggtatcatatataggtttctttttcatcaacatggcagagtttggtacttgacattttttgtagaaaatgcagtctcaaactgactgtagtctagcacttgccaaaggttggcttgaggcttctggtacatacgagagacaagttttatagataagctaactaactttctaacttctgtgttaagtaagccatcagaaaggagtgtacttagaacttgtcatttcacctttccacaggaatgcctttagtgaattatgatttaagtattttaccttataaagaggagttataataagaaacatctatgtgactagaatgtctatccttttcaaaactctaagacatgtttagtttgtttttcagttaaaaatttagagattgggtcttgctaggttctccatgctggcctaaaactcctgggctcaagcacttcccctacctcagcctccaaaggagctgggactgtagggatacactaccacacccagcttgcttttcagttttttttgttttgttttttaataagacggtgtcttgctctgttgcccaggctggagtgcagtggcgtgatctcggctcactgcaacctccgcttcccgggttcaagcagttctccctgcctcagccttctgagtagctgagactacaggcgcacgtcaccacatctggctaatttttttgtatttttagtagagatggggttttcccgtgttggccgggctggtcttgaactcttgacctcaggcaatctccccaccttggcctcccaaagtgctgggattacaggcgtgagccacctcgccaggctgcttttcagtttttttttacacaagcttttttttttttttttgagataaggtctcactctgtcacccaggctggagtgtagtggtacaatcaaggctcaatgcagccttgacctccgaggctcaggtgattttcccaccctagcctcccaagtagctgggactacaggcatgcaccaccacaccaggctatttttgtattttttgtagagacagggtttcaccattttggccaggctggtcttgaactcctggcctcaagtgatccgcctgccttgacctcccaaagtgctgggattacaggtgtaagccaatgcacctgggctgcacaaacattcttgagtgtgaatatagaatgctgaaaaagtgtttccatctagataaatttactatttgcatgtgttaaaaaattaataaaaacaataatcatgaaccatgttttagaacagaatggttttccattacctaatttgacagattaatcatgtaatattactaaattaaacataaccattctcattttacagatgaagaaacaggtatagaggtgtgtagcagtgaggaggtagtggaacaaaattagactgagacagtttgcttataatactgcattctttctgttataccatgatgcttctcaaagtaaacctatttcacttttttgcctttgccttcccaaattcagagctaaacacagttttaacttgtataaaacagcccgatattcaacatcacataactgtgcaacttgttttgtgtttttttttttttttttttttttgagatagggttgtgctctgttgcccaggctggagaacagtggcacaattatagctcacagcaaaagtacagctcaaactttcgggctcaggtgatcttgcctcagcctcccaagtagctgggactacaggtgtgcaccactgtgcctggataatttttttaaacttttatttttgtagagacaaggtcttgctatgttgcctaagctagtctcaaactactgggctctagcgaactttttgccttagcctcccaaatcactaggattacaggcgtaagtcaccatgcctggcctgcaacttttaattgacttttgctgtgtatataatttattttagatatgatatataaaatactttagtgaaatgccccaaatctttcagaaagtaaatagatcataaatgctgagataaagtatgttgacatatttaactttttttttttttttttttgagatggagtctcgctctgtcactagactggagtgcagtagcacaatcttggctcactgcagtctccgcctccaaggttcaagcaattctcctgcctcagcctcccgagtagctgagactacaggcatgagccgccatacccagctaattttttttgtatttttagtagagacggggtttcaccatgttggccaggatggtcttgatctcctgacctcgtgatctgcccgcctcggcctcccaaagtgctgggattacaagcgtg

SEQ ID NO: 10365 - DNA, 6070 bp, Homo sapiens
ttctttttttttttttttcttatttatttacttatttatttttattattatactttcagttttagggtacatgtgcacattgtgcaggttagttacatatgtatacatgtgccatgctggtgcgctgcacccactaactcgtcatctagcattaggtatatctcccaatgctatccctcccccctccccccaccccaccacagtccccagagtgtgatattccccttcctgtgtccatgtgatctcattgttcaattcccacctatgagtgagaatatgcggtgtttggttttttgttcttgcgatagtttactgagaatgatgatttccagtttcatccatgtccctacaaaggacatgagctcatcattttttacggctgcatagtattccatggtgtatatgtgccacattttcttaatccagtctatcattgttggacatttgggttggttccaagtctttgctattgtgaataatgccgcaataaacatacgtgtgcatgtgtctttatagcagcatgatttatagtcctttgggtatatacccagtaatgggatggctgggtcaaatggtatttccagttctagatccctgaggaatcgccacactgacttccacaatggttgaactagtttacagtcccaccaacagtgtaaaagtgttcctatttctccacatcctctccagcacctgttgtttcctgactttttaatgattgccattctaactggtgtgagatggtatctcattgtggttttgatttgcatttctctgatggccagtgatggtgagcattttttcatgtgttttttggctgcataaatgtcttcttttgagaagtgtctgttcatgtccttcgcccactttttgatggggttgtttgtttttttcttgtaaatttgtttgagttcattgtagattctggatattagccctttgtcagatgagtaggttgcgaaaattttctcccattttgtaggttgcctgttcaccctgatggtagtttcttttgctgtgcagaagctctttagtttaattagatcccatttgtcaattttggcttttgttgccattgcttttggtgttttggacatgaagtccttgcccatgcctatgtcctgaatggtaatgcctaggttttcttctagggtttttatggttttaggtctaacgtttaagtctttaatccatcttgaattgatttttgtataaggtataaggaagggatccagtttcagctttgtacatatggctagccagttttcccagcaccatttattaaatagggaatcctttccccattgcttgtttttctcaggtttgtcaaagatcagatagttgtagatatgcggcgttatttctgagggctctgttctgttccattgatctatatctctgttttgataccagtaccatgctgttttggttactgtagccttgtagtatagcttgaagtcaggtagtgtgatgcctccagctttgttcttttggcttaggattgccttggcgatgtgggctcttttttggttccatatgaactttaaagtagttttttccaattctgtgaagaaagtcattggtagctttatggggatggcattgaatctgtaaattaccttgggcagtatggccattttcacgatattgattcttcctacccatgagcatggaatgttcttccagttgtttgtatcctcttttatttccttgagcagtggtttgtagttctccttgaagaggtccttcacatcccttgtaagttggattcctaggtattttattctctttgaagcaattgtgaatgggagttcactcatgatttggctctctgtttgtctgttattggtgtataagaatgcttgtgatttttatacattgattttgtatcctgagactttgctgaagttgcttatcagcttaaggagattttgggctgaaacaatgggtttttctagatatacaatcatgtcgtctgcaaacagggacaatttgacttcctcttttcctaattgaataccctttatttccttctcctgcctgattgccctggccagaacttccaacactatgttgaataggagtgatgagagagggcatccctgtcttgtgtcagttttcaaagggaatgcttccagtttttgcccattcagtatgatattgactgtgggtttgtcatagatagctcttattattttgaaatacgttccatcaatacctaatttattgagagtttttagcatgaagggttgttgaattttgtcaaaggctttttctgcatctattgagataatcatgtggtttttgtctttggctctgtttatatgctggattacatttattgatttgtgtatattgaaccagccttgcatcccagggatgaagcccacttggtcatggtggataagctttttgatgtgctgctggattcgttttgccagtattttattgaggatttttgcatcaatgttcatcaaggatattggtctaaaattctcttttttggttgtgtctctgcccggctttggtatcagaatgatgctggcctcataaaatgagttagggaggattccctctttttctgttgattggaatagtttcagacggaatggtaccagttcctccttgtacctctgatagaattcggctgtgaatccatgtggtcctggactctttttggttggtaaactattgactattgccacaatttcagctcctgttattggtctattcagagattcaacttcttcctggtttagtcttgggagagtgtatgtgtcgaggaatttatccatttcttctagattttctagtttatttgcatagaggtgtttgtagtattctctgatggtagtttgtatttctgtgggatcggtggtgatatccccgttatcattttttattgtgtctatttgattcttctcttttttttttctttattagtcttgctagcggtctatcaattttgttgatcctttcaaaaaaccagctcctggattcattaattttttgaagggttttttgtatctctatttccttcagttctgctctgatcttagttatttcttgccttctgctagcttttgaatgtgtttgctcttgcttttctagttcttttaattgtgatattagggtgtcaattttggatctttcctgctttctcttgtgggcatttagtgctataaatttccctctacacactgctttgaatgtgtcccagagattctggtatgttgtgtcttcgttctcattggtttcaaagcacatctttatttctgccttcatttcattatgtattcagtagtcattcaggagcaggttgttcagtttccatgtagttgagcggttttgagtgagattcttaatcctgagttctagtttgattgcactgtggtctgagagatagtttgttataatctctgttcttttacatttgctgaggagagctttacttccaagtatgtggtcaattttggaataggtgtggtgtggtgctgaaaaaaatgtatattctgttgatttggggtggagagttctgtagatgtctattaggtccgcttggtgcagagctgagttcaattcctgggtatccttgttgactttctgtctcgttgatctgtctaatgttgacagtggggtgttaaagtctcccattattaatgtgtgggagtctaagtctctttgtaggtctctaaggacttgctttatgaatctgggtgctcctgtattgggtgcatatatatttaggatagttagcttttcttgttgaattgatccctttaccattatgtaatggccttctttgtctcttttgatctttgttggtttaaagtctgttttatcagacactaggattgcaacccctgcctttttttgttttccattggcttggtagatcttcctccatccttttattttgagcctatgtgtgtctctgcacgtgagatgggtttcctgaatacaacacactgatgggtcttgactctttatccaatttgccagtctgtgtcttttaattggcacatttagtccattgacgtttaaagctaatattgttatgtgtgaatttgatcctgtcattatgatgttagctggtgattttgctcgttagttgatgcagtttcttcgtagtctcgatggtctttacattttggcatgattttgcagtggctggtaccggttgttcctttccatgtttagcgcttccttcaggagctcttttagggcaggcctggtggtgacaaaatctctcagcatttgcttgtctgtaaagtattttatttctccttcacttatgaagcttagtttggctggatatgaaattctgggttgaaaattcttttctttaagaatgttgaatattggcccccactctcttctggcttgtagggtttctgccgagagatcagctgttagtctgatgggcttccctttgagggtaacctgacctttctctctggctgcccttaacattttttccttcatttcaactttggtgaatctgacaattacgtgtcttggagttgctcttctcgaggagtatctttgtggcgttctctgtatttcctgaatctgaacgttggcctgccttgctagattggggaagttctcctggataatatcctgaagagtgttttccaacttggttccattctccccgtcactttcaggtacaccaatcagacgtagatttggtcttttcacatagtcccatatttcttggaggctttgctcatttctttttattcttttttctctaaacttcccttcttgcttcatttcattcatttcatcttccattgctgataccctttcttccagttgatcgcatcggctcctgaggcttctgcattcttcacgtagttctcgagccttggttttcagttccatcagctcctttaagtacttctctgtattggttattctagttatacattcttctaaatttttttcaaagttttcaacttctttgcctttggtttgaatgtcctcccgtagctcagagtaatttgatcgtctgaaaccttcttctctcagctcgtgaaagtcattctccatccagctttgttccattgctggtgaggaactgcgttcctttggaggaggagaggtgctctgcgttttagagtttccagtttttctgttctgttttttccccatctttgtggttttatctacttttggtctttgatgatggtgatgtacagatgggtttttggtgtggatgtcctttctgtttgttagttttccttcgaacagacaggaccctcagctgcaggtctgttggaataccctgccgtgtgaggtgtcagtgtgcccctgctggggggtgcctcccagttaggctgctcaggggtcgggggtctcagggttcagggacccccttgaggaggcagtctgcccattctcagatctccagctgtgtgctgggagaaccactgctctcttcaaagctgtcagacagggacatttaagtctgcagaggttactgctgtctttttgtttgtctgtgccctgcccccagaggtggagcctacagaggcaggcaggcctccttgagctgtggtgggctccacccagttcgagcttcctggctgctttgtttacctaagcaagcctgggcaatgatgggcgcccctcccccaacctcgctgccgccttgcagtttgatctcagactgctgtgctatcaatcagcgagactccgtgggcataggacccttgagccaggtgcaggatataatctcgtggtgcgccgttttttaagccggtctgaaaagcgtaatattcgggttggagtgacccgattttccaggtgcgtccgtcacccctttctttgactcggaaagggaactccctgaccccttgcgcttcccaagtgaggcaatgctcgccctgcttcggctcgtgcacggtgcgcgcacccactgacctgcgcccactgtctggcactccctagtgagatgaacccggtacctcagacagaaatgcagaaatcacccgtcttctgcgtcgctcacgctgggagctgtagacctgagctgttcctattcggccatcttggctcctcc

SEQ ID NO: 10366 - DNA, 6050 bp, Homo sapiens
tttttttttttattaaaatatatatttttttatattattatactttaagttttagggtacatgtgcacattgtgcaggttagttacatatgtatacatgtgccatgctggtgcactgcccccactaactcgtcatctagcattaggtatatctcccagtgctatccctacctgctccccccacctcacaacagtccccagagtgtgatgttccccttcctgtgtccatgtgatctcattgttcaattcccacctatgagtgagaatatgcggtgtttggttttttgttcttgtgatagtttactgagaatgatgatttccagtttcatccatgtgcctacaaaggacatgaactcatcattttttatggctgcatagtattccatggtgtatatgtgccacattttcttaatccagtctatcattgttggacatttgggttggttccaagtctttgctattgtgaatagtgccgctataaacatacgtgtgcatgtctctttatagcagcatgatttatagtcatttgggtatatacccagtaatgggatggctgggtcaaatggtatttctagttctagatccctgaggaatcgccacactgacttccacaagggatgaactagtttacagtcccaccaacagtgtaaaagtgttcctatttctccacatcctctctggcacctgttgtttcctgactttttaatgatcgccattctaactggtgtgagatggtatctcattgtggttttgatttgcatttctctgatggccagtgatggtgagcattttttcatgtgttttttggctgcataaatgtcttcttttgagaagtgtctgttcatgtcctttgcccactttttgatggggttgtttgtttttttctcgtaaatttgttgaagttctttgtagattctggatattagccctttgtcagatgagtaggttgcgaaaattttctcccattttgtaggttgcctgttcactctgatggtagtttcttttgctgtgcagaagctctttagtttaattagatcccatttgtcaattttggcttttgttgccattgcttttggtgttttagacatgaagtccttgcccatgcctatgtcctgaatggtaatgcctaggttttcttctggggtttttatggttttaggtctaacgtttaagtctttaatccatcttgaattgatttttgtataaggtgtaaggaaggaatccagtttcagctttctacatatggccagccagttttcccagcaccatttattaaatagggaatcctttccccattgcttgtttttctcaggtttgtcaaagatcagatagttgtagatatgcggcattatttctgagggctctgttctgttccattgatctatatctctgttttggtaccagtaccatgctgttttggttactgtagccttgtagtatagtttgaagtcaggtagtgtgatgcctccagctttgttcttttggcttaggattgacttggcattgcaggctcttttttggttccatatgaactttaaagtagttttttccaattctgtgaagaaagtcattggtagcttgatggggatggcattgaatctgtaaattaccttgggcagtatggccattttcatgatattgattcttcctacccatgagcatggaatgttcttccatttgtttgtatcctcttttatttccttgagcagtggattgtagttctccttgaagaggtccttcacatcccttgtaagttggattcctaggtatttgattctctttgaagcaattgtgaatgggagttcactcataatttgtctctctgtttgtctgttgttggtgtataagaatgcttgtgatttttgtacattgattttgtatcctgagactttgctgaagttgcttatcagcttaaggagattttgggctgagacaatggggttttctagatatacaatcatgtcgtctgcaaacagggacaatttgacttcctcttttcctaattgaataccctttatttccttctcctgcctaattgccctggccagaacttccaacactatgttgaataggagtcgtgagagagggcatccctgtcttgtgccagttttcaaagggaatgcttccagtttttgcccattcagtgtgatattggccgtgggtttgtcgtagatagctcttattattttgaaatacgtcccatcaatacctaatttattgagagtttttagcatgaagagttgttgaattttgtcaaaggccttttctgcatctattgagataatcatatggtttttgtctttggctctgtttatatgctggattacatttactgatttgcgtgtattgaaccagccttgcatcccagggatgaagcccacttgatcatgatggataagctttttgatgtgctgctggatttgttttgccagtattttattgaggatttttgcatcaatgttcatcaaggatattggtctaaaattctcttttttggttgtgtctctgcccagctttggtatcagaatgatgctggcctcataaaatgagttagggaggattccctctttttctattgattggaatagtttcagaaggaatggtaccagttcctccttgtacctctggtagaattcggctgtgaatccatctggtcctggactctttttggttggtaagctattgattattgccacaatttcagatcctgttattggtctattcagagattcaacttcttcctggtttagtcttgggagtgtgtatgtgtcgaggaatttatccatttcttctagattttctagtttatttgcgtagaggtgtttgtagtattctctgatggtagtttgtatttctgtgggatcggtggtgatacccctttatcattttttattgcgtctatttgattcttctctctttttttctttattagtcttgctagcggtctatctattttgttgatcctttcaaaaaaccagctcctggattcattaattttttgaagggttttttgtgtctctatttccttcagttctgctctgattttagttatttcttgccttctgctagcttttgaatgtgtttgctcttgcttttctagttcttttacttgtgatgttagggtgtcaattttggatctttcctgctttctcttgtgggcatttagtgctataaatttccctctacacactgcttgaatgcgtcccagagattctggtatgttgtgtctttgttctcgttggtttcaaagaacatctttatttctgccttcatttcgttatgtacccagtagtcattcaggagcaggttgttcagtttccatgtagttgagcggttttgattgagattcttaatcctgagttctagtttgattgcactgaggtctgagagatagtttgttataatttctgttcttttacatttgctgaggagagctttacttccaagtatgtggtcaattttggaataggtgtggtgtggtgctgaaaaaaatgtatattctgttgatttggggtggagagttctgtagatgtctattaggtctgcttggtgcagagctgagttcaattcctgggtatccttgttgactttctgtctcgttgatctgtctaatgttgacagtggggtgttaaagtctcccattattaatgtgtgggagtctaagtctctttgtaggtcactgaggacttgctttatgaatctgggtgctcctgtattgggtgcatatatatttaggatagttagctcttcttgttgaattgatccctttaccattatataatggccttctttgtctcttttgatctttgttggtttaaagtctgttttgtcagagactaggattgcaacccctgcctttttttgttttccatttgcttggtagatcttcctccatccttttattttgagcctatgtgtgtctctgcacatgagatgggtttcctgaatacagcacactgatgggtcttgactctttatccaatttgccagtctgtgtcttttaattggagcatttagtccatttacattgaaagttaatattgttatgtgtgaatttgatcctgtcattatgatgttagctggttattttgctcgttagttgatgcagtttcttcctagtctcgatggtctttacattttggcatgattttgcagcggctggtaccggttgttcgtttccatgtttagcgcttccttcaggagctcttttagggcaggcctggtggtgacaaaatctctcggcatttgcttgtctgtaaaggattttatttctccttcacttatgaagcttagtttggctggatatgaaattctgggttgaaaattcttttctttaagaatgttgaatattaccccccactctcttctggcttgtagggtttctgccgagagatctgctgttagtctgatgggcttccctttgagggtaacctgacctttctctctggctgcccttaacattttttccatcatttcaactttggtgaatctgacaattatgtgtcttggagttgctcttctcgaggagtatctttgtggcgttctctgtatttcctgaatttgaacgttggcctgccttgctagattggggaagttctcctggataatatcctgcagagtgttttccaacttggttccattctccccatcactttcaggtacaccaatgagacgtagatttggtcttttcacatagtcccatatctcttggaggctttgctcgtttctttttattcttttttctctaaccttcccttcttgcttcatttcattcatttcatcttccattactgataccctttcttccagttgatcgcattggctcctgaggcttctgcattcttcacgtagttctcgagccttggttttcagctccatcagctcctttaagcacttctctgtattggttattctagttatacattcttccaaatttttttcaaagttttcatcttctttgcctttggtttgaatgtcctcccgtagctcagagtaatttgatcgtctgaagtcttcttctttcagctcgtcaaagtcattctccttccagctttgttccgttgctggtgaggaactgcgttcctttggaggaggagaggcactctgctttttagagtttccagtttttctgttctgttttttccccatctttgtggttttatctacttttggtctttgatgatggtgatgtacagatgggtttttggtgtggatgtcctttctgtttgttagttttccttctaacagacaggaccctcagctgcaggtctgttggagtaccctgcagtgtgaggtgtcagtgtgcccctgctggggggtgcctcccagttaggctgctcgggggtcaggggtcagggacccacttgaggaggcagtctgcccgttctcagatctccagctgcgtgctgggagaactactgctctcttcaaagctgtcagacagggacatttaagtctgcagaggttactgctgtctttttgtctatgccctgcccccagaggtggagcctaaagaggcaggcaggcctccttgagctgtggcaggctccacccagttggaacttcccggctgctttgtttacctaatcaagccggggcaatggcgggcgcccctcccccagcctcgctgccgccttgcagtttgatctcagactgctgtgctagcaatcagcgagactccgtggggtaggaccctccgagccaggtgccggatataatctcatggtgcgcagttttttaagcccgtcggaaaagcgcagtattcgggtgggagcgacccgattttccaggtgccgtccgtcacccctttctttgactcggaaagggaactccctgaccccttgcacttcccgagtgaggcaatacctcgccctgctttggctcgcgcatggtgcgcgcacccactgacctgcgcccactgtctggcactccctagtgagatgaacccggtacctcagatggaaatgcagaaatcacccgtcttctgcgtcgctcacgctgggagctgcagaccggagctgttcctattcggccatcttggctcctccccga

SEQ ID NO: 10367 - DNA, 7175 bp, Homo sapiens
ctccacctcaaaaaaaaaaaaaaaaaaaaaaaaaaaaaaaaaaacaaaagaaatgatcatgtttgtaggtcaaaaaccattgaatatcagcaattacacataattcatccaagtattgactaattccttttgagaactgagttcacttcaactatcaaattactaattacggttcatttgtttttaaggtaacttaacaatgtatttattcttcttgcctttctttttaaaactaccatgcatctatacctctttatgaatcagcaaatgccagtttgtgagacatactaaaaagaaaactcccagactcatcaatgcaatccttgaattaccatgcaggaagatgatcctgcagctcttctgaatatattggtgtttttaaatatccataccctggtagctttgccaagaggtacctttgcctgttataccatgttagaaaattcatcctctagcacaaaaagaataaaaatacatataaacctaggcaaatgcttttaaaggctaaaacacggattgcagactcttaggggtaaatcccaccatttttctctctgacgctgtaatgatgttgttaggtgatttgtaaagacctaatattattctactttagcttatacaacagaaactccaaaaactattttgtatggattctttttatcttcactacggttctaggatgagagaaaaataatatcacttcatagaaggaaaaagtttagaaccaaatcagtttttgatgatgcaatcagtacaattcatttttaaatgttaagcctatacttgattcccttggtttcattgtgatctcattcttttgacttgactttgccgaataaacataatgtttagaggttgacaatggaaacgacattctgatttactctagtctattggatatttgtaacttgttaactcagttgtacaatacagtaggagtgaaaccaaactcatgggttgaccttcacatgggctagttattttcacataatcttttccacccatttaccattcataccaatccatcatttcagaaaaatgcctcacatcattagaaattggctgataccttcaagtatgagttttcactgttataaaaacaattgtgtatgtgtgtctgagtttgtgtatgtttagagtacaattggagagtaattacatagaaatgagacttacaaatattaggtaataaaatcactagatattcttcaatacatgtttttataagtatcaataaactggtattcatgaatataatgacctaaaacccaggaagtcacctttattttatttatttatttatttttattattatactttaagttttagggtacatgtgcacaatgtgcaggttaattacatacgtatacatgtgccatgctgctgcgctgcacccactaacttgtcatctagcattaggtatatctcccaatgctatccctcccctccaaccccacaacagtccccagagtgtgatgttccccttcctgtgtccatatgttctcattgttcagttcccacctatgagtgagaatatacggtgtttggttttttgttcttgtgatagtttactgagaatgatgatttccagtttcatccatgtccctacaaaggacatgaactcatcattttttatggctgcatagtattccatggtgtatatgtgccacattttcttaatccagtctatcattgttggacatttgggttggttccaagtctttgctattgtgaatagtgccgcaataaacatacgtgtgcatgtgtctttatagcagcatgatttatagtcctttgggtatatacccagtaatgggatggctgggtcaaatggtatttctagttctagatccctgaggaatcgccacactgacttccacaatggttgaactagtttacagtcccaccaacagtgtaaaagtgttcctatttctccacatcctctccagcacctgttgtttcctgactttttaatgattgccattctaactggtgtgagatggtatctcgttgtggttttgatttgcgtttctctgatggccagtgatgatgagtattttttcatgtgttttttggctgcataaatgtcttcttttgagaagtgtctgttcatgtccttcgcccacttcttgatggggttgtttgtttttttcttgtaaatttgtttgagttcattgtagattctggatattagccctttgtcagatgagtaggttgcgaaaattttctcccattttgtgggttgcctgttcactctgatggtagtttctttcgctgtgcagaagctctttagtttaattagatcccattcgtcaattttggcttttgttgccattgcttttggtgtttcagacatgaagtccttgcccatgcctatgtactgaatggtattgcctaggttttcttctagggtttttatggttttagctctaatgtgtaagtctttaatccatcttgaattaatttttgtataaggtgtaaggaagggatccagtttcagctttctccatatggctagccagttttcccagcaccatttattaaatagggaatccgttccccattgcttgtttttgtcaggtttgtcaaagatcagatagttgtagatatgcagcattgtttctgagggctctgttctgttccattggtctctatctctgttttggtgccagtaccatgctgttttggttactgtagccttgtagtatagtttgaagtcaggtagtgtgatgcctccagctttgttcttttggtttaggattgacttggctatgcgggctcttttttggttccatatgaactttaaagtagttttttccaattctgtgaagaaagtcattagtagcttgatggggatggcattgaatctataaattaccttgggcagtgtggccattttcaagatattgattcttcctacccatgagcatggaatgttcttccatttgtttgtatcctcttttatttccttgagcagtggtttgtagttctccttgaagaggtccttcacatcccttgtaagttggattcctaggtattttattctctttaaagcagttgtgaatgggagttcactcatgatttggctctctgtttgtctgttattggtgtataagaatgcttgtgatttttgtacattgattttgtatcctgagactttgctgaagttgcttatcagcttaaggagattttgggctgagacaatggggttttctagatatacaatcatgttgtctgcaaacagggacaatttgacttcctcttttcctaattgaataccctttatttccttctcctacctaattgccctggccagaacttccaacactgtgttgaataggagtggtgagagaggacatccctgtcttgtgccagttttcaaagggaatgcttccagtttttgcccattcagtatgatattggctgtgggtttgtcatagatagctcttattattttgagatacatcccatcaatacctaatttattgagagtttttagcatgaagggttgttgaattttgtcaaaggccttttctgcatctattgagataatcatgtggtttttgtctttggttctgtttatatgctggattacatttattgatttgcatatattgaaccagccttgcatcccagggatgaagcccacttgatcatggtggataagctttttgatgtgctgctggattcggtttgccagtattttattgaggatttttgcatcaatgttcatcaaggatattggtctaaaattctctttttttgttgtgtctctgccaggctttggtatcaggatgatgctggcctcataacatgagttagggaggattccctctttttctattgattggaatagtttcagaaggaatggtaccagttcctccttgtacctccagtagaatttggctgtgaatccatctggtcctggactctttttggttggtaagctattgattattgccacaatttcagctcctgttattggtctattcagagattcaacttcttcctggtttagtcttgggagagtgtatgtgtcgaggaatttatccatttcttctaaattttctagtttatttgcgtagaggtgtttgtagtaatctctgatggtagtttgtatttctgtgggatccgtggtgatatcccctttatcattttttattgcgtctatttgattcttctctcttttttctttattagtcttgctagcggtctatcaaatttgttgatcctttcaaaaaaccagctcctggattcattaatgttttgaagggttttttgtgtttctatttccttcagttctgctctatttttagttatttcttgccttctgctagcttttgaatgtatttgctcttacttttctagttcttttaattgtgatgttagggtgtcaattttggatctttcctgctttctcttgtgggcatttagtgctataaatttccctctacacactgctttgaatgtgtcccagagattctggtatgttgtgtctttgttctcattggtttcagagaacatctttatttctgccttcatttcgttatgtacccagtagtcattcaggagcaggttgttcagtttctctgtagttgagtggttttgagtgagtttcttaatcctgagttctagtttgattgcactgtggtctgagagagagtttgttataatttctgttcctttacatttgctgaggagagctttacttccaattatgttgtcaattttggaataggtgtggtgtggtgctgaaaaaaatgtatattctgttgatttggggtggagagttctgtagatgtctatgaggtctgcttggtgcagagctgagttcaattcctgggtatccttgtcaactttctgtctcatcgatctgtctactgttgacagtggggtgttaaagtctcccattattggtgtgtgggagtctaagtttctttgtaggtcactcaggacttgctttatgaatctgggtgctcctgtattgggtgcgtatatatttagggcaattagctcttcttgttgaattgatccctttaccattatgtaatggccttttttgtctcttttgatctttgttggtttaaagtctgttttatcagagactaggattgcaacccctgcctttttttgttttccatttgcttggtagatcttcctccatccctttatttttgagcctatgtgtgtctctgcgtgtgagatgggtttcctgaatacagcacactgatgggtcttgactctttatccaatttgccagtctttgtcttttaattggagcatttagtccatttatatttaaagttaatatttttatgtgtgaatttgatcctgtcattatgatgttagctggttattttgctcgttagttgatgcagtttcttcctagtcttgatggtctttacattttggcatgattttgcagcggctgataccggttgttcctttccatgtttagtgcttccttcaggagctcttttaggtcagggctggtggtgacaaaatctgtcagcatttgcttgtctgtaaagtattttatttctccttcactcatgaagcttagtttggctggatatgaaatttctgggttgaaagttcttttctttaagaatgttgaatattggcccccactctcttctggcttgtagagtttctgccgagagatcatctgttagtctgatgggcttccctttgtgggtaacccgacctttctctctggctgcccttaacattttttccttcattccaactttggtgaatctgacaattatgtttcttggagttgctcttcttgaggagtatctttgtggtgttctctgtatttcctgaatctgaatgttggcctgcgttgctagattggggaagttctcctggataatatcctgcagagtgttttccatcttggttccattctccccgtcaccttcaggtacaccaatcagacatagatttggtcttttcacatagtcccatatttcttggaggcttagttttttttattcttttttctctaaacttcccgtctcacttcatttcattcatttcatcttccatcgctgataccctttcttccagttgatcgcatcagctcctgaggcttctgcattcttcccgtagttctcgagccttggctttcagctccgtcagctcctttaagcaattctctgtattggttattctagttatacattcgtctaaatttttttcaaagtttttaacttctttgcctttggtttgaatttcctcctgtagctcgtagtttgagcatctgaagccttctactctcaactcgtcaaagtcattctccatccagcttcgttccattgctggtgaggaactgcgttcctttggaggaggagaggtgctctgctttttagagtttccagtttttctgctctgttttttccccatctttgtggttttatctacttttggtctttgatgatggggatgtacagatgggtttttggtgtggatgtcctttccgtttgttagttttccttctaacagacaggactctcagctgcaggtctgttggagcttgctagaggtccactccagaccctgtttgcctgggtatcagcagcggtgtttgcagaacagcggtttttcgtgaaccgtaaattctgctgtctgatcgttcctctggaagttttgtctcagaggagtacccggccgtgtgaagtgtcagtctgcccctactggggggtgcctcctagttaggctgctcaggggtcagaggtcagggacccacttgaggaggcagtctgcctgttctcagatatccagctgcatgctgggagaaccactgctctcttcaaagctgccagacagggacatttcagtctgcagaggttactgctgtctttttgtttgtctgtgccctgcccccagaggtggagcctacagaggcaggcaggcctccttgagctgtgttgggctccacccagttcaagcttccccgctgctttatttacctaagcaagcctgggcaatggcgggcacccctcccccagcctctctgccgccttgctgtttgatctcagactgctgtgctagcaatcagcgagactccatgggcgtaggaccctctgagccaggtgcgggatataatctcctggtgcgccgttttttaagcccgttggaaaagcgcagtacttgggcaggagtgaccc

SEQ ID NO: 10368 - DNA, 11661 bp, Homo sapiens
ttttttcttttttttatttatttttattttattattattatactttaagttttagggtacatgtgcacaatgtgcaggttagttacatatgtatacatgtgccatgctggtgtgctgcacccattaactcatcatttagcattaggtatatctcctaatgctaaccctcccccttcccctgaccccacaacagtccccagagtgtgatgttccccttcctgtgtccatgtgttctcattgttcaattcccacctatgagtgagaacaagcggtgtttggttttttgtccttgcgatagtttactgagaatgatgatttccaatttcatccatgtccctacaaaggacatgaactcatcattttttatggctgcatagtattccatggtgtatatgtgccacattttcttaatccagtctatccttgttggatatttcggttggttccaagtctttgctattgtgaatagtgctgcaataaacatacgtgtgcatgtgtctttatagcagcatgatttatagtcctttgggtatatacccagtaacgggatggccgggtcaaatggtatttctagttctagatccctgaggaatcgccacactgacttccacaatggttgaactagtttacagtcccaacaacagtgtaaaagtgttcctatttctccacatcctctccagcacctgttgtttcctgactttttaatgattgccattctaactggtgtgagatgatatctcatagtggttttgatttgcatttctctgattgccagtgatggtgagcattttttcatgtgttttttggctgcataaatgtcttcttttgagaagtgtctgttcatgtccttcgcccactttttgatggggttgtttgtttttttcttgtaaatttgtttgagttcattgtagattctggatattagccctttgtcagatgagtaggttgcaaaaattttctcccattttgtaggttgcctgttcattctgatggtagtttcttttgctgtgcagaagctctttaatttaattagatcccatttgtcaattttggcttttgttgccattgcttttggtgttttagacatgaagtcctcgcccatgcctatgtcctgaatggtaatgcctaggttttcttctagggtttttctggttttaggtctaatgtttaagtctttaacccatcttgaattaattttgtataaggtgtaaggaagggatccagtttcagctttctacatatggctagccagttttcccagcaccatttattaaatagggaatcctttccccattgcttgtttttctcaggtttgtcaaagatcagatagttgcagatatgtggcgttatttctgagggctctgttctgttccattgatctatatctctgttttggtaccagtaccatgctgttttggttactatagccttgtagtatagtttgaagtcaggtagtgtgatgcctccagctttgttcttttgacttaggattgacttggcgatgggggctcttttttggttccatatgaactttaaagtagttttttccaattctttgaagaaagtcattggtagcttgatggggatggcattgaatctataaattaccttgggcagtatggccattttcatgatgttgattcttcctacacatgatcatggaatgttcttccatatatttgtatcctcttttatttcattgagcagtggtttgtagttttccttgaagaggtccttcacatcccttgtaagttggattcctaggtattttattctctttgaagcaattgtgaatgggagttcactcatgatttggctgtctgtttgtctgttattggtgtataagaatgcttgtgatttttgtacattgattttgtatcctgagactttgctgaagttgcttatcagcttaaggagattttgggctgagacgatggggttttctagatatacaatcatgtcatctgcaaacagggataatttgacttcctcttttcccagttgaataccctttatttcctcctcctgcctgaatgccctggccagaacttccaacactatgttgaataggagtggtgagagagggcatccctgtcttgtgccagttttcaaagggaatgcttccagtttttgcccattcagtatgatattggctgtgggtttgtcatagatagctcttattattttgagatatgtcccatcaatacctaatttattgagagtttttagcatgaagggttgttgaattttgtcaaaggttttttctgaatctattgagataatcatgtggtttttgtctttggttctgtttatatgctggattacatttattgatatgcgtatattgaaccagccttccatcccagggatgaagcccacttgatcatggtggataagctttttgatgtgctgctggattcggtttgccagtattttactgaggatttttgcatcaatgttcctcaaggatattggtctaaaattttcttttttggttgtgtctctgcctggctttggtatcaggatgatgctggcttcataaaatgagttagggaggattccttctttttctattgattggaatagtttcagaaggaatggtaccagttcctccttgtacctctggtagaattcggctgtgaatccatctggtcctggactctttttcgtcggtaagctattgattattgccacaatttcagagcctgttattggtctattcagagattcaacttcttcctggtttagtcttgggagggtgtatgtgttgaggaatttatccatttcttctagattttctagtttatttgtgtagaggtgtttgtagtattctctgatggtagtttgtatttctgtgggatcggtggtgatatcccctttatcattttttattgcatctatttgattcttctctcttttcttctttattagtcttgctagtagtctatcaattttgttgatcttttcaaaaaaccagctcctggattcattattttttgaagggttttttgtgtctctatttcctttagttctgctctgagtttagttgtttcttgccttctgctagcttttgaatgtgtttgctcttgcttttctagttcttttaattgtgatgttagggtgtcaattttggatctttcctgctttctcttgtgggcatttagtgctataaatttccctctacacactgctttgaatgtgtcccagagattctggtatgttgtgtctttgttttcgttggtttcaaagaacatctttatttctgccttcatttccttatgtacccagtagtcatccaggagcaggttgttcagtttccatgtagctgagcagttttgagtgagattcttaatcctgagttctagtttgattgcactgtggtctgagagacagtttgttataatttctgttctttcacatttgctgaggagagctttacttccagctatgtggtcaattttggaataggtgtggtgtggtgctgaaaaaaatgtatattctgttgatttggggtggagagttctgtagatgtctgttaggtctgcttggtgcagagctgagttcaattcctggatatccttgttaactttctgtctcgttgatctgtctaatgttgacagtggggtgttaaagtctcccattattattgagtgggagtctaagtctctttgtaggtcactcaggacttgctttatgaatctgggtgctcctgtattgggtgcatatatatttaggatagttagctcttcttgttgaagtgatccctttaccattatgtaatggccttctttgtctcttttgatctttgttggtttaaagtctgttttgtcagagactaggattgcaacccctgcctttttttgttttccatttgcttggtagatcttcctccatccttttttttttttttttttttctttcaattcattttaattattaatagacaacaggaaaccaattgaggcttccaataagttactgtgtattaaaccatggttgaaaacttcaagataagatgggattcttagaagcagcgaaataaaaaacagattatgttagattacactttatattatctgctgtgacagttacagaaatattagtaaaaggtcaatcaaatcaagtcttgttgtggttgttaaaatgaataaacttataatagatgtagtaagaaatttttatatctagggaaacatacgaattaagtttaatatacaccgtcatcattaaacatctatgaaatatgtttttgaattacaataataagagccatgtacattcttaaaatattttggacaaaggaatagtacaatagtaaagttgcttttccctcttgggtaatcactatgtagaagcaatatgatgtgttccagtgaatcctctaaatttccagaaggaacgaagtcatttacctcttgtcttcattaggtagcagcacattatagcatcatgaacactagggaccaataatcaatggctcttgtcagtatagtaactcctttctttttctgccagtctgccagcatgaagatcccaaaatgaccatgcagctgctcagtttggatttggtggaacctttaacaaggatgctggtagaatagctttccccacccctactccaggaactgggacctttagtccagaaaagcctaaagttgtagtaatgaaatcactaattctcccacagataactgcaaattataattagaaatgctaatcctaatttcaccatttcagtcccagactcatgttttctaactgctaagtacacagtcttatataatggccattagttaaataatatactttaccttgaagccttgaaggacaatgtccccatctcagagatgtcacttccaagttggtacttagctctgccctcaggagaccacatgatgtatggtagaaacagtacattccttggttatttatcattgtcacccctccttctgaaagtgtgacccttggtcctaggagatgtttttcaagatttatgaacctttgagtggtggtgctttgcaaggtgctgtgggaaagacagagagttctatgccaagaataattcaagtcggggcaaatcactactccttttagtaggtaagtggtctgatgttttcaacttgcctccaagtggctagttggtctctttggtggatggtaccatcatccgtcaagtgctcaacattgatctctgcttttgacagatctgatattcagtagcagcagtacatagtactgattagcacgagggagcccatgctatttggcccatgtgcatttttattatgacaccatagcttttttatttttgagttccgtgctcaggcactggagtgtatgagtacagaggctgactgagcttcccttgatgagtcatctagaaccctttttctctaatcttccaatattgctagttgctcttaccaaccagcaaagtcatttaccactgtccgctatacattattccttgaggaaagtgtccaggtgtcctgttttgttttttttttttttttttttcttttttttttttttttattatactctaagttttagggtacatgtgcacattgtgcaggttagttacatatgtatacatgtgccatgctggtgcgctgcatccactaatgtgtctcccaatgctatccctcccccctcccccgaccccaccacagtccccagagtgtgatattccccttcctgtgtccatgtgatctcattgttcaattcccacctatgagtgagaatatgcggtgtttggttttttgttcttgcgatagtttactgagaatgatggtttccattttcatccatgtccctacaaaggatatgaactcatcattttttatggctgcatagtattccatggtgtatatgtgccacattttcttaatccagtctatcattgttggacatttgggttggttccaagtctttgctattgtgaatagtgccgcaataaacatacgtgtgcatgtgtctttatagcagcatgatttatactcatctgggtatatacccagtaatgggatggctgggtcaaatggtatttctagttctagatccctgaggaatcgccacactgacttccacaatggatgaactagtttacagtcccaccaacagtgtaaaagtgttcctatttctccgcatcctctccagcacctgttgtttcctgactttttaatgattgccattctaactggtgtgagatgatatctcatagtggttttgatttgcatttctctgatggccagtgatgatgagcatttcttcatgtgttttttggctgcataaatgtcttcttttgagaagtgtctgttcatgtccttcgcccactttttgatggggttgtttgtttttttcttgtaaatttgtttgagttcattgtagattctggatattagccctttgtcagatgagtaggttgcgaaaattttctcccatgttgtaggttgcctgttcactctgatggtagtttcttttgctgtgcagaagctctttagtttaattagatcccatttgtcaattttgtcttttgttgccattgcttttggtgttttggacatgaagtccttgcccacgcctatgtcctgaatggtaatgcctaggttttcttctagggtttttatggttttaggtttaacgtttaaatctttaatccatcttgaattgatttttgtataaggtgtaaggaagggatccagtttgagctttctacatatggctagccagttttcccagcaccatttattaaatagggaatcctttccccattgcttgtttttctcaggtttgtcgaagatcagatagttgtagatatgcggcattatttctgagggctctgttctgttccattgatctatatctctgttttggtaccagtaccatgctgttttggttactgtagccttgtagtatagtttgaagtcaggtagtgtgatgcctccagctttgttcttttggcttaggattgacttggcaatgcgggctcttttttggttccatatgaactttaaagtagttttttccaattctgtgaagaaagtcattggtagcttgatggggatggcattgaatctgtaaattaccttgggcagtatggccattttcacgatattgattcttcctacccatgagcatggaatgttcttccatttgtttgtgtcctcttttatttccttgagcagtggtttgtagttctccttgaagaggtccttcacatcccttgtaagttggattcctaggtattttattctctttgaagcaattgtgaatgggagttcacccatgatttggctctctgtttgtctgttgttggtgtataagaatgcttgtgatttttgtacattgattttgtatcctgagactttgctgaagttgcttatcagcttaaggagattttgggctgagacgatggggttttctagataaacaatcatgtcgtctgcaaacagggacaatttgacttcctcttttcctaattgaataccctttatttccttctcctgcctgattgccctggccagaacttccaacactatgttgaataggagtggtaagagagggcatccctgtcttgtgccagttttcaaagggaatgcttccagtttttgcccattcagtatgatattggctgtgggtttgtcatagatagctcttattattttgaaatacgtcccatcaatacctaatttattgagagtttttagcatgaagggttgttgaattttgtcaaaggctttttctgcatctattgagataatcatgtggtttttgtctttggctctgtttatatgctggattacatttattgatttgcgtatattgaaccagccttgcatcccagggatgaagcccacttgatcatggtggataagctttttgatgtgctgctggattcggtttgccagtattttactgaggatttttgcatcaatgttcatcaaggatattggtctaaaattctcttttttggttgtgtctctgcccggctttggtatcagaatgatgctggcctcataaaatgagttagggaggattccctctttttctattgattggaatagtttcagaaggaatggtaccagttcctccttgtacctctggtagaattcggctgtgaatccatctggtcctggactctttttggttggtaaactattgattattgccacaatttcagagcctgttattggtctattcagagattcaacttcttcctggtttagtcttgggagagtgtatgtgtcgaggaatgtatccatttcttctagattttctagtttatttgcgtagaggtgtttgtagtattctctgatggtagtttgtatttctgtgggatcggtggtgatatcccctttatcattttttattgtgtctatttgattcttctctctttttttctttattagtcttgctagcggtctatcaattttgttgatcctttcaaaaaaccagctcctggattcattgattttttgaagggttttttgtgtctctatttccttcagttctgctctgagtttagttgtttcttgccttctgctagcttttgaatgtgtttgctcttgcttttctagttcttttaattgtgatgttagggtgtcaattttggatctttcctgctttctcttgtgggcatttagtgctataaatttccctctacacactgctttgaatgtgtcccagagattctggtatgttgtgtctttgttttcgttggtttcaaagaacatctttatttctgccttcatttcgttatgtacccagtagtcattcaggagcaggttgttcagtttccatgtagttgagcggctttgagtgagattcttaatcctgagttctagtttgattgcactgtggtctgagagatagtttgttataatttctgttcttttacatttgctgaggagagctttacttccaactatgtggtcaattttggaataggtgtggtgtggtgctgaaaaaaatgtatattctgttgatttggggtggagagttctgtagatgtctattaggtctgcttggtgcagagctgagttcaattcctgggtatccttgttgactttctgtctcgttgatctgtctaatgttgacagtggggtgttaaagtctcccattattaatgtgtgggagtctaagtctctttgtaggtcactcaggacttgctttatgaatctgggtgctcctgtattgggtgcataaatatttaggatagttagctcctcttgttgaattgatccctttaccattatgtaatggccttctttgtctcttttgatctttgttggtttaaagtctgttttatcagagactaggattgcaacccctgcctttttttgttttccattggcttggtagatcttcctccatccttttattttgagcctatgtgtgtctctgcacgtgagatgggtttcctgaatacagcacactgatgggtcttgactctttatccaatttgccagtctgtgtcttttaattggagcatttagtccatttacatttaaagttaatattgttatgtgtgaatttgatcctgtcattatgatgttagctggttattttgctcgttagttgatgcaatttcttcctagcctcgacggtctttacaatttggcatgattttgctgtggctggtaccggttgctcccttccatgtttagtgcctccttcaggagctcttttagggcaggcctggtggtgacaaaatctctcagcatttgcttctctgtaaaggattttatttctccttcacttatgaagcttagtttggttggatatgaaattctgggttgaaaactcttttctataagaatgttgaatattggcccccactctcttctggcttgtagagtttctgctgagagatccactgttagtctgatgggcttccctttgtgggtaacctgacctttctctctggctgcccttaacattttttccttcatttcaactttggtgaatctgacaattatgtgtcttggagttgctcttctcgaggagtatctttgtggcgttctctgtatttcctgaatctgaatgttggcctgccttgctagattggggaagttctcctggataatatcctgcagagtgttttccaacttgtttccattctccccatcactttcaggtacaccaatcagacgtagatttggtcttttcacataatcccatatttcttgtaggctttgttcatttctttttattcttttttctctaaacttcccttctcgcttcatttcattcatttcagcttccatcactgataccctttcttccagttgatcgcgtcggctcctgaggcttctgcattcttcacgtagttctcgagccttggctttcagctccatcagctcctttaagcacttctctgtattggttattctcgttatacattggtctaaatttttttcaaagtttttaacttctttgcctttggtttgaatttcctcctgtagctcagagtagtttgatcatctgaagccttcttctctcaacttgtcaaagtcattctccatccagctgtgttccgttgctggtgaggagttgcattcctttggaggaggagaggcactctgctttttagagtttccagtttttctgctctgttttttccccatctttgtggtttttatctacttttggtctttgatgatggtgatgtacagatgggtttttggtgtggatgtcctttctgtttgttagttttccttctaacacacaggaccctcagctgcagctctgttggagtttgctagaggtccactccagaccctggttgcctgggtaacagcagcggtggctgcagaacagcggattttcatgaaccgcgaatgctgctgtctgatcgttcctctggaagttttgtctcagaggagtacccagccgtgtgaggtgtcagtctgcccctactggggggtccctcccagttacactgctcgggggtcaggggtcagggacccacttgaggaggcagtctgcccattctcagatctccagctgtgtgctgggagaaccactgctttcttcaaagctgtcagacagggacatttaagtctgaggaggttactgctgtctttttgtttgtctgtgccctgcccccagaggtggagcctacagaggcaggcaggcctccttgagctgtggtgggctccacccagttggagcttcccggctgctttgtttacctaagcaagcctgggcaatggcggccgccccttccccagcctcgctgccaccttgcagtttgatctcagactgctgtgccagcaatcagtgagactctgtgggcgtaggaccctccgagccatgtgcgggatataatctcctggtgtgccgttttttaagcccgttggaaaagcacagtattcgggtgggagtgacccgattttccaggtgccgtctgtcacccctttctttgactaggaaagggaactccctgaccccttgtgcttcccaagtgaggcaatgcctcaccctgcttcggcttgtgcacggtgtgctgcacccactgtcccgcgcccactgtctggcactcccttgtgagatgaacacggtacctcagatggaaatgcagaaatcacccgtcttctgcgtcgctcatgctgggagctatggaccggagctgttcctattcggccatcttgactgccc

SEQ ID NO: 10369 - DNA, 36722 bp, Homo sapiens
ttttctttatatcttctttttttttaattatactttaagttttagggtacatgtgcacattgtgcaggttagttacatatgtacacatgtgccatgctggtgcgctgcacccactaacttgtcatctagcattaggtatatctcccagtgctatccctccccccgccccccaccccacaacagtccccagagcgtgatattccccttcctgtgtccatgtgatctcattgttcaattcccacctatgagtgagaatatgcggtgtttggttttttgttcttgcgatagtttactgagaatgatgatttccaatttcatccatgtccctacaaaggacatgaactcatccttttttatggctgcatagtattccatggtgtatatgtgccacattttcttaatccagtctatcattgttggacatttgggttggttccaagtctttgctattgtgaataatgccgcaataaacatacgtgtgcatgtgtctttatagcgcatgatttatagtcctttgggtatatacccagtaatgggattgctgggtcaaatggtatttctagttctagatccctgaggaatcgccacactgacttccacaatggttgaactagtttacagtcccaccaacagtgtaaaagtgttcctatttctccacatcctctccagcacctgttgtttcctgactttttaatgattgccattctaactggtgtgagatggtatctcattgtggttttgatttgcatttctctgatggccagtgatgatgagcattttttcatgtgttttttggctgcataaatgtcttcttttgagaagtgtctgttcttgtccttcgcccactttttgatggggttgtttgtttttttcttgtaaatttgttgagttaattgtagattctggatattagccctttgtcagatgagtaggttgcgaaaattttctcccattttgtaggttgcctgttcactctgattgtagtttcttttgctgtacagaagctctttagtttaattagatcccatttgtcaattttgtcttttgttgccattgcttttggtgttttagacatgaagtccttgcccatgcctatgtcctgaatggtattgcctaggttttcttctagggtttttatggttttaggtttaacgtttaaatctttaatccatcttgaattgatttttgtataaggtgtaaggaagggatccagtttcagctttctacatatggctagccagttttcccagcaccatttattaaatagggaatcctttccccattgcttgtttttctcaggtttgtcaaagatcagatagttgtagatatgcggcgttatttctgagggctctgttctgttccattgatctatatctctgttttggtaccagtaccatgctgttttggttactgtagccttgtagtatagtttgaagtcaggtagcgtgatgcctccagctttgttcttttggtttaggattgacttggcgatgtgggctcttttttggttccatatgaactttaaagtagttttttccaatctgtgaagaaaggcattggtagcttgatggggatggcattgaatctgtaaattaccttgggcagtatggccattttcacgatattgattcttcctacccatgagcatggaatgttcttccatttgtttgtatcctcttttatttccttgagcagtggtttgtagttctccttgaagaggtccttcgcatcccttgtaagttggattcctaggtattttattctctttgaagcaattgtgaatgggagttcactcatgatttggctctctgtttgtctgttgttggtgtataagaatgcttgtgatttttgtacattgattttgtaccctgagactttgctgaagttgcttatcagcttaaggagattttgggctgagacaatggggttttctagatatacaatcatgtcatctgcaaacagggacaatttgacttcctcttttcctaattgaataccctttatttccttctcctgcctaattgcgctggccagaacttccaacactatgttgaataggagtggtgagagagggcatccctgtcttgtgccagttttcaaagggaatgcttccagtttttgcccattcagtatgatattggctgtgggtttgtcatagatagctcttattattttgaaatacgtcccatcaatacctaatttattgagagtttttaggatgaaaggttgttgaattttgtcaaaggccttttctgcatctattgagataatcatgtggtttttgtctttggctctgtttatatgctggattacatttactgatttgcgtatattgaaccagccttgcatcccagggatgaagcccacttgatcatggtggataagctttttgatgtgctgctggattcggtttgccagtattttattgaggatttttgcatcaatgttcgtcaaggttattggtctaaaattctcttttttggttgtgtctctgcccggctttggtatcagaatgatgctggcctcataaaatgagttagggaggattccctctttttctattgattggaatagtttcagaaggaatggtaccagttcctccttgtaccttgtggatccttgtgaatccatctggtcctggactctttttggttggtaaactattgattattgccacaatttcagctcctgttattggtctattcagagattcaacttcttcctggtttagtcttgggagagtgtatgtgtcgaggaatttatcgatttcttctagattttctagtttatttgcgtagaggtgtttgtagtattctctgatgatagtttgtatttctctgggatcagtggtgatatcccctttatcattttttattgtgtctatttgattcttctctctttttttctttattagtcttgctagcggtctatcaattttgttgatcctttcaaaaaaccagatcctggattcattgattttttgaagggtttttgtgtctctatttccttcagttctgctctgattttagttatttcttgccttctgctagcttttgaatgtgtttgctcttgcttttctagttcttttaattgtgatgttagggtgtcaattttggatctttcctgctttctcttgtgggcatgtagtgctataaattttcctctacacactactttgaatgcatcccagagattctggtatgttgtgtctttgttctcgtcggtttcaaagaacatctttatttctgccttcatttcgttatgtacccagtagtcattcaggagcaggttgttcaatttccatgtagttgagtggttttgagtgagattcttaatcctgagttctagtttgattgcactgtggtctgagagatagtttgttataatttctgttcttttacatttgctgaggagagctttacttcgaagtatgtggtcaattttggaataggtgtggtgtggtgctgaaaaaaaagtatattctgttgatttggggtggagagttctgtagatgtctattaggtccgcttggtgcagagctgagttcaattcctgggtatccttgttgactttctgtctcgttgatctgtctaatgttgacagtggggtgttaaagtctcccattattaatgtgtgggagtctaagtctctttgtaggtcactcaggacttgctttatgaatctgggtgctcctgtattgggtgcatatatatttaggatagttagctcttcctgttgaactgatccctttaccattatgtaatggccttctttgtctcttttgatctttgttggtttaaagtctgttttatcagagactaggattgcaacccctgcctttttttgttttcctttggcttggtagatcttcccccatccttttattttgagcctatgtgtgtctctgcacgtgagatgggtttcctgaatacagcacactgatgggtcttgactctttatccaatttgccagtctgtgtcttttaattggagcatttagtccatttacatttaaagttaatatagttatgtgtgaatttgatcctgtcattatgatgttagctggtgattttgctcgttagttgatgcagtttcttcctagtctcgatggtctttacattttggcatgattttgcagcggctggtaccggttgttcctttccatgtttagcgcttccttcaggagttcttttagggcaggcctggtggtgacaaaatctctcagcatttgcttgtctgtaaagtattttatttctccttctcttatgaagcttagtttggctggatatgaaattctgggttgaaaattcttttctttaagaatgttgaatattggcccccactctcttctggcttgtagggtttctgccgagagatccgctgttagtctgatgggcttccctttgagggtaacccaacctttctctctggctgcccttaacattttttccttcattttaactttggtgaatctgacaattatgtgtcttggagttgctcttctcgaggagtatctttgtggcgttctctgtatttcctgaatctgaatgttggcctgccttgctagattggggaagttctcctggataatatcctgcagagtgttttccaagttggttccattctccccatcactttcaggtacaccaatcagacgtagatttggtcttttcacatagtcccatatttcttggaggctttgctgatttctttttattcttttttctctaaactttccttctcgcttgatttcattcatttcatcttccattgctgataccctttcttccagttgatcacatcggctcctgaggcttctgcattcttcacgtagttcttgagccttggttttcagctccatcagctcctttaagcacttctctgtattggttattctagttatacattcttctaaatttttttcaaagttttcaacctctttgcctttggtttgaatgtcctcccgtagctcagagtaatttgatcgtttgaagccttcttctctcagctcgtcaaagtcattctccatccagctttgttccgttgctggtgaggaactgcgttcctttggaggaggagaggtgctctgcgttttagagtttccagtttttctgttctgttttttccccatctttgtggttttatctacttttggtctttgatgatggtgatgtacagatgggttttcggtgtggatgtcctttctgtttgttagttttccttctaacagacaggaccctcagctgcaggtctgttgcaataccctgccgtgtgaggtgtcagtgtgctcctgctgggggtgcctcccagttaggctgctcgggggtcaggggtcagaggcccacttgaggaggaagtctgcccgttctcagatctccagctgcatgctgggagaaccactgctctcttccaagctgtcagacagggacatttaagtctgcagaggttactgctgtctttttgtttgtctgtgccctgcccccagaggtggagcctacagaggcaggcaggcctccttgagctgtggcgggctccacccagttcgagcttcccggctgctttgtttacctaagcaagcctgggcaatggcgggcgcccctcccccagcctcgctgccgccttgcagtgtgatctcagactgctgtgctagcaatcagcgagacaccgtgggcgtaggaccctctgagccaggtgtgggatataatcttgtggtgcgccgtttttaaagccggtctgaaaagcgcaatattcgggtgggagtgacccgattttccaggtgagtccgtcacccctctctttgactcggaaagggaactccctgaccccttgcgcttcccaggtgaggcaatgcctcaccctgctttggcttgcgcacggtgcacgcacccactggcctgcgcccactgtctggcacaccctagtgagatgaaccagatacctcagacggaaatgcagaaatcacccatcttctgcgtcactcacgctgggagctgtagaccggagctgttcctatttggccatcttcggttcttgatttctctttatatcttctattcctttgctaaggttttgtagtttttcttttgtttcaaacgtgttcttaattgctcattgaagaatttttatgatgcatgtttaaaaatatttgtcaaataattccaacatcagtgccatctcagttggtatctgttgattgtcttttctcatttactcaagattttcctggttcttgatatgatgagtgactgagtaattttcagctatatcctggaaattttgggtgttattttatgagactcttatttaaacttcctgttttagctggtctatgaatttgctagtgctgccataacaaaacaacacaacctgggtgctatggtattctactttattttctcacagttctggaggctagaagtccaagatcatggtgctggcaggggtggttttcactgaggtctctccttggcttgcagatgactgctttcttgctgccttttcacgtggtagtccctctgtatatgtgtacccctgatgtctatgtgtgtccataatatctttttcttatgaagacacgagtcagattggatagaggcacacccaaatagcttcattgtcacctaattacctcttaaaaagccctattgccaaatatagtcacgttctgagtttctgggggttagggctttaacatatgaattaagagagccacaattcagttcataaagagctgtcttcttctaacactgcactggtaaaggaagtagaaatgcctccttgttactggaggtggagaagtgcatgtttcccacccagcctccactgacacccttatgggggtatcttatttctactgctgggcaggagtagaagttaaggctcccctctaggcctctgctgacaccactctgatgagaggggacacctggttactgtttctcccatggcctccactgactttcatcagggaggtgctccctattaccactgatggggaggaaagtcctagttccctacccaaccttctctgatgccaccctagcagaagactcgggcacatgttacagcacatggtgattgtagaagtctaggctcctggttggtctttgcagatggaatggaggtgggccccatcttgttttcatggtgtcttcctagaatagggcagttattgtctaaacattttttgtcttgttgttcctttcttggtctaggctagagaaataatgcatttcttggagcttttttgtctatactctgtggtgtttttgtcttgctaatttctctagtttctccagctcccagcctaggatatagtgggcaaaaaagagggggggaaaaaaaaagccagggaactaaccattgtgccattccttgaatcccaaggaccccagccagtctgccttcctacagtcacattttagagttttcttttgttttacatatgatacccagcccttctagtactttaacagttctattttttaatgtttaatccatctggaagctattgtagttcatggtgctgctgaaccactactttgacaaatgtcaaatcaacttatccaggaccataaaaaacccttttacatgttggtttcaattgaacccttttgcatgttggtttcaattgcacagtattttgtagatctgtttaaagagtaatcctatttttattttaaagagtaaccctgtttttatacaagagaatactgagtctaagcactgaatatcagtgttgtacatgcagtatctcatttagtcttctcaataaccctgtgcaataacattttcattttgctagcaagaacatttataaccttgcctatggccacgtattaattagcaactgagttggggtcataatttaagtgttctaacttctactcaatttttctttccttatgtgtacagaagccaaaacactttttctcctaggattaaagattgtttagaatctgctaaaattagacaaacaaagcactgttactgtatatctatcaccagaaacacggcaatgatttagagagatatgttttcaatatccttctttgtaatatatttgttacagtgagatatttttaataacttgccagctcccgtcccatgggaggaaaaaaacagcaagcatgaacaactcacatcatggaaataaaaacaaagaggcattttaaataacagcccggatatcattaaaatgtttttcctttattacatagcattataattgccttaaatggttatggttcaaaggagaagaaaaatatgcccctttcttgctatatgaagtcccccactcaacttccctttgagaatcacctttctaaggttaagtgaatggaacctaaaggagagattagatgaagaaaagaatcaaagtacttctgaaatagtgcaaaccatcatttccatgcatgctggaggaggagcaatttggaaatgggggaacatgggctgaatatcccacaacccatgacagtagttgaaataattttcaaagaaaatttaacaatgacacaacaatgtagctagagtctgaagagaacagaaaggcagaagaaggggtcttatgagctgtaagacgtggcattcgatttgaatagctggcaaagactcaggctcttggcctggaattcacccatggctagaccaaaaaggaatcttccatttaggtggttctcacaggtctcagagatactcagagggtgctcagcatccttggaatctcccagtgcagcctgacaggagtctcaggcctacggcctctcatgtagaggaaacaattatgttctgggaatgtattagttctgctatctgttctgttctgttctgctgtgtaacaaacaatgtactccaaaatttaatggcttaaaacaacagctcttattacctcacagaaactgcaatcaaggtatcatcctgggagtgcagcagatttcaagcctcagtggggaaagatctgtcccctagtacattcacatggtttggccgcattcagttcctggtgggctgttgcacggagaacctcagttacacagttgctttctgttcctcactatgtgggtctctccataggacagcttacagcagtggcagcttgcttcatcagagccagcaagagaaggcaagcacaaaagtaggcaagagtcttttgtaacctaattttgacagtggaattccatcacttttgctgtattctgtatggtagaggcaagtcactaaggtctagtctatactccaggggaagcttgcaaggggcagggatcactggaaactatgtctgaaactgcctccacagggagtggaatattagttaatagtacttgactaaaataattagactcatcaagacagtgcctgtgaaggacatagggatcttcaggtacaggaaacatctaaaatggaattgctaagctggcagcaattccagagcggaggctctgctctctcttacgggctgcatgatctcttagggcatctctgcatatctggtctcttctgctattctcagccaattggctatttttgtttatggatagtcttgtgcatggtccattgaggcctctgtgctgggctgctgcttactctatttgccttctagattcatttccatccttctccatcctcatttgccccagaattttgtaccactgggctccttttccttctggcttcggattggctttgtctgttctggctaaagatggaggaaataaaaagagcaaggtcttgtttcttaactcccttcttgtccctcacctgcagatcacagctcctgccacttggctctctctttgctgttctacctgcattctagtgactgcttctctcttgctgtttcaggccttttggtggtgagagtgtctgccatgactagacctggggtatcacatgattccttgtagttttcccacccccactcacacctttacaaatagcctatttttaaaactgtcctctaatacatttgagcatgccatctgttctgcagggatcctgattgaggtagccttctttgaccctgaagtctacctcttgacattagggggtcagtttattttacctatctcagttgcttgatttcacttttagatttccaagagaggaatctaattattcaagaaaaatttttgattgctcatgccatttctgggtcaaggtccattcctattctaattaactgtggttactggctgagatgagatgggggtccccggtgtcttgggaagtgtaggttgcctcagaaatgcatatgtgctagaaaacacattactgtcatctctagagtatgatgagggggctgtaaaattcccatctatataaaaccttgcttttggctgggtgcggtggctcacacctgtaatcccagcactttgggaggccgaggcgggaggatcatgaggtcaagagatggaaaccatcctggccaacatggtgaaaccctgcctctactaaaaatacaaaaattagctgggtgtggaggcacgtgcttatagtcccagctacctgggaggctgaggcaggagaatcacttgaacccgagaggaagaggttgcagtgagctgagatcgcgccacagtactccagcctggcgacagagtgagactgcgtttaaaaaaaaaaaaaaagcttgctttcagtggcatccctgatttgagcccaggaacccagtctatcctttctgcctgcagacaaatggacagtgtagtccttgtacagtctctgctcctctgatcctgctcaggaatcaagggcagtagctgtgcaggtgtgctatctttatctacggtgaggaaagggagagtgtgactggggatacaccttacttggaattacgcaattatcaaatggaagaattaggattcaagaccaggtgaacctgttgttagtatttaacttatcagaatatttctcatatttttttacactgatggtctacttctggaaaaaattatcaatgcttattccctccagggtgtttttaggttagcatggaataacacttaattgtgaatagatgatgctacactgttctaaatttaacagaaaaggtggtttcctgggacttttgacatctcaccaggtggcaagtagactgcctattttggggtttgctcttgtcagataagtaaagagagggccatctctttgctatggtttgaatatttgtggccctccgaaaattcatgtgttgaaacttaaccaccaatgtggtgatattatgaggtgacacttttgagaggggattaggatgagggctgagccctcatgaatgggattagtgcccttacaaatgaggccccaacgagctgcgttattccttccaccatgtgagaatatggtgagaagatgccttctgtgaaccaggaagtgagctctcaccagaaacagaatgtgctgctgcctcaatcttggaattcctagccttcaaaactgtgagaaataaatttccgttatttataatatctattttatagtattttgttatagcaacctgaacagactaagacaattggtaccaagaagaggaagaaataccacttctacaaaatacctaaggggaaattttaggtatttgttacagtgctgctaaaatgtggaagcagcttggaactgataataggcagaggcaggaagggtttctaagtgaatactagagaagcctacgttggtgtgaaggaaccttaaagggtgattcgattgaggactcagaagaagagtactgtagtgacagcctaaatgttcctagcaaatgcgtaagtggttgtgaacagaatgtttgtagaaatatggacagtgaaggccattctgctgatgtctcaagtggaacggaggaacatgtcattgaaaacttgaggaaaggggatccttgttataaagtggcaacaggtttggctgagtagtgtttgtcctagaattctgtctaaagtagaatgtgtgagcaactggatatttagctggagctatttctaagcagagtgtggaagcttagtttctcttgactccttatagtaaatgcaagaagagagaattgatttaatgatagaattattaatcaaaagggaagcagaatataaatatttgggaaattcttattcatattgaaaggaatgagaaagcatgtctgggagagaaaaccgagggtttgaaaaagtgaccacttgataagattagcatggatgagccatctgagcagagccaggacttattgtacaagataataaaagagtaacctggaaggcatttcagacatcatgttgctgctcctcccatcataggcccagagtttcagggcctgggagaaaaaacaatttcaaaggagggggcatgggcacctgcaggatcttagcacttgctaccaggcactgcctcaaggctctgttctccacacttcattgccaagcttcttggttgcccccggtgcagctccagcagaccctggtatggtgtgcactgcacccagcaaagatgtagaggcatgactgccttcacccagatttcaaaggatgccctgctgagctgtggagcccaagcagagatttgctgtgagggcgagatcactgtagagagaccccaccagggcaattcctagtgcagccacgagggtagagccacacactgtgacctcagacgcttagagccactggtgcatgattcccactgggggtgggaggaccacaggcacgtgactcaggcacagaaccccaaggaggtggggctgctgcagagagccaccatgggggtgtggctgctcaaagccatggggcaggaccgctgccacagagagttggaaggtgggacctcacctcagtggacctagaaggcagtaaagcatccagtcaatgaaggctattcttgagctttaaggttttagacttgttcaaaacctgttactgtctttcttttctgtgtatttcttttgaaatgtgaatgtctaccctatgcttagagcctcactatattttagaagcacataacatttgatttcacaggttcgcagctggggagagaaatttgcctcaggatgaatcataccttgagtctcacccatatctaatatagatgaaatttagctaagactctggattttagacttttgagttgatgctggaacaaactaagacgttagtgactgggatagaatgcatgtatttcacatgcgagaaggatatggattttcggggaccaggggcaaaatgccatggtctgaatgtttgtgtcccacaccccttcccacccttcctaccccccaccctaattcatatgttgaaatctaagcatccgtgtgatgatattaggaggtagggcttttgggaggcgattagttcatgagggtggagccctcatgaatagaattagtgcccttataaaaggggctccagagaaaaagctggcttgtaccttctaccatatgaggacacatggtgagaagttgccattctatgaaccaggacctgaatacctaccagacaacaaatctgcctatgccttaatctcagaattccaagcctctagacttgtgagaaatacatttctgtttctctatgccacccagtttatggcattttgctatagcagcccaaatgaactgagtcactcttttacctgtgaattagtggagaaggtttggcaccaaatgttctgagtcctgaggatgggatgaaagataaacttcaagcatcttttatctggaaagccctccctcattctctgagttggatgctattctcttccactccccaacagcatcaactaatgtctccaatatagcctgtgtcattctccagtctaattaataaccttgtattatatcagaagctccatgaggcctggtattacgttttgctcatttctgtaacaccaagacaccaagtggagtctagcagatatgtttaatgaatgagagagttcacctattcaggaattgagcccccaggggctctctacaatcttatacctcgaggctgctccaatagagtggtcttgaacatcccaggcaagaaagcttccaactgtgacttcacagtggttaagtcacttgaaaatttgaccaaataaaattaacttttcaaattttttaataaaagaagaaagaataaatgattttcctaaggtactaaagacagaagttgtataggtttcattaagtaacatggcaaacactatattgtgcttggacagtttcaaagatgggcaagttatatggtttggctctgtggccccatccaaatctcatctcaaattgtaatctccgggtgttgaggtagggccctgaggcgaggtgacgaaatcatgggggcggtttcccccatgctgttctcaggagagtgaatgagttctcatgagatctgatggtttcaaggtatatggtggttcccctttctctctgtctctctggcctgccaccatgtgaggaaggtccttgctttccctttgccttccaccatgattgtaagtttcctgaggcctccccagccatatggaactgtgagtcaattaagtctctttgctttataaattacccagtcttaagtagttctttatagcagtgtgaaaacagaccaatacagcaagccacattttgtaagcctcacactgtcatcattacataaagagaattgtgaaaagactaagtagaaagacagaatgtaagaatttaaaagagcatgtagtatggagttacagacctcaattagactttaacagctatgtgtgtttgggcaagtagcttaactttgagcctgtttttctagtgtaatgggaataatgttatctaatctcactggaattattgatttaaattgtatgcgaaacacttagcatagggccagcacatggtattcctcaacaattggtaaatattaatgtttttaattatataccatcaaccatctacttaagccagatagtctaaatatataaatgttaaaatgacagcaaatgatcctgccccgtgtccaccaatgacaagtgagtttcctcctccaaggaaagctgctggaaacatcagaaccctccatcccccaggcaagaaggtaattgttggaggtttatcttgtaagaggtattccttctgccaccactagagcagacttcatcttctttctctgggtgtctcataggaatttctctcagttactgcagaactctgttatgccacttcaacaaaaggctttcccaataaacatacatttccctttgatgtgactcatgacttctctgtgcctacaagatgttgcagcttcaaaaggcatctctgtgtctgttgcttgagtgtttattatctcaaggggccctcagatgatttataaactaggttatatttaagagaaaaaaagatatttgtaaaatccacatttggaatgctacaggacatctataggatattttaagttttaggagaaatcagaaaccagataactccagaaaagaactgaataagcctgtcaatctcacctgtctcccataacgtcacagtaagaaaccagtccagagataattctattaggttggtgcaaaataactgtgatttgcggccaggaatcttaaatcattgtaactaggctcaaacacatccttattaatcaaaataggaattattacaatcaacacatttttgccaacaagaaataagtttgtttattcctgtggcataaaaatccatgctttgggattcgacaaactcttggaaagcattttctgcatcctgctggttgtagaagtgttttccctacaagagttgtcaagatgctggaagaagtggtagtcagttggtgagaggtcaggtgaatatggcgggtgaggcaaaactttatagcccaatttgttccacttttgaagcattggttgtgccatgtgtggtcgcgtgttgtgcagaattgggccctttctgttgatcaatgccagctgcaggtgttgcagtttttggtgcatctcattgatttgctgagcatacttctcagatggactggtttcactgggaatcagaaagctgtagtggatcagacctgcagcagaccaccaaacagtgaccatgacctttttttggtgcaagtttggctttggaaagtgctttggagcttcttctcagtccaaccactaagctgatcattgccggttgtcatataaaatccatttttcattgcatgtcacaatccaatcaagaaatgatttcttgttgtcgtgtagaataagagaagatgacactttaaaacgacaatttttaaaatttttgctcagctcctgaggcactgacctattgagctttttcacctttccaatttgcttcaaatgctgaaagactgtagaacggttgacgttgagttcttctgccacttctctcatagctgtaagaggatcaacttcgatgattgctctcagttggtcattgtcaacttccaatggccgacaactatgctccttatcttcaaggctcttttctcctttgcaaaacttcttgaaccactactgcactgtacattcattagcagtttctgggccaaatgtgttgctgatgttgcgagttgtctccactgctttgcgacccattttgaactcgaataagaaaattgcctgaatttgctttttgtctaacatcgtttccatagtctaaaataaacataaaataaacagcaagtaatgtcatcagacaaaaaaaaaataaagtgagaaatgcttactaaaatgatgtatagaagaactatacactaaccatatttatttaagaatgtactccaatatcaaacggcagattttaacaatgcaaaaactacaattacttttgcactcacctaatatgttcttttatctggatttgtatgtattttctgggataaagagtaacagacagactagtatattagtgacacaatttactagctacataatcttggacaaattacttgacctctctgaatcttacttttcttatgtgtaaaatgggtatttggaaacatgctatatttgaggttttcttcagaaagggaagatacactcttcaaagccagtcctcctcttttcctttgcagtgctggactattattgtactttatcaaatatttcaacttacagagatggccggggctgggcagagagctgtggatgtataaagaagaagtaggctttgctacagtgagccaggtcattgtctaagactttgatgttaacttataaaaacttttaagaaaaactataatttcaaaattttctgaagttatttggggaaaaaaatgtctacaatcttcaaaaacaagcttagatttcatcaggcatgtaggcttcattcccgtattattatttagataataactagacaaacatccctggatgttaaataatttgaaaaatctcaggtgacatggatacaccaaaaagaaaaattaagtgatattaaaaaataaatgactggaattttgccccatgaaggacagaatgttgggaacagaccaatgtttcttctaaaacaagtaataaatcaagatgaaatgtaagaataattggcttaaaggcaatggagatctgctgaagccatgaggacctgaaggtctgaggctttggagagggcagaaccacagggaggtgagctgaaaatgcgctgctgcttttttcctgtggccatttgactgattatgggcaagaacaagaggctgagaatgtacccttgctcaagtaaagaaacatctttaggtgacagaaaaatggacagggctttgtgtggtcttaaaggtttggaatgaaaaattggagacctgggaacctcaaacatcatccagcttccctctcaagaagtctgttaaattctgaagctctgtgaggtagcaggctaaaaatctaagaagaaaacatttgagcagaattttctgcagtcttgtgctgagaaaacaaagagtagagtttaaggcctactagtggaacacaccaggccttcagttaatagcctcgaagagctatatggtagaaacaatggcgaatcaaaagtagactgagtttataaaacttgcaaaaatagctgatattcatctcaatgcctgattggattacagggatcagcctcttcctttctcttcctagaaaagggaagaataaacttttttgggagctgtatgtttaaaagatagaagaaaagtttgataattttagcaaagaactgaaaattataaaaaattggaaataaaaatattaaaaattaaaatattctggaatttaaggaattcagtatctgaaattacaaatagagagaagcagataggcgtgacaggaaacaggattagtgaactagagtaggtcattagaaaatattcaaattaaagcatcaaaagaaaagaaaatacagtcatgtgtcaattaatgatggggaaatgttgtaagaatgttctgagaacgatggagatccattctaagaaatgcatcattacaatggtatttgtatatctttacatatctaagcatagaaaagttccagtaaaaatgtggtataaaatattttttaaaagggtacacctgtgtagggcacttgccatgaatggcacttaaaggactggaagtttctctgggtgagtcagtgagtggtgagttactgtgaaggcctaggacattactgtacactgctgcagagtataacactgtacatttaggctacattaaatttattttaaaatttctcttttttcaatattaagttaactttagtttaccataaattttttgttccataaacttttatattttttaaaactgcttgactcttttataataatgcttagcttaaaacacaaacacattgtacagctgtacaaaaatattttctttatttctatcattataagcatttttctatttttaaaattatttgttatttttaacttttagaaattttttgtgaaaaatgaagacagaaacacacacattggcctaggccttcacagggtgaggaccctcaatatcactgtcttccacctccacatcttgtcccactggaaaacctgcaggggcaattacacgcatgaagctgtcatctcctgtgataatgacgccattttctggacacttcctgaaggaccttccccaggcttttcttgaggaggtgtccatggtggtgtgcctggtttcttttttccatcatagattttttttccatcatagatttctgtgactaattcagagagagggagacaggagttgacactgactaggtgtgagggggtttgctagggctctaattcactgcaagcaggcttgagtgaggaaaggcctctgggaaattctctgaaatatttatggcttgattacgtatatgttatgggatggcatggttactgaacttccccccatggttggggtttaagcctttttatttggggattaacaccgcttggagagcaggggaatttggaggcctgctggctgtgcatgtaatgtgttcctgcacatctgcgccctcagtaagttctcatattgccattagagcatccatgaaaagaatccagtgtttgtgagtcaatgtcgcttccatccctcctccaatctcagcagattgaatgatgtcaagttaggaggggttatctgagatcaaatgtggaggcttaattatcacagacaaaaaccactaatgaggaaacaacattatctttcacagatgaagctgttttgatggaaactaatttatggcaagtgttctaatctctaggcttcatcacgaagaggctctgtcctcaccgctttctccttccccctccccatcacttctctgctctcattaactcagtctcacaggaaatcaaagagagaagacagtgctttccacaccttttacagaaaaggaaatggaagcaatgaggttgccagaattgcttccaggcaagattgccaaaaacaatgtcttctttgggagcccctcacttttctttttggctcctgttccctcatacctatacctctctctctcttgctctgcgactccccgaccctttccttctctctctctctcaatctctctctttttctcccctcattgttgtctgctacctcttctgccttgacctaatcctcttccatgttccttatttataaataagggtctttggggagggtcttaccagggctggggtgctggcagtgtaggttcagagcagaggttttcctgcccacatctcgggaaaggatgagtagccttcagagggtgggcagggggagaggttataaggtttaggaatcaaagctacttgtcagcaagacatccagggggacttccaggtgccacagggggagttagtaaacaccaggaagtgacacgacagctggaaatatccctcccacctctgcttttatgttgcttcattctctgctgtttccctgcagtgattcacagtaaacccaccaaaccctgcagcacaggtgggactggccaaggccaccccgttgcatgcatgtccagctctggagggaaccttcagggatcaactgaccagtggcccctatgaggcaggaagaaggaggctgggaatgtccggtctcagggggctgtggcaaaaaaggaaggagagaacttagtcagtctagggccaggcattttgtctgttctgcctgaccgatgcctccagaacacaggccaggtctttccctttctgtatcctcattgccttcacatattttgacatacatagcagggactcaacgcagagtccagtgaaagaataaagaaatgaatgaaggaaggatgcatctcttccttaaaatgatgtatgccaatgttttacctaatccatgtcactctttagcagtttgggccccagggtgtcaccacgggggctccatatccccaccctttatgctcactgtgttgggaactgtcagaaccagggcaaccactgctgtgtgtgtgttcccagaagcagtgggccaggctgagggcaggagtccagcacgaccaggagcagaagccaacagtctgagccatctgagcacagaaagtggagagcatgctggcgagggctggtgttctcagccgaggctagcttggacttgccaagtacctgaggcaatgtcactgattctgccatcctcaggctgcctgaccttgggctggtcactcattccttgccagatgaagccatccagttgtagcagcagtgacaacacaaagctcacagaggggccaaggctgggagggcaaatatgttttatgtcatgagctaacacctttcaattggttgtggccagctggaaagttgggttgattctgcaggtcagttcttgacaggaaagggacctctaatcccctagtagggtctgctgttggaaatgagaggtgggctcctgagactgtgaaacaaacggccgactgtggattccagttgccaggtccacctataatggcatcggcaaatatttcaaacaacacataattctgtccttgatgaaatgacacatcgtgaatggtgaatccatcaattccactttcccttagtggtgggtagagaggcaaggagctctgacaataatcagccttccatgtggagctaagatcatcttcatctgcagaaaaaaagcaccctggagatggatccaagaggggcaatgctcagagttccaccaaacaggcctaggccagcatgtcccacagccccaggtagggtgcgcactgtttgcatggagtctgattacttatccaggccacgaggctggagccagctctctctgctgcgccagttctgctaacactaggtactcccaggccttgttgtcattacttgcagattgctgaaaagtgtcagctttacctttctttttttccatagatcgaatgaataggcttccgggggagaagaccgaagcgcagctctgtttttccaagcccatggcatggcttgccaagaatgaattaaatgtttccacagaatcatttgctttgtttctaatcggctctgtgaagtattttccttcttcccagtggtttaagagggactcattggctcccttggccaggcccctcaggctggggcttttgggaaaggaagaaatggaaaaccatgagaggcccttcaagaaatctaagggtggaggatgattgtggcctagcacaagtagattatcagaaaacacagggagctgttctgccagggctatggcgacggagatgacaggggtgcaagggtcttggggtcatcagccctggggtacagccaaatcaacagtggtggtccagatgctaattctttggcttgctcctactggtaggttgtggccaatcatcttcaaatccatatctgcagctcagtggagagacttcctagggtagcccacgcactgtgatctccctctgagtggccttcgggctaccggttgctgtggtgaccatctgcaaatgccttggcaggtctggatgcggcactgttgctgcaaatgcttcttttctttcagttctggaagacaccgtgggttctcttttccaatctaattggccccatgctgagagtgtaataaaagcctctttttctccaggagtctaagactctcttttggaatgaaagagcactgctttccatgttgaattgcttctttggttcatctctccattacagcacactctttaaggacttgtgcagcccagtgagaactggactggaggccagcctcagtgacctggctttgagccacagcccacttgttctggggatcagtctctccctgagatttcacgtgctgtctccatcagctcaggattgtcctcccttgggacattgcttcagctgttgttcttttatcatggctggtttgtttttttgcttttgtttttgttttgtaagaaattgactgttattttcaaagcattcaggatctgtctttccttcaaacttcctccttctctcccatgagcagatcatcaatcatcactgggcttttcctaccaccattgcataccaaacatctacaaatagcagagggcccatgcattggtcagagcagtgctctatgacacttaggcatggcatcattcccacttaaggcactcatggtggacttgactaatggagcaactctttcctggtgagcctcagaatccttctcaacaccatgcatcacactgctgctaccagtcctttagagctggtttttaggttaaaatctttttgccttccccagcttaggttccccattgcatctccccttcctctaaccaacattactgtgaatgctcagaattaatagctacttagtgctagcccacccatgaaattgacgctgataagatgtagattctgccagggaccttatagtttgttgcagctacatcaacaagatgtaagcatgcctgactgaggttgaaggaggtgctggacatacctctattcaagaagaattcatcccttttcagagtttatgaatgtgcctcttcttactattcatttatctctcagtgataaatgaattttatcctgcaaagtgaaaggcctaggggttgtagtccagaatttattgttcaggataagctgcatctgtcctgggagatagagcaactagatccaggacaatctgagacttatccagtaacatcatctctcacgcagtaaaccttgtcctaaccaggccaacccctggtcttaagaacagttataatacctgtgggttctgctatgtggacactttatctctaacatgaaagaggagggaagtgatgaattgcagctcaattactgacatgggttggcctggatttttgattcattaataagtactaaaggggaaaaattctaagagaaatgaaataggaatttaatatttgaaatagttaaaagataggttattcattagagcatcaacaaaccactacaaaagcgagcaaaaataaataaaataaaatcctgagtgctagcctttctagaaatccaggaggactcaatgatttcgctaatgggtagctaggaatcacttccttccaaccctcccccttggccccattgctgcatagatcctctggctcgatggtgtgggtttgagactttaatatttgcctgcatttctgacatgcagaaaatccctttagcccttctgttttcagtttgctggctttgcttgtgctagccgtgtgctgcactcgcggactatacgaatcccaggccttagggctgcctgtcctcctctgacaatgggcctccccagacacttgcctgagtcctgtgatccagaccaggccttgtcacaaaattcaaaccttgcttctctgcccatcactccagtttctccaagaatgagggttagggccttgcccttattttctccagctcaaccaggggtttcttctctggcccaggttggcttcccatgctctccaggccttagcatgactccctctactccacatcaactgctctcctgccctgttccgtggggcctttctccctccagttggaatacagtgaaaagttgctttttcagcttttcctttgctttctggtgcctgaaaacacatgcacttaccattttcatcttacctgggttgttggtatttagtcttgggcaagggaggacactttaatataaccatggcccttggactgtaatttctaatgtttttctctggaatggtagctgccctgtctctgagatttttgtcattgatttttactgctgaggggtggacccattcattcaacctgggggcttctagtgatttattattccaagttaagacaattttatgaatgaaatgggctgttattgatagttatgacagaataacaggaatacaccagtactattccaggtgaaagttgtattcttagcctgaccttgtctttagcagccaacatagagcaaacttcacttgtccaggggttgtatctggggccatttctcttggaattgatagatggatgtgatggccaccatgcccagcatgtaagcacatggctttaaactctcataatggagcagctcttaggttgacccttttgtaagttcgtggacttagacaagtaattcctttggtgattctcaatttccccatctgtacaaggagtataatggtaactgtcttataaatggctttaaagattaagtaagacaacatcgataaagcatttgacttgagatagttcaatgaattctagtttccttttcttcatcttttcctaatgaggcccacagagcatgtcaacccatttctaattcctctcctttaatggaaagatggtctgtgatctgctattcaatattccttgttaaaatggattctcagttttgcatttccaatgccttctaatgtaaaataaatttcagcccaaaaaaagggctgaaattcaatacattaagggaagtaattttaatgtatgagatggaaagagagatttagcttaggatcccaaatatgcaggagcatgagatgcgttgggagcatgattctgctaaagcttcagggatggaaaaaggaatcctgtgctgggacataattaaatgacttgagaagacggctaatggtattaaaatgaaaactttaagctctagactactaattttaattccacagtgaaaggtatcgtgctgttgctggctgctgagagaagagagtgaccagagcccactgactgtaataccatggaacagtgtttgtctcagacagaagggctggcttcaaatctttgctctgccattcgtcaaccttgcccttgaatcagaccctcacactctctcaacttctgttttcctacctgtaaaatgggtgcaataatatgtgctgaagagatctgtgatgagaattatgtgagaaactttattttgtttatttttacttaaagagacctagcacacctggcagcatgtgactgtcaattatactgtgaaatgggttaatgagttagtttttatttcttcttttttaggactctgaattgaatctggaaatatatatgccctttcatctcttcttttaacttcaactctatttttctgcagggattaataaaagtttcttgtttttagagctttggtgcctagatctgtaataacaactgaatattatgggtgtactaagtgagaagcttaaggggcatctgattagaaattctctggactcttattaggctagtctggacccactggtccatgaaacactacttttgtgggatgttaatagttattcctccaaaaatagaatgcaaattcagatgtttttgagaaaccctggataaataaaatgaaattgattcctttattgcaatttttcagatagttaaatgagccaaggtgcattgtgaatctccagcatggggccatgtgacatgcactgtctcccaaacatgtttgaccatgttccccatttttttgtgggatatttttagagaccagtggtccatggcatgctttgacaagtactgttctgatactttttataaatttgaaaaaaaagtttacattctaatattaagtgcaaaagcaagctactaaatgtcataaactataaaatcatgattatggtaacatgtatttaagaaacaggcaggaaatctattaaaatattaacctatcaactaaaagagtaatcttggggagggagacttacagtttttatatttattttgcttcctatattttctagtttttctacaatgaacatgtattgcctttatagttcagcaaatttacttttcttttttcttttggttaagcagtctcagaaggaatcattttctttccacctacaatgttagatccacctgaatgaaatacgcctttcattgcgtcctgagaagacggaagaatcataaaaagccttcagaagcccttgaggaattttgagggcagtaaaagcaaagactgtaaaccgaagaaaaatacacaaagatgtaagagcagtaagagcaaagtggggacaagggatattgagtatctgaagggaaaaataagaagcatagcctatcctggaaaagaaaagaaacgtcatggtaaaaaaacaactgcggtttttgtgaacacctactacggtaaggaacaggccagccatagcccacacccaggtggctgacaagagctcgccagatcacagggccaccttcctgcctgagagctggatgccctctgcatcttcctgggctttacagcacatgggatctgtttacatgtggtctccgcagactcgtgtcaagatcctaagtcagtgaatcccgagggaagcaaaaggcaggggtggaagcatggtaaggaggtgtaaacacccttttgtaagccccatggaggggtataggcttcaacagggagcagtttaagatactttggagattgactgtttggggttaagtgttggctccactacttatactcatgtggttttagatgcttttcttaatctctctgtgctctggtttctgtaaaatagtaataagtatcctatttagttattttgaggactaaatagataattccagccctccatatccctgggtttctcatttgtaaattcaaccaactgtgggccaaaaatatatggaaaaaaatggaacgtgtactcaacatgtacagacatttttcttgtcattattctctaagcaatgtagtattcagcactatttacatagcatttgcagtatattaggtattataagtagcctagagataatttaaaggatgtgggaagatgtatgtaggttacatgcaaatagtacaccattttatataagggacttgagaattttggtaactgaaggggctcctggaaccaatttcccatagatacagaaaaatgactgcatatgtaaaagacttagcagtgagccttttataaatggttgcattagtattaataaagaagtaaataacacctataaatagttacccagggtttcccggattacagctgctatggtctgaatgtttaagtgctcccagaatttatatgttgaaacctagtcaccagtgctataatattaagaaatggggctttgggaggtgattgggaatggcattaatagcacaggaacagaaaaccaaacatgttctcatttgtaagtgggagctgaacaatgagaacacatggacacagggaggggaacaacacatactggggcctgtcatggggaggggaggagggaggaacagcattaggaaaaatagctaatgcatgctgggcttaatattttggtgatgggtctataggtgtagcaaaccaccatggcacatgtttacctatgtaacaaacctgcacattctgaacatggacctcggaacttaaaaaaagaagataaaaggcttgagcgagcctgtttgccccttccaccatgcgaggacacatacaaggcaccatctatgaggaacgagctcccaacgagctcccaacagatgctgattttgctggtgtctcgatcttggacaacctccagaattgtgagcaataagtttctgttgtttataaattacttagtctaaggtattttgctatggaaatatgaagggactaagacaatagcatataagaatgctatcctgatttctggacttcaaattacttataacatatttggcactctcagccagatacaggccatatttaggcaacactgaatgaggaaagttacttacttgcccactcccttctggagagtgggacgcaattatcaattgtgttgaaattctcctagatattatatgaggtgtctttaacttgagacttgcattagtcaggttttgatacaatgattctgcataacaaagaatccccaaatagcaacacatacttgtttctcattcacaggtctatgagtcagctatgactctgtggtgctttgctggcctcagctggacttggcttcaggctgtaggttgggttcatatctgatcaatggggctctcattctgagactcaggctgaaggccacctgaattctactcttctcacagtgaatgagaagctcataagagtacatgaggacagtaggaaacttgccatgtgtcttaaagcctcaccttggaacatgctgtctcctccatctatgttctattgctcaaagcaagttatatggccaagtccaatgccagtgggatggaaagtacactctgttcacaggacagtcacagcagtggcaaagcgggaaggaggaatcatggacaaataataaatactatttatatactacaaggatctataaaaataacaaaagaatgagctgagaaggactgaactcacattatggcacagacttagaacagtttagcaaacaataaactgcaattgcatcgtgtttgtgtattctaaactcacaacccaaaccccttcaaaatctagtcagacaaaaccagcaaattatccgtaaagatgcatgtgcacatgtacccagaggacttatggtgcaaagcgcatacccagcattaaccatgacacccttctagtcttgcttacaaaacccctctcaccaaggctctggagaaaccctagccagaaaaggcaagaagaaaaggcctgggtcagttcccagctcacttataaaccttcctgatccagacagtgcttggatcagagctgatctgcccctgatgaggaatttttaagtctctctctgctattgttttcagttgagcgcaatcatcaactgaacaccttttatgctggtcctttctgtcatttttggctactgcacacatatatacatattcagggatgtcaagtggggaatttctctttcaaatgttcaatacataaataattacataaaacagtgaatgagtatctgcaaaagaacctgctgtggaagccaagggactacaggtgggagacaaatgaattctgactagcactttcagatgatttcctcacactcagcagtcctttatctgtgattacttcctgtgtcctgctatcactttcctgctcctcccctacttttttatctgccccaaagctagagtttgaaattgtctaataatttcattcacttatacttacattactatttaccatctaaatgagttaattggctccacttggaacactgacattctctttcagttcccttttttttttttttttctgggcaaaatcatttgctagctttatccttatgggttgaaaaggcacatattccaccctgggaggaggccatttcctgttcatggaacctgcccgtcctgagtgttcactggagaggcggtggactcacccccttctcagttcaaggacatactcgggctacttcttttccagctggtagatacacaggaagatactgcatctcatggactaatggactttcaagtcagcttgggggggtcacatctgttttatgcaagcagacaaggtgaattattgaactaacagctttctcaggtatgggctctgcagtgtgattaattatgtataatgtgcactcaggcaaaaaatgaggtgtttaaaggctgctggagtcattccaccttcaaacaaggaagagcaagctgaagacttttgtagtgtcttacactcacccatggtggctgaattgataagagaagcatcagacttgtcagggagaaataatgtggtctcctctgttttggagtagtgtttgtcctctccagatccctttgtaatttttgtctgactttcttttgcctggcatatagtgcatggcacaatacaatagcagggataataacagctaccatagcattgagtgtgttaggtgtataactcggtgtattattttttatttatttatttatttattttattattatactttaagttttagggtacatgtgcacattgtgcaggttagttacatacgtatacatgtgccatgctggtgtgctgcacccactaactcgtcatctagcattaggtatatctcccaatgctatccctccccccgccccccaccccacaacagtccccagagtgtgatgttccccttcctgtgtccatgtgatctcattgttcaattcccacctatgagtgagaatatgcggtgtttggttttttgttcttgcgatagtttactgagaatgatggtttccaatttcatccatgtccctacaaaggacatgaactcatcattttttatggctgcatagtattccatggtgtatatgtgccacattttcttaatccagtctatcattgttggacatttgggttggttccaagtctttgctattgtgaataatgccgcaataaacatacgtgtgcatgtgtctttatagcagcatgatttatagtcctttgggtatatacccagtaatgggatggctgggtcaaatggtatttctagttctagatccctgaggaatcgccacactgacttccacaagggttgaactagtttacagtcccaccaacagtgtaaaagtgttcctatttctccacatcctctccagcacctgttgtttcctgactttttaatgattgccattctaactggtgtgagatggtatctcattgtggttttgatttgcatttctctgatggctagtgacggtgagcattatttcatgtgttttttggctgcataaatgtcttcttttgagaagtgtctgttcttgtccttcgcccactttttgatggggttgtttgtttttttcttgtaagtttgtttgagttcattgtagattctggatattagccctttgtcagatgagtaggttgcaaaaattttctcccattttgtaggttgcctgttcactctgatggtagtttcttttgctgtgcagaagctctttagtttaattagatcccatttgtcaattttggcttttgttgccatcgcttttggtgttttagacatgaagtccttgcccatgcctatgtcctgaatggtaatgcctaggttttcttctagggtttttatggttttaggtctaacgtttaagtctttaatccatcttgaattgatttttgtataaggtgtaaggaagggatccagtttcagctttctacatatggctagccagttttcccagcaccatttattaaatagggaatcctttccccattgcttgtttttctcaggtttgtcaaagatcagatagttgtagatatgtggcattatttctgagggctctgttctgttccattgatctatatctctgttttggtaccagtaccatgctgttttggttactgtagccttgtagtatagtttgaagtcaggtagtgtgatgcctccagctttgttcttttggcttgggattgacttggcgatgtgggctcttttttggttccatatgaactttaaagtagttttttccaattctgtgaagaaagtcattggtagcttgatggggatggcattgaatctgtaaattaccttgggcagtatggccattttcacgatattgattcttcctacccatgagcatggaatgttcttccatttgtttgtatcctcttttatttccttgagcagtggtttgtagttctccctgaagaggtccttcacatcccttgtaagttggattcctaggtattttattctctttgaagcaattgtgaatgggagttcactcatgatttggctctctgtttgtctgttgttggtgtataggaatgcttgtgatttttgcacattgattttgtaccctgagactttgctgaaattgcttatcagcttaaggagattttgggctgagacaatggggtttcctagatatacaatcatgtcatctgcaaacagggacaatttgacttcctcttttcctaattgagtaccctttatttccttctcctgcctaattgccctggccagaacttccaacactatgttgaaaaggagtggtgagagagggcatccctgtcttgtgccagttttcaaagggaatgcttccagtttttgcccattcagtatgatattggctgtgggtttgtcatagatagctcttattattttgagatacgtcccatcaatactgaatttattgagagtttttagcatgaagggttgttgaattttgtcaaaggctttttctgcatctattgagataatcatgtggtttttgtctttggctctgtttatatgctggattacatttattgatttgcatatattgaaccagccttgcatcccagggatgaagcccacttgatcatggtggataagctttttgatatgctgctggatttggtttgccagtattttattgaggatttttacatcaatgttcatcaaggatattggtctaaaattctcttttttggttgtgtctctgcccggctttggtatcagaatgatgctggcctcataaaatgagttagggaggattccctctttttctattgattggaatagtttcagaaggaatggtaccagttcctccttgtacctctggtagaattcggctgtgaatccatctggtcctggactctttttggttggtaagctgttgattattgccacaatttcagctcctgttattggtctattcagagattcaacttcttcctggtttagtcttgggagagtgtatgtgtcaaggaatttatccatttcttctagattttctagtttatttgcgtagaggtctttgtagtattctctgatggtagtttgtatttctgtgggatcggtggtgatatcccctttgtcattttttattgagtctatttgattcttctctctgtttttctttattagtcttgctagcggtctatcaattttgttgatcctttcaaaaaaccagctcctggatttattaattttttgaagggttttttgtgtctctatttccttcagttctgctcagattttagttatttcttgccttctgctggcttttgaatgtgtttgctcttgcttttctagttcttttaattgtgatgttagggtgtcaattttggatctttcctgctttctcttgtgggcatgtagtgctataaatttccctctacacactactttgaatgcatcccagagattctggtatgttgtgtctttgttctcgttggtttcaaagaacatctttatttctgcgttcatttcgttatgtatccagtagtcattcaggagcaggttgttcagtttccatgtagttgagcggttttgagtgagattcttaatcctgagttctagtttgattgcactgtggtctgagagatagtttgttataatttctgttcttttacatttgctgaggagagctttacttccaagtatgtggtcaattttggaataagtgtggtgtgatgctgaaaaaaaagtatattctgttgatttggggtggagagttctgtagatgtctattaggtccacttggtgcagagctgagttcaattcctgggtatccttgttgactttctgtctcgttgatctgtctaatgttgacagtggggtgttaaagtctcccattattaatgtgtgggagtctaagtctctttgtaggtcactcaggacttgcattatgaatctgggtgctcctgtattgggtgcatatatatttaggatagttagctcttcttgttgaattgatccctttaccattatgtaatggccttctttgtctcttttgatctttgttggtttaaagtttgttttattagagactaggattgcaacccctgcctttttttgttttccattggcttggtagatcttcccccatccttttattttaagcctatgtgtgtctctgcacgtcagatgggtttcctgaatacagcacactgatgggtcttgactctttatccaatttgccagtctgtgtcttttaattggagcatttagtccatttacatttaaagttaatatagttatgtgtgaatttgatcctgtctttatgatgttagctggtgattttgctcgttagttgatgcagtttcttcctagtctcgatggtctttacattttggcatgattttgcagtggctggtaccggttgttcctttccatgtttagcgcttccttcaggagctcttttagggcaggcctggtggtgacaaaatctctcagcatttgcttgtctgtaaagtattttatttctccttcacttatgaagctagtttggctggatatgaaattctgggttgaaaattcttttctttaagaatgttgaatattggcccccactctcttctggcttgtagggtttctgccgagagatccgctgttagtctgatgggcttccctttgagggtaacccaacctttctctctggctgcccttaacattttttccttcattttaactttggtgaatctgacaattatgtgtcttggagttgctcttctcgaggagtatctttgtggcgttctctgtatttcctgaatctgaacgttggcctgccttgctagattggggaaattctcctggataatatcctgcagagtgttttccaacttggttccattctccccatcactttcaggtacaccaatcagacgtagatttggtcttttcacatagtcccatatttcttggaggctttgctcatttctttttattcttttttctctaaactttccttctcgcttgatttcattcatttcatcttccattgctgataccctttcttccagttgatcacatcggctcctgaggcttctgcattcttcacgtagttctcgagccttggttttcagctccatcagctcctttaagcacttctctgtattggttattctagttatacattcttctaaatttttttcaaagttttcaacctctttgcctttggtttgaacgtcctgccatagctcagagtaatttgatcatctgaagccttcttctctcagctcgtcaaagtcattctctgtccagctttgttcctttgttggtgaggagctgcgttcctttggaggaggagaggtgctctgatttttagagtttccagtttttctgttctgttttttccccatctttgtggttttatctacttttggtctttgatgatggtgatgtacagatgggttttcggtgtggatgtcctttctgtttgttagttttccttctaacagacaggaccctcagctgcaggtctgttggagtaccctacagtgtgaggtgtcagtgtgctcctgctggagggtgcctcccagttaggctgctcgggggtcaggggtcagggacccacttgaggaggcagtctgcccgttctcagatctccagctgcgtactgggagaaccactgctctcttccaagctgtcagacagggacatttaagtctgcagaggttactgctgtctttttgtttgtctgtgccctgcccccagaggtggagcctacagaggcaggcaggcaggcctccttgagctgtggtgggctccacccagttcgagcttcccggctgctttgtttacctaagcaagcctgggcaatggtgggcgcccctcccccagcctcgctgctgccttgcagttttatctcagactgctgtgctagcaatcagcgagactccgtggggtaggaccctctgagccaggtgagggatataatctcgtggtgcgccgttttttaagcccgtcggaaaggcgcagtattcgggtgggagtgacccgattttcccgattttccaggtgccgtctgtcacccctttctttgattaggaaagggaactccctgaccccttgcgcttcccgagtgaggcaatgcctcgccttgcttcggtttgcgcatggtgcgcgcacccactgacctgcgcccactgtctggcactccctagtgagatgaacccggtacctcagatggaaatgcagaaatcacccgtcttctgcgtcgctcaggctgggagctgtagaccagagctgttcctattcggccaacttggttcctccccca

SEQ ID NO: 10370 - DNA, 4851 bp, Homo sapiens
ttttttattttatttattttcttattattattatactttaagttttagggtacatgtgcacaacgtgcaggtttgttacatatgtatacatgtgccatgttggtttgctgcacccattaactcgtcatttagcattaggtatatctcctaatgctatcccccctccccccaccccacaacagtccctggtgtgtgatgttcctcttcctgtgtccatgtgttctcattgttcaattcccacctatgagtgagaacatgcagtgtttggttttttgtccttgcgatagtttgctgagaatgatggtttccagcttcatccatgtccctacaaaggacatgaactcatccttttttatggctgcatagtatatggtgtatacgtgccacattttcttaatccagtctatcattgttggacatttgggttggttccaagtctttgctattgtgaatagtgccacaataaacatacgtgtgcatgtgtctttatagcagcatgatttacaatcctttgggtacatacccagtaatgggatggctgggtcaaatggtatttctagttctagatccctgaggaatcatcacactgacttccacaatggttgaactagtttacagtcccaccaacagtgtaaaagtgttcctatttctccacatcctctccagcacctgttgtttcctgactttttaatgatcgccattctaactggtgtgagatggtatctcattgcggttctgatttgcatttctctgatggccagtgatgatgagcatttttcatgtttttttggctgcataaatatcttcttttgagaaatgtctgttcatatccttcacccactttttgatggggttgtttttttcttgtaaatttgtttgagttcattgtagattctggatattagccctttgtcagatgagtaggttgcaaaaattttctcccattctgtaggctgcctgttcactctgatggtagtttcttttgctgtgcaaaagctctttagtttaattagatcccatttgtcaattttggcttttgttgccattgcttttggtattttagacatgaagtccttgcccatgcctctgtcctgaatggtattgcctaggttttcttgtagggtttttatggttttaggtctaacatgtaagtctttaatccatcttgaattaatttttgtataaggtgtaaggaagggatccagtttcagctttctacatatgggtagccagttttcccagcaccatttattaaatagggaatcctttccccatttcttctttttgtcaggtttgtcaaagatcagatagttgtagatatgcggcattatttctgagggctctgttctgttccattggtctacatctctgttttggtaccagtaacatgctgttttggttactgtagccttgtagtatagtttgaagtcaagtagctcgatgcctccagctttgttcttttggcttaggattgacttggcaatgcgggctcttttttggttccatataaactttaaagtagttttttccaattctgtgaagaaagtcattggtagcttgatggggatggcattgaatctataaattaccttgggcagtatggccattttcacgatattgattcttcctacccatgagcatggagtgttcttccatttgtttgtatccccttttatttcattgagcagtggattgtagttcttgaagagctccttcacatcccttgtaagttggattcctaggtattttattctctttgaagcaattgtgaatgggagttcactcatgatttggctctctgtttgtctgttattggtgtataagaatgcttgtgatttttgcacattgattttgtatcttgagactttgctgaagttgcttatcagcttaaggagattttgggctgagatgatggggttttctagatacacaatcatgtcatctgcaaacagggacaacttgacttcctctattcctaattgaatgccctttattcccttctcctgcctgactgccctggtcagaacttcccacactatgttgaataggagtggtgagagagggcatccctgtcttgtgccagttttcaaagggaatgcttccagtttttgtccattcagtatgatattggctgtgggtttgtcatagatagctcttattattttgagatatgtcccatcgatacctaatttattgagaatttttagcatgaagggttgttgaattttttcaaaggccttttctgcatctattgagataatcatgtggtttttgtctttggttctgtttatatgctggattacatttattgattttcgtatgttgaaccagccttgcatcccatggatgaagcccacttgatcatggtggataagctttttgatgtgttgctggattcggtttgccagtattttactgaggatttttgcatcaatgttcatcaaggatattggtctaaaattctcttttttcgttgtgtctctgccaggctttggtatcaggatgatgctggcctcataaaatgagttagggaggattccctcattttctattgattggaatagtttcagaaggaatggtaccagctcctccttgtacctttggtagaattcggctatgaatccatctggtcctggactttttttggttggtaagctattaattattgcctcaatttcagagcccgttattggtctattcagagattcaacttcttcctggtttagtcttgggagagtgtatgtgtcgaggaatttatccatttcttctagattttctagtttatttgcgtagaggtgtttatagtattctctgatggtagtttgtatttctgtgggatcggtggtgatatcccctttgtcattttttattgtgtctatttgattcttctctcttttcttctttattagtcttgctagcagtctatcaattttgttgatctgttcaaaaaaccagctcctggattcattgattttttgaagggttttttgtgtctctatttccttcagttgtgctctgatcttagttatttcttgccttctgctagcttttgagtgtgtatgctcttgcttctctacttcttttgattgtgatgttagggtgtcaattttagatctttcctgctttctcttgtgggcatttagtgctataaatttccctctacacactgctttgaatgtgtcccagagattctggttttttgtgtctttgttctcgttggtttcaaagaacatctttatttctgccttcatttcgttatgtacccagtagttattcaggagcaggttgttcagtttccatgtagttgagcggttttgagtgagtttcttaatcctgagttctagtttgattgcactgtggtctgagagacagtctgttataatttctgttcttttatatttgctgaggagtgttttacttccaactatgtggtcaattttggaataggtgtggtgtggtgctgaaaagaatgtatattctgttgatttggggtgtagagttctgtagatgtctattaggtctgcttggtgcagagctgagttcaattcctggatatccttgttaactttctatctcattgatctgtctaatattgacagtggggtgtttaagtctcccattattattgtgtgggagtctaagtctctttgtaggtcactaaggacttgctttatgaatctgggtgctcctgtattgggtgcatatatatttaggatagttagttcttcttgttgaattgatccctttaccattacataatggccttctttgtctcttttgatctttgttggtttaaagtctgtttaatccgagactaggattgcaacccctgcctttttttgttttccattggcttggtagatcttcctccatccctttattttgagcctatgtgtgtctctgcacatgagatgggtttcctgaacatagcacactgatgggtcttgactctttacccaatttgccagtctgtgccttttaattggagcatttagcccatttatatttaaggttagtattgttatgtgtgaatttgatcctgtcattatgatgttagctggttattttgctcattagttgatgcagtttcttcctagccttgatggtctttacaatttggcatgtttttgcagtggctggtaccggttgttcctttccatgtttagtgcttccttcaggagctcttttagggcaggcctggtggtgacgaaatctctcagcatttgcttgtctgtaaaggattttatttctccttcacttatgaagcttagtttggctggatatgaaattctgggttgaaaattcttttctttaagaatgttgaatattggcccccactctcttctggcttgtagagtttctgccgagagatcagctgttagtctgatgggcttccctttgtgggtaacctgacctttctctctggctgcccttaacattttttccttcatttcaactttggtgaaatctgacaattatgtgtcttggagttgctcttctcgaggagtatctttgtggcgttctctatttttcctgaatttgaatgttggcctgccttgctagattggggaagttctcctggataatatcctgcagagtgttttccaacttggttccattctccccgtcactttcaggtacaccaattagacgtagatttggtcttttcacatagtcccatatttcttggaggctttgttcgtttctttttattctttttttatctaaacttctcttcacgcttcatttcattcattttgtcttccatcgctgataccctttcttccagttgatagcattggttactgaggcttgtgcattcgtcacatagttctcgtgccatggttttca

SEQ ID NO: 10371 - DNA, 6063 bp, Homo sapiens
gagctattttattattattactattattattattttttttaattatactttaagttttagggtacatgtgcacattgtgcaggttagttacatatgtatacatgtgccatgctggtgcgctgcacccactaactcgtcatctagcattaggtatatctccgaatgctatccctcccccctcccccctccccaccacagtccccagagtgtgatattccccttcctgtgtccatgtgatctcattgttcagttcccacctatgagtgagaatatgcggtgtttggttttttgttcttgcgatagtttactgagaatgatggtttccaatttcatccatgtccctacaaaggacatgaactcatcattttttatggctgcatagtattccatggtgtatatgtgccacattttcttaatccagtctatcattgttggacatttgggttggttccaagtctttgctattgtgaataatgccgcaataaacatacgtgtgcatgtgtctttatagcagcatgatttatagtcatttgggtatatacccagtaatgggatggctgggtcaaatggtatttctagttctagatccctgaggaatcgccacactgacttccacaatggttgaactagtttacagtcccaccaacagtgtaaaagtgttcctatttctccacatcctctccagcacgtgttgtttcctgactttttaatgattgccattctaactggtgtgagatgatatctcatagtggttttgatttgcatttctctgatggccagtgatgatgagcattttttcatgtgttttttggctgcataaatgtcttcttttgagaagtgtctgttcatgtccctcgcccactttttgatagggttgtttgtttttttcttgtaaatttgtttgagttcattgtagattctggatattagccctttgtcagatgagtaggttgcgaaaattttctcccatgttgtaggttgcctgttcactctgatggtagtttcttttgctgtgcagaagctcttgagtttaattagatcccatttgtcaattttggctttggttgccattgcttttggtgttttggacatgaagtccttgcccacgcctatgtcctgaatggtaatttctaggttttcttctagggtttttatggttttaggtctaacgtttaaatctttaatccatcttgaattgatttttgtataaggtgtaaggaagggatccagtttcagctttctacatatggctagccagttttcccagcaccatttattaaatagggaatcctttccccattgcttgtttttctcaggtttgtcaaagatcagatagttgtaggtatgcggcgttatttctgagggctctgttctgttccattgatctatatctctgttttggtaccagtaccatgctgttttggttactgtagccttgtagtatagtttgaagtcaggtagtgtgatgcctccagctttgttcttttggcttaggattgacttggtgatgcgggctcttttttggttccatatgaactttaaagtagttttttccaattctgtgaagaaagtcattggtagcttgatggggatggcattgaatctgtaaattgccttgggcagtatggccattttcacgatattgattcttcctacccatgagcatggaatgttcttccatttgtttgtatcctcttttatttccttgagcagtggtttgtagttctccttgaagaggtccttcacatcccttgtaagttggattcctaggtattttattctctttgaagcaatagtgaatgggagttcactcatgatttggctctctgtttgtctgttgttggtgtataggaatgcttgtgatttttgtacattgattttgtatcctgagactttgctgaagttgcttatcagcttaaggagattttgggctgagacgatggggttttctagataaacaatcatgtcgtctgcaaacagggacaatttgacttcctcttttcctaattgaataccctttatttccttctcctgcctgattgccctggccagaacttccaacactatgttgaataggagcggtgagagagggcatccctgtcttgtgccagttttcaaagggaatgcttccagtttttgcccattcagtatgatattggctgtgggtttgtcataaatagctcttattattttgaaatacgtcccatcaatacctaatttattgagagtttttagcatgaagggttgttgaattttgtcaaaggctttttctgcatgtattgagataatcatgtggtttttgtctttggctctgtttatatgctggattacatttattgatttgcgtatattgaaccagccttgcatcccagggatgaagcccacttgatcatggtggataagctttttgatgtgctactggattcgttttgccagtattttattgaggatttttgcatcaatgttcatcaaggatattggtctaaaattctcttttttggttgtgtctctgcccggctttggtatcagaatgatgctggcctcataaaatgagttagggaggattacctctttttctattgattggaatagtttcagaaggaatggtaccagttcctccttgtacctctggtagaattcggctgtgaatccatctggtcctggactctttttggttggtaaactattgattattgccacaatttcagctcctgttattggtctattcagagattcaacttcttcctggtttagtcttgggagagtgtatgtgtcaaggaatgtatccatttcttctagattttctagtttatttgcgtagaggtgtttgtagtattctctgatggtagtttgtatttctgtgggatcggtggtgatatcccctttatcattttttattgtgtctatttgattcttctctctttttttctttattagtcttgctagcggtctatcaattttgttgatcctttcaaaaaaccagctcctggattcattgattttttgaagggttttttgtgtctctgtttccttcagttctgctctgattttagttatttcttgccttctgctagcttttgaatgtgtttgctcttgcttttctagttcttttaattgtgatgttagggtgtcaattttggatctttcctgctttctcttgtgggcatttagtgctataaatttccctctacacactgctttgaatgcatcccagagattctggtatgttgtgtctttgttctcgttggtttcaaagaacatctttatttctgccttcatttcgttatgtacccagtagtcattcaggagcaggttgttcagtttccatgtagttgagcggctttgagtgagagtcttaatcctgagttctagtttgattgcactgtggtctgagagatagtttgttataatttgtgttcttttacatttgctgaggagagctttacttccaactatgtggtcaattttggaataggtgtggtgtggtaatgaaaaaaatgtatattctgttgatttggggtggagagttctgtagatgtctattaggtctgcttggtgcagagctgagttcaattcctgggtatccttgttgactttctgtctcattgatctgtctaatgttgacagtggggtgttaaagtctcccattattaatgtgtgggagtctaagtctctttgtaggtcactcaggacttgctttatgaatctgggtgctcctgtattgggtgcatgtatatttaggatagttagctcctcttgttgaattgatccctttaccattatgtaatggccttctttgtctcttttgatctttgttggtttaaagtctgctttatcagagactaggattgcaacccctgcctttttttgttttccatttgcttggtagatcttcctccatccttttattttgagcctatgtgtgtctctgcacgtaagatgggtttcctgaatatagcacactgatgggtcttgactctttatcgaacttgccagtctgtgtcttttaattggagaatttagtccatttacatttaaagttaatattgttatgtgtgaatttgatcctgtcattatgatgttagctggtgattttgctcgttagttgatgcagtttcttcctagtctcgatggtctttacattttggcatgattttgcagcggctggtaccggttgttcctttccatgtttagtgcttccttcaggagctcttttagggcaggcctggtagtgacaaaatctctcagcatttgcttgtctgtaaagtattttatttctccttcacttatgaagcttagtttggctggatatgaaattctgggttgaaaattcttttctttaagaatgttgaatattggcccccactctcttctggcttgtagggtttctgccgagagatccactgttagtctgatgggcttccctttgagggtaacccgacctttctctctggctgcccttaacattttttccttcatttcaactttggtgaatctgataattatgtgtcttggagttgctcttctcgaggagtatctttgtggcgttctctgtatttcctgaatctgaacgttggcctgccttgctagattggggaagttctcctggataatatatcctgcagagtgttttccaacttggttccattctccgcatcactttcaggtacaccaatcagacgtagatttggtcttttcacatagtcccatatttcttggaggctttgctcatttctttttattcttttttctctaaccttcccttctcgcttcatttcattcatttcatcttccattgctgataccctttcttccagttgatcgcattggctcctgaggcttctgcattcttcacgtagttctcgagccttggttttcagctccatcagctcctttaagcacttctctgtattggttattctagttatacattcttctaaatttttttcaaagttttcaacttctttgcctttggtttgaatgtcctcccgtagctcagagtaatttgatggtctgaagccttcctctctcagctcgtcaaaatcattctccatccagctttgttccgttgctggtgaggaactgcgttcctttggaggaggagaggcgctctgcgttttagagtttccagtttttctgttctgttttttccccatctttgtggttttatctacttttggtctttcatgatggtgatgtacagatgggtttttggtgtggatgtcctttctgtttgttagttttccttctaacagacaggaccctcagctgcaggtctgttggaataccctgccgtgtgaggtgtcagtgtgcccctgctggggggtgactcccagttaggctgctcgggggtcaggggtcagggacccacttgaggaggcagtctgcccgttctcagatctccagctgcgtgctgggagaaccactgctctcttcaaagctgtcagacagggacatttaagtctgcagagtttactgctgtctttttgtttgtctgtgccctgcccccagaggtggagcctacagaggcaggtaggcctccttgagctgtggtgggctccacccagtttgagcttcccggctgctttgtttacctaagcaagcctgggcaatggcgggcgcccctcccccagcctcgctgccgccttgcagtttgatctcagactgctgtgctagcaatcagcgagattccgtgggtgtaggaccctccgagccaggtgtgggatatagtctcgtggtgcgccgttttttaagccggtctgaaaagcgcaatattcgggtgggagtgacccgattttccaggtgcgtccgtcacccctttctttgactcggagagggaactccctgaccccttgagcttcccaggtgaggcaatgcctcgccctgcttcggctcgcgcacggtgcgcgcacccactggcctgcgcccactgtctggcactccctagtgagatgaacccagtacctcagatggaaatgcagaaatcacccgtcttctgcgtcgctcacgctgggagctgtagaccagagctgttcctattcggccatcttggctcctccccct

SEQ ID NO: 10372 - DNA, 16401 bp, Homo sapiens
tatgtagaaataatgtacttagtgatgcataagacaacagtccagattcagttttatttggttttatttcctacagtatagtgaggaataaaattggggttgatcaaggctttacagatttgagaagccttgaaaaccctacaaaaatatttagaatggatttcataagaaacaaaaaaaaagcatcagataatatttctgctgcatagagcagcataggaagataaaactggcatctgtgcccaggaaggacccaattgcatggagtgagagaccagccaggaaccacagtctcaacaatacgggcaaaggcaagtgaatccagaagatattagaggcagggacagagaggaaaagacagacatgtgagacatcagagcagaaaagcatcaggactgcatgcatgcaatggagagaaaggaatcaaagagagagagacaatgggatagtgttctgaaagactctagatcaaatttctctggatggatctaaatttccctgaccatatagaccatacaaaggacatccactttccactcagcttgattcattcatccaagtgacgtgtcctaactgttggtaagcattttgttgttgttgttgttttcctgtgaacaatcggtgaataaaccctttagtttttttgtgccatacagtctctgtcacaaatcctccacacagctgctatagtgctaaagcatctgctacaatgtgaatgcatcccgcaaatttcatgtgttggaaacaatcaccaaattcatgctgatagtattaggaggtagggcctttgtgatgattatggtagatgtggcagattagggtagttatgattaaataaagtcacagggtggagcctgcatgttgggactggtggctttataagaagagggcacgctcttgccctctcaccacgttatgacatagcaagaaggctctcatcagaagtggccccttgactgtggatttaccagcctccaatactatgtccaaataacctctattctttataaactacccagtctgtgatactcagccgtagcaacagaaagtgacttaagagagcatctttttttttcttttttatagctcctggactcagcctcacattttcttatcatttcttcttctttttttttaatacctttgttctttttttttatatacactttaagttttagggtacatgtgcacaacgtgcaggtttgttacatatgtatacatgtgccatgttggtgtgctgcacccattaactcgtcatttacattaggtatatctcctaatgctatccctcccccctccccccaccccacaacaggccccggtgtgtgatgttccccttcctgtgtccatgtgttctcattgttcagttcctacctaggagtgagaacatgaggtgtttggtttttcgtccttgcaatggtttgctgagaatgatggtttccagcttcatccatgtccctacaaaggacatgaactcatcattttttatggctgcatagtattccacggtgtatgtgtgccacattttcttaatccagtctatcatttttggacatttgggttggttccaagtctttgttattgtgaatagtgccacaataaacatacgtgtgcatgtgtctttatagcagcatggtttataatcctttgggtatatacccagtaatgggatggctgggtcaaatggtatttctagttctagatccctgaggaatcaccacactgactttcacaatggttgaactagtttacagtcccaccaacagtgtaaaagtgttcctatttctccacatcctctccagcacctgttgtttcctgacttttaatgatcgccattctaactggtgtgagatggtatctcattgtggttttgatttgcatttctctgatggtcagtgatgatgggcattttttcatgtgtcttttggctgcataaatgtcttcttttgagaagtgtctgttcatatccttctcccactttttgatggggttgtttgtttttttcttgtaaatttgcttgagttcattgtagattctggatattagccctttgtcagatgagtagattgcaaaaatgttctcccattctgtaggttgcctgttcactctgatggtagtttcttttgctgtgaagaagctctttagtttaatgagattccatttgtcaattttggcttttgttgccattgcttttcgtgttttagacatgaagtccttgcccatgcctatgtcctgaatggtattgcctaggttttcttctagggtttttatggttttaggtcgaacatttaagtctttaatccatcttgaattgatttttgcataagatgtaaggaagggatccagtttcagctttctacatatggctagccagttttcccagcaccatttattaaatagggaatcctttccccatttcttgtttttgtcaggtttgtcaaagatcagatagttgtagataagcagcattatttctgagggctctgttctgttccattgatctatatctctgttttggtaccagtaccatactgttttggttactgtagccttgtagtatagtttgaagtcaggtagtgtgatgcctccagctttgttcttttggcttaggattgacttggaattgtgggctctcttttggttccatatgaactttaaagtagttttatccaattctgtgaagaaagtcattggtagcttgatggggatggcattgaatctataaattaccttgggcagtatggccattttcatgatattgattcttcctacccatgagcatggaatgttcttccatttgtttgtatcctcttttatttccttgagcagtggtttgtagttctccttgaagaggtccttcacatcccttgtaagttggattcctaggtattttattctctttgaagcaattgtgaatgggagttcactcatgatttggctctctgtttgtctcttattggtgtataagaatgcttgtgatttttgcacattgattttgtatcctgagaccttgctgaagttgcctatcagtttaaggagattttggggtgagacgatggggttttctagatatacaatcatgtcatctgcaaacagggacaatttgacttcctcttttcctaattgaacaccctttatttccttctcctgcctgattaccctggccagaacttccaacactatgttgaataggagtggtgagagagggcatccctgtcttgtgccaggtttcaaagggaatgcttccagtttttgcccattcagtatgatattgtctgtgggtttgtcatatatagctcttattattttgagatacgtcctatcaatacctagtttattgagagtttttagcatgaagggttgttgaattttgccagaggccttttctgcatctattgagataatcacatggtttttgtcgttggttctgtttacatgctggattatgtttattgatttgcatatgttgaaccagccttgcatcctagggatgaagcccacttgatcatggtggataagctttttgatgtgctgctggattcagtttgccagtattttattgaggatttttgcatcaatgttcatcagggatattggcctaaaattctctttttttgttgtgtctctgccaggctttggtatcaggatgatgctggcctcataaaatgagttagggaggattccctctttttctattgattggaatagtttcagaaggaatggtaccagctcctctttgtacctctggtagaatttgtctgtgaatccgtctggtcctggactttttttggttggtaagctattaattattgcctcaatttcagagcctgttattggtctattcagagattcagcttcttcttggtttagtcttaggagggtgtatgtgttgaggactttatccatttcttctagatttttagtttatttgcgtagaggtgtttatagtattctcttatggtagtttgtatttctgtgggatcggtggtgatatcccttttatcattttttattgtgtctatttgattcttctctcttttcttctttattagtcttgctagaggtctatcaattttgttgatcttttcacaaaaaccagcttctggattcgttgattttttgaagtgttttttgtgtctctatttccttcagttctgctctggtcttagttatttcctgccttctgctagcttttgaatgtgtttgctcttgcttctctagttcttttaattgtgatgtcatggtgtcaattttagatctttcctgctttctcttgtgggcatttagtgctataaatttccctctacacactgctttgaatgcgtcccagagattctggtatgttgtgtctttgttctcgttggtttcaaagaacatctttatttctgccttcatttcgctatgtacccagtagtcattcaggagcaggttgttcagtttccatgtagagtgagcggttttgagtgagtttcttaatcctgagttctggtttgattgcactgtggcctgagagatagtttgttataatttctgttcttttacatttgctgaggagtgctttacttccaagtatgtggtcaattttggaacaagtgtggtgtggtgctgagaagaatgtatattctgttgatttggagtggagagttctgtagatgtctattaggtctgcttggtgcagagctgagttcaattcctggatatccttgttaactttctgtctcgttgatctgtctaatgttgacagtggggtgttaaagtctcccacttttactgtgtgggagtctaagtctcttcgtaggtctctaaggacttgctttatgaatctgggtgctcctgtattgggtgcatatatatttacgatagttagctcttcttgttaaattgatccctttaccactatgtaatgacattctttatctgttttgatctttgttggtttaaagtctgttttatcagagactaggattgcaacccctgcctttttttgttttccatttgcttggtagatcttcctccatccttttatttggagcctatgtgtgtctctgcacgtgagatgggtttcctgaatacagcacactgatgggtcttgactctttatccaatttgccagtctgtgtcttttaattggagcatttagcccatttacatttaaggttaatattgttatgtgtgaatttggtcctgtcattatgatgttagctgattattttgctcgttagttgatgcagtttcttcctagcctcgatggtctttacaatttggcatgtttttgctgtggctggtactggttgttcctttccatgttgagtgcttccttcaggagctcttttagggcaggcctggtggtgacaaaatctctcagcatttgcttgtctgtaaagtattttatttctccttcacttatgaagcttagtttggctggatatgaaattctgggttgaaaattctttaagaatgtcgaatattggcccccactctcttctggcttgtagagtttctgctgagagatcagctgttagtctgatgggcttccctttgagggtaacccgacctttctctctggctgcccttaacattttttccttcatttcaactttggtgaatctgacaattacgtgtcttggagttggtcttctcgaggggtatctttgtggcattctctgtatttcctgaatctgaatgttggcctgccttgctagattggagaagttctcctggataatattctgcagagtgttttcctacttggttccattctccccagcatccttaataatacataaacaaatgagcttggctatgttccactaaaactttatttacaaaaacaggttgagggctagtttggctcacaggatgtagtttgctaaactttgccctgtaacatttgaatttgcaatccttggcctttgaggcccaaagttcttgccctgggtcttccttctgatcctgtctaccatttcctactacttactcttgattccagccatagcacactacctgcttttctcaaaagatatcacagatttttacatccagagcggtatactccagtcctcccatgcttgttacccctcattaactatttctcattatttgaggatgagttcagaagttaccccattagggaacattttctaaatcccccaactccccccacaacagcagatgaatactctgttacctgtttccatagcactttaaaatatctctaccttaacccttatcatagcatatttctataattttggaaagaactttgtcttcgttttctttgtatttcacacccacccctcacccaaaccaaatatctaaaacaattcccagaatacagtaggtgtttaagaaatgtttatgctgtgagagcatatagttttaaaaggaatttgggtttctgatcaagggagactgcatttttgccaagcccaaaataatcgttttataagatagttaataaaaagtacaaagctctaagagacaaatacctatcaaaagggcatcccccccccaaaaaaaaaactcctttattttatttctgaaataatattaagtgaattagtagatacttgctatcaatggattctattacttagagggtggtatttcttttcttaaattgtttcaaaagtcaaaattatgtaaatagtcttgccattttctcacaatgtcagaagaggagtataaaaatatatttgtccatgatcaagatctatgaacataacctggtcccaggcttcctgagaatgagatgacttttcttttccttctataactatgatgattgagataatggtcaattacaacattctcttctcccttgaagctccgacatttgggtttctttctttactttataattgagatgttattggttgtgttgaggatcagtacatagacatttcaatttgtacacaattcttagcatacataccaaaaatctgaaaggccatgaattgtaatttctttacacagtcattccaggggctttctagcttaaaatttggaggtaaattttccttaagaggctatcaagtaccagtatcttcaaatgttgataagctgtttcatacatcccaccaattaataatttaataacatatatactacatactcaaattttcaatcttaaacactacattaacaaagttgttaggaaaatgggactaccacagccaaagatataacaagagtgcacacaattctgacagggagagccatgatcaaggagcagttttctttaggaaacaaatctaaaaaacaacaagaaaatagaagtgattcaaaatgctcaagacattaaatgcaggagtgtgactccatattgccatttagtatgtttagtattagaggatataagaactaactgcctatttatggaatgttaagctgacacccaatacagtcaaagcctcccataattcaatatcccacactattttctgattgtaccaaaaataatcaaccagctaatgtttttaccccttaaaaaagaatttacactaaaaaaaaaaatgagataaggtgggacttcctctttctcaaaaaaagtttcctgagctactaaagaaacttgcatttataaaatagttgatagaaatagtactctggattgtacaagggagacagggaccactgataaggtggggtatatgatattaatcagaattggcttctttctctctggcttcatcagaggctggacattcttcagttttagtttctccattttgtgcaggtaaatcttctttagtttcttggctagccactttggcctgtttaccctttgcttccctgcccaaaaggaaggtcagctcagcacaaggggtggtgaaggaagagcccaagaggagatcagtgaggttgtcagctaaacctgctcctgcaaaagtagaaatgaagccaaaaaaagttagcaggaagggataactcttcagacaaaaaagtagcattacagcaaattattcaagtgcaattgtgtaaaaattattcaaatgcaattgtgtaaaaatcctcttgacacagaacaagatagaaagacttcagactatctcctatttccactgaccccacccatgtcataacaaaacatacatttcttggaaatgagatggttctaattttgtgttaccacgttctttcagtgacagtatattgtccattccagttgaagaaagaaatgtaatgtggtaaatatccaagaaaccttggacagaagagccagattagtccacgggcatcagcacattccacaccttatttcttattgactagtatcagatgaactcagtagtccataaatcacagaagacttttggagttcagccattttccaagaaacagcgaagtaaaggctgtgggagccaactgacttggccaaagcgtaaagctcgtaaatgtcaattagcccacaagaacaagcattttgtgccaccaagcatgggtatgtcaactttagcagtgcagagaactcttccaacaagtttaaacaggttgtaagtttgtgtagcatatttgtcttgtttaggggatcatttaatttcaaagcaccttgcctcaccatcttatattatttttttatatgctatgtgttaagaaagtttgatttctgtttgctacagattcagataatctgttagtccccattaatctctaccttttgggtccaaggatgatactcctggttttcataaactccagccaagacaccacatgcttcttcaacatcacaacactttctttcagccaacaattatatattattatgcttggtattgtctatttgtgatcaggtccatttctacccctggatttgcccagaccctgatatactactttcctataacctttactctttctgccttatgaatcatcaagtcagataagatccaactaaaaagtattcatacattcaatatatattcatcttgggtttcagaaggttttggtatccgtctattaattgttctgtttcaaatgaatgtccaataaacagccagtaattgacatccaaaggaaatgtaccagcagcctcaggacatcctgaggccagaaacaggctggtcttgttgaccctttctgggacctatcaaggggttcatgccaccccacagttgaagacagataccaagaaagatagccatgatgggaaccatgagaacattcagaaccagaaatgctccatatgggtagtgatatgcttaatctgaactacaggggatggcccagttggtccaagaaagtttacagactgtagagcatgcctaaacttccagactaggacagtctgcccttataacaaaatctctgctttacctaagtgctctcagtactgatcaagcctttatctcatgcaaccttgacgtgaatcctcagaggataaacacccaggcatggttatggggaaaaggaagagaaaccatatgcatgagcaaattacagcttcaacatgtgcggtggggctgtttccaaaaacagaggagggcttataagtaggtgttcggttggaactccattgtagagagtagtgaaaatgtggagtggaacaatatttgaagtatgcacaaacgccagataacctggccaaagagtaaacagtttgtccctcacaaacaagacaagtagtcccattatgggtcatttgtcctttggctatattagaaaatatttctcaaagttataacacctgaattattggaactttctggtaccctaattttaacacaggaggaagtattgtcctgtggtaaatgaatacaaagttcaccgggtaaaattttttaaatgctggacctgactctagaagtcaggtatatacatcctttaaatgtatatcctgttccactgcattaaatgctatgtgtggtctagaatatgtgcacccctaaatttaaacatgtacatccttaaagtgagcctccttttgacatgtagattagagcttggaaggctttgggggaataccacaagtggagttctgactgaataaatgatgttgccttcactcatctgactgccaagcacaccatgggatgagtagtaaagaagcacaggaagtgaaatgcgcttgatcatctgcatcaacaaatgcttttgagtctagtcacatggcagtcactgtaataggtttgaagataggggaagaaaagatccttgctctcaagaacttacagatgaacaaagagtacagacaatgattcagaaaatgtacttgttttgatagggatatacataaaatgcaacggaaacattgcagtgggggctatcacagaatttggatggatagtgtgtgtgtgttgttggggggtggttggactacatcacaggaaacttcttgtaggtaatgacctctaacttggaaactgaaggatgtttaagaattagcagaggagtattaaggtacaggctaagctgctctccagtgcctcaacaagttacaaatttatctcttcattttataaaaattccaacatgggaaggtagtgcaaggatgtaggaagctctacatcattacgtcatttaggaaccctagttcctactgtcaagaacatgaagggtctgagattttatctacttgtgagataatgatttcacatgtcatagttccatgaatggaaacagatacgagattcctgggtcagagcaacaacggaccgtattagtcaacgcaatagtgggagccagaatatcagcatttgttccagttacctgaggctcaaatctcacaggacacaatgaaaggagcaggagacatctgtactggcagtggtttactttataagaaaggaaccctaaactttgaaaatgaaatctttcataatcagtagtaagtctgcctgacttttgccccagaggaagacattgtttttactatcctgagtagttaacacattttcccagtgctctggaagaagacactatctctatcttccaaggctgtttgctataccatgggccttgaaaagaaaagaagaaaacagagtaattcagaacccctgctcaaagctgggcagaaaaggcagaaaagtaagacccatggagaattgtctttcaatgcctttttttttaaatttattattattatactttaagttttagggtacatgtgcgcaatgtgcaggttagttacatatgtatacatgtgacatgctggtgtgctgcacccactaactcgtcatctagcattaagtatatctcccaatgctatccctcccccctccccccaccccgcaacagtccccagagtgtcatgttccccttcctgtgtccatgtattctcattgttcaattcccacctatgagtgagaatatgcagtgtttggttttttgttcttgcaatagtttactgagaatgatgatttccaatttcatccatgtccctacaaaggacatgaactcatccttttttatggctgcattgtattccatggtgtatatgtgccacattttcttaatccagtctatcattgttggacatttgggttggttccaagtctttgctattgtgaataatgccgcaataaacatatgtgtgcatgtgtctttatagcagcatgatttatagtcctttgggtatatacccagtaatgggatggctgggtcaaatggtatttctagttctagatccctgaggaatcaccacactgacttccacaatggttgaactagtttacagtcccaccaacagtgtaaaagtgttcctatttctccacatcctctccagcacctgttgtttcctgactttttaatgattgccattctaagtggtgtgagatggtatctcactgtggttttgatttgcatttctcagacggccagtgatggtgagcattttttcatgtgttttttggctgcataaatgtcttcttttgagaagtgtctgttcatgtccttcacccactttttgatggggttgtttgtttttttcttgtaaatttgcttgagttcattgtagattctgaatattagccctttgtcagatgagtaggttgtgaacattttctcccattttgtaggttgcctgttcactctgatggtagtttcttttgctgtgcagaaactctttagtttaattagatcccatttgtcaattttggcttttgttgccattgcttttggtgttttagacatgaagcccttgcccacgcctatgtcctgaatggtaatgcctaggttttcttctagggtttttatggttttaggtctaacgtttaagtctttaatccatcttgaattgatttttgtataaggtgtatggaagggatccagtttcagctttctacatatggctagccagttttcccagcaccatttattaaatagggaatcctttccccatttcttgtttttctcaggtttgtcaaagatcagatagttgtagatatgcagcgttatttctgagggctctgttctgttccattgatctatatctctgttttggtaccagtaccatactgttttggttactgtagccttgtagtatagtttgaagtcaggtagtgtgatgcctccagctttgttcttttggcttaggattgacttggcgatgtgggctcttttttggttccatatgaactttaaagtagttttttccaattctgtgaagaaagtcattggtagcttgatggggatggcattgaatctataaattaccttgggcagtatggccattttcatgatattgattcttcctacccatgagcatggaatgttcttcaatttgtttgtatcctcttttatttccttgagcagtggtttgtagttctccttgaagaggtccttcacatccattgtaagttggattcctaggtattttattctctttgaagcaattgtgaatgggagttcactcatgatttggctctctgtttgtctgtggttggtgtataagaatgcttgtgatttttgcacattgattttgtatcctgagactttgctgaagttgcctatcagtttaaggagattttggggtgagacgatggggttttctagatatacaatcatgtcgtctgcaaacagggacaatttgacttcctcttttcctaattgaataccctttatatccttctcctgcctaattgccctggccagaacttccaacactatgttgaataggagtggtgagagagggcatccctgtcttgtgccagttttcaaagggaatgcttccagtttttgcccattcagtatgatattgtctgtgggtttgtcatatatagctcttatagttttgaaatacgtcccatcaatacctaatttattgagagtttttagcatgaagggttgttgaattttgtcaaaggccttttctgcatctattgagataatcatgtggtttttgtctttggttctgtttatatgctgtattacatttattgatttgtgtatattgaaccagccttgcatcccagtgatgaagcccacttgatcatggtggataagctttttgatgtgctgctggattcggtttgccagtattttttattgaggctttttccatcaatgttcatcaaggatattggtctaaaattctctttttttgttgtgtctctgcccggctttggtatcaggatgatgctggcctcataaaatgagttagagaggattccctctttttctattgattggaatagtttcagaaggaatggtaccagttcctccttgtacctctggtagaattcagctgtgaatccatctggtcctggactctttttggttggtaagctattgattattgccacaatttcagatcctgttattggtctattcagaaattcaacttcttcctggtttagtcttgggagagtgtatgtgtcgaggaatttatccatttcttctagattttctagtttatttgcgtagaggtgtttgtagtattctctgatggtagtttgtatttctgtgagatcggtgatgatgtcccctttatcattttttattgcatctatttgattcttctctctctttttctttattagtcttgctagcagtctatcaattttgttgatcctttcagaaaaccagctcctggattcattaattttttgaagtgttttttgtgtctctatttccttcagttctgctctgattttagttatttcttgccttctgctagcttttgaatgtgtttgctcttgcttctctagttcttttaattgtgatgttagggtgtcaattttaggtctttcctgctttctcttgtgggcatttagtgctataaatctccctctgcacactgctttgaatgcgtcccagagattctggtatgttgtgtctttgttctcgttggtttcaaagaacatctttatttctgcattcatttcattatgtacccagtagtcattcaggagcaggttgttcagtttccatgtagttgagaggttttgagagagattcttaattctgagttctagtttcattgcactgtggtctgagagatagtttgttataatttctgttcttttacatttgctgaggagagttttacttccaagtatgtggtcaaatttggaataggtgtggtgtggtgctgaaaaaaatgtatattctattgatttggagtggagagttctgtagatgtctattaggtcagcttggtgctgagctgagttcaattcctgggtatccttgttgactttctgtctcgatctgtgtaatgttgacagtggggtgttaaagtctcccattattaatgtgtgggagtctaagtctctttgtaggtcactcaggacttgctttattaatcagggttctcctgtattgggtgcatatatatttaggatagttagctcttcttgttgaattgatccctttaccattatgaaatggccttctttgtctcttttgatctttgttggtttaaagtctgttttatcagagactaggattgcaacccctgcctttttttgttttccatttgcttggtagatcttcctccatccttttatttggagcctatgtgtgtctctgcacatgagatgggtttcctgaatacagcacactgatgggtcttgactctttatccaatttgccagtctgtgtcttttaattggagcatttagtccatttacatttaaagttaatattgttatgtgtgaatttggtcctgtcattatgatgttagctggttattttgctcgttagttgatggagtttcttcctagtctcgatggtctttacattttggcatgattttgcagtggctggtactggttgttcctttccatgtttagcacttccttcaggagctcttttagggcaggactggtggtgacaaaatctctgagcatttgcttgtctgtaaaggatgttatttctccttgacttatgaagcttagtttggctggatatgaaattctgggttgaaaattcttttctttgagaatgttgaatattggcccccactctcttctggcttgtagattttctgccaaaagatccactgatagtctaatgggcttccctttgagggtaacccgacctttctctctggctgcccttaacattttttccttcatttcaactttggtgaatctgacaattatgtgtcttggagttgctcttctcgaggggtatctttgtggcgttctctgcatttcctgaatctgaatgttggcctgccttgctagattggggaagttctcctggataatatcctgcagagtgttttccaacttggttccattctccccgtcactttcaggtccccaatcagacgtagatttggtcttttcacacagtcccatatttcttggaggctttgctcatttctttttattcttttttctctatactttctttcttgcttcatttcatgcatttcatcgtccatcactgataccctttcttccagttgatcgcaccggctcctgaggcttctgcattcttcacgtagttctcgagccttggttttcagctccatcagctcctttaagcacttctctgtattggttattctagttatacattcttctaaatttttttcgaagttttcgacttctttgcctttggtttgaatgtcctcccgtagctcggagtaatttgatcgtctgaagccttcttctctcagctcgtcaaagtcattctccatccagctttgttccgttgctggtgaggaactgcattcctttggaggaggagaggcgctctgctttttagagtttccagtttttctgctctgttttttccccatctttgtggttttatctacttttggtctttgatgatggtgatgtacagatgggtttttgatgtggatgtcctttctgtttgttagttttccttctaaaagacaggaccctcagctgcaggtctgttggagtactgggccctgtgagctgtcagtgtgcccctgctggggggtacctcccagttaggctgctcgggggtcaggggtcaggggcc

SEQ ID NO: 10373 - DNA, 5647 bp, Homo sapiens
ttttttttaaaattttattattattatactttaagttttaggatacacgtgcacaacgcgcaggtttgttacatatgtatacatgtgccatgttggtgtgctgcacccattaactggtcatttagcattaggtatatcttctaatgctatcacttccccctcccttcaccccacaacaggcaccggtgtgtgatgttccccttcctgtgtccatgtgttctcattgttcaattcccacctatgagtgcgaacatgcggtgtttggttttttgtccttgcaatagtttgctgagaatgatggtttccagcttcatccatgtccctacaaaggacatgaactcatcattttttatggctgcatagtattccatggtgtatatgtgccacattttcttaatccagtctatcattgttggacatttgggttggttccaagtctttgctattgtgaatagtgccacaataaacatacgtgtgtatgtgtctttagagcagcatgatttataatcctttgggtatataaccagtaatgggatggctgggtcaagtgatatttctagttctagatccctgaggaattgccacactgacttccacaatggttgaactagtttacagtcccaccaacagtgtaaaagtgttcctatttctccacattctctccagcacctgttgtttcctgactttttaatgatcgtcattctaactggtgtgagatggtatgtcattgtggttttgatttgcatttctctgatggccagtgatgatgagcattttttcatatgtcttttggctgcataaatgtcttcttttgagaagtgcctgttcatatcctttgcccactttttgatggggttgtgtgtttttttcttgtaaatttgtttgagttcattgtagattctggatattagccctttgtcagatgagtaggttgcaaaaattttctccccttctgtaggttgcctcttcactctgatggtagttactttggctgtgcagaagctctttagtttaattagatgccatttgtccattttggcttttgtcgccattgcttttggtgttttagacatgaagtccttgcccatgcctatgtcctgaatggtattgcctaggttttcttctacggtttttatggttttaggtctaacatgtaagtctttaatccatcttgaattaatttttgtgtaaggtgtaaggaagggatccagtttcagctttctacatatggctaagccagttttcccagcaccatttattaaataggcaatcctttccccattacttgtttttgtcaggtttgtcaaagatcagatagttgtagatatgtggcattatttctgagggctctgttctgttccattggtctatatctctgttttggtaccagtaccatgctgttttggttactgtagccttgtagtatagtttgaagtcaggtagcgttatgcctccagctttttcttttgtcttaggattgtcttggcaatgtgggctctttttttggttccatatgaactttaaagtagtttttttcaattctgtgaagaaagtcgttggtagcttgatggggatggcattgaatctataaattaccttgggcagtatggccattttcaagatattgattcttcctacccatgagcatggaatgttcttccatttgtttgtatcctcttttatttcattgagcagtggtttgtagttctccttgaagaggtccttcacatcccttgtaagttggattcctaggtattttattctctttgaagcaattgtgaatgggagttcactcatgatttgcctctctgtttgtctgttatttgtgtttaagaatgcttgcgatttttgcacattgattttgtatcctgagactttgctgaagttgcttatcagcttaagaagattttgggctgagacgatggggttttctagatatacaatcatgtcatctgcaaacagggacaatttgacttcctcttttcctaattgaataccatttgtttcctgctcctgtctgattgctctggccacaacttccaacactatgttgaataggagtggtgagagagggcatccctgtcttgtgccagttttcaaatggaatgcttccagttttttgccgattcagtgtgatactggctgtgggtttgtcatagatagctcttattattttgagataacgtcccatcaatacctaatttgttgagagtttttagcatgaagggttgttgaattttgtcaaaggccttttctgcatctattgagataatcatgtggtttttgtcgttggttctgtttatatgctggattacatttattgatttgcatatgttgaaccagccttgcatcccagggatgaagcccacttgatcatggtggataagcttcttgatgtactgctggatttggtttgccagtattttattgaggatttttgcattgatgttcaccagggatattggtctaaaattctcttttttggttgtgtctctgtccggctgtggtatcaggatgatgctggcctcctaaaataaattagggaggattgcctctttttctattgactggaatagtttcagaaggaatggtaccagttcctccttgtacctctggtagaatttggctgtgaatccttctggtcctggactgtttttggttggtaagctattaattattgcctcaatttcagggtctgttattggtctattcagagattcaacttcttcctagtttagtcttgggagggtgtgtgtgttgaggaatttatccatttcttctagattttctagtttatttgcatagaagtgtttatagtattctctgatggtagtttgtatttctgtgggatcggtggtgatatcccctttatcattttttattgtgtctatttgattcttctctcttttcttctttattagtcttgctagagttctaccaattttgttgatcttttcaaataaccagctcctggatttaatgattttttgaagagttttttgtgtctctatttccttgagttctgctctgatcttagttatttcttgccttctgctagcttttgaatatgtttgctcttgcttctctagttcttttaattgtgacattagggtgtcaattttagatctttcctgctttctcttgtggacatttagtgctataaatttccctctacacactgctttgaatgtgtcccagagattctggtatgttgtgtctttgttctcgttggtttcaaagaacatctttatttctgccttcatttcgttatgtacccagtagtcattcaggagcaggttgttcagtttccatgtagttgagaggttttgagtgagtttcttaatcctgagttctagtttgattgcactgtggtctgagagacagtttgttataatttctgttcttttacatttgctgaggagtgttttacttccaattatgtggtcaattttggaataggtgtggtgtggtgctgaaaagaatgtatattctgttgatttggggtggagagttctgtagatgtctattaggtccgcttggtgcagaacttagttcaattcctggatatctttgttaactttctgtctcgttgatctgtctaatgttgacagtggggtggtaaagtctcccattattattgtgtgggagtctaagtctctttgtaggtttctaaggacttgctttatgaatctgcgtgctcttgtattgggtgcatatatatttaggatagttagctcttcttgttgaattgatccctttaccattatgtaatggccttctttgtctctttttatctttgttgttttaaagtctgttttatcagagactaggattgcaacccctgcctttttttgttttccatttgcttggtagatcttcctccatccctttattgtgagcctgtgtgtgtctctgcatttgagatgggtttcctgaatacagcacactgatgggtcttgactgtttatccaatttcccagtctgtgtcttttaactggagcatttagcccatttacatttcaggttaatattgttatctttgaatttgatcctgtcattatgatgttagctggttattttgctcattagtttatgccgtttcttcatagcatcgatggtctttacaattaggcatgtttttgcagtggctggtaccggttgttcctttccacatttagtgcttccttcaggagctcttttagggcaggcctggtggtgacaaaatctctcagcatttgcttgtctgtaaaggatttttatttctccttcacttatgaagcttagtttggctggatacgaaattctgtgttgaaaattcttttcttttagaatgttgaatattggcccccactctcttctggcttgtagagtttctgctgagagatcagctgttagtctgatgggcttccctttgtgggtaacctgacctttctctgtggctgcccttaacattttttccttatttccactttggtgaatctgacaattatgtgtcttggagttgctcttctcgaggactatctttgtggcattctctgtatttcctgaatttgaatgttggcctgccttgctagattggggaagttctcctggaaaatatcctgctgagtgttttccaacttggttcctttctccccatcactttcaggtacaccaatcagacatagatttggtcttttcacatagtcccatatttcttggaggcgttgttcatttctttttgttcttttatctctaaacttctcttctcacttcatttcattcatttgatcttccatcactgataccctttcttccagttgatcgaattggctactgaggcttgtgcattcatcacgtagttctcttgtcatggttttcagctccgtcaggtcctttaaggacttctctgcagtggttttctagttagacgttcatctaatttttttttcaaggtttttaacttctttgccatgggtgcaaacttcctcctttagctcaagtagtttgatcatctgcagtcttcttctgtcaacttgttaaagtcatctccatccagctttgttccattgctggtgaggagctgtgctcctttggaggaggagaggcactctgctttttagagtttccagtttttctgctctgttttttccccatctttgtggttttatctacctttggtctttgatgatggtgacatacagatgaggttttggtgtggatgtcctatctgtttgttagttttccttctaacagtcaggaaccccagctgcaggtctgttggagtttgctggaggtccactccagaccctgtttgcctgggtatcagcagtggaggctgcagaacagcagatattggtgaacagcaaatgttgctgcctgattgttcctctggaagttttgtctcagaggagtacctggccgtgtgaggtgtcagtctgcccctactggggggtgcctcccagttaggctactcgggggtcagggacccacttgaggaggcagtctgtccattatcagatctcaagctgcatgctgggagaaccattactctcttcaaagttgtcagacagggacatttaaatctgcagaggtttctgctgccttttgtttggctatgccctgcccccagaggtggagtctacagaggcaggcaggcctccttgag

SEQ ID NO: 10374 - DNA, 6054 bp, Homo sapiens
ttgtaaagatttatttttttattttttttattattatactttaagttttagggtacatgtgcacattgtgcaggttagttacatacgtatacatgtgccatgctggtgtgctgcacccactaactcgtcatctagcattaagtatatctcccaatgctatccctcccccctccccccaccccacagcagtccccagagtgtgatgttccccttcctgtgtccatgtgatctcattgttcaattcccacctatgagtgagaatatgcggtgtttggttttttgttcttgcaatagtttactgagaatgatgatttccaatttcatccatgtccctacaaaggacatgaactcatcattttttatggccgcatagtattccatggtgcatatgtgccacattttcttaatccagtctatcgttgttggacatttgggttggttccaagtctttgctattgtgaataatgccgcaataaacatacatgtgcatgtgtctttatagcagcatgatttatagtcctttgggtatatacccagtaatgggatggctgggtcaaatggtatttctagttctagatccctgaggaatcgccacactgacttccacaatggttgaactagtttacagtcccaccaacagtgtaaaagtgttcctatttctccacatcctctccagcacctgttgtttcctgacttttgaatgattgccattctacctggtgtgagatggtatctcattgtggttttgatttgcgtttctctgatggccagtgatggtgagcattttttcatgtgttttttggctgcataaatgtcttcttttgagaagtgtctgttcatgtccttcgcccactttttgatggggttatttgtttttttcttgtaaatttgtttgagttcattgtagattctggatattagccatttgtcagatgagtaggttgcgaaaattttctcccattttctaggttgcctgttcactctgatggtagtttcttttgctgtgcagaagctctttagtttaattagatcccatttatcaattttggcttttgttgccattgcttttggtgttttagacgtgaagtccttgcccatgcctgtgtcctgaatggtaatgcctaggttttcttctagggtttttatggttttaggtctaacatgtaagtctttaatccatcttgaattaatttttgtataaggtgtaaggaagggatccagtttcagctttctaaatatggctagccagttttcccagaaccgtttattaaatagggaatcctttccccattgcttgtttttctcaggtttgtcaaagatcagatagttgtagatatgcggcgttatttctgagggctctgttctgttccattgatctatatctctgttttggtaccagtaccatgctgttttggttactgtagccttgtagtatagtttgaagtcaggtagcgtgatgcctccagctttgttcttttggcttaggtttgacttggtgatgcaggctcttttttggttccatatgaactttaaagtagttttttccaattctgtgaagaaagtcatgggtagcttgatggggatggcattgaatctttaaattaccttgggcaatatggccattttcacgatattgattcttcctacccatgagcatggaatgttcttccatttgtttgtatcctcttttatttcattgagcagtggtttgcagttctccttgaagaagtccttcatgtcgcttgtaagttggattcctaggtgttttattctctttgaagcaattgtgaatgggagttcactcatgatttggctctctgtttgtctgttgttggtgtataagaatgcttgtgatttttgtacattgattttgtatcctgagactttgctgaagttgcttatcagcttaaggagattttgggctgagacaatggggttttctagatatacaatcatgtagtctgcaaacagggacaatttgacttcctcttttcctaattgaataccctttatttccttctcctgcctaattgccctggccagaacttccaacactatgttaaataggagtggtgagagagagcatccctgtcttgtgccagttttcaaagggaatgcttccagtttttgcccattcagtatgatattggctgtgggtttgtcatagatagctcttattattttgaaatatgtcccatcaatacctaatttattgagagtttttagcatgtagggttgttgaattttgtcaaaggccttttctgcatctattgagataatcatgtggtttttgtctttggctctgtttatatgctggattacatttactgatttgtgtatattgaaccagccttgcatcccagggatgaagcccacttgatcatggtggataagctttttgatgtgctgctggatttggtttgccagtattttattgaggatttttgcatcaatgttcatcaaggatattggtctaaaattctcttttttggttgtgtctctgcccggctttggtattagaatgatgctggcctcataaaatgagttagggaggattccctctttttctattgattggaatagtttcagaaggaatggtaccagttcctccttgtacctctggtagaatttggctgtgaatccatctggtcctggactctttttgttggtaagctattgattattgccacaatttcagatcctgttattggtctattcagagattcaacttcttcctggtttagtcttgggagggtgtatgtgtcaaggaatttatccatttcttctagattttctagtttatttgcatagaggtgtttgtagtattctctgatggtagtttgtatttctgtgggatcgttggtgatatcccctttatcattttttattgcatctatttgattcttctctctttttttctttattagtcttgctagcggtctatcaattttgttgatcctttcaaaaaaccagctcctggattcattaattttttgaagggttttttgtgtctctatttccttcagttctgctctgattttagttatttcttaccttctgctagcttttgaatgtgtttgctcttgcttttctagttcttttacttgtgatgttagggtgtcaattttggatctttcctgctttctcttgtgggcatttagtgctataaatttccctctacacactgctttgaatgcgtcccagagattctggtatgttgtgtctttgttctcgttggtttcaaagaacatctttatttctgccttcatttcattatgtacccagtagtcattcaggagcaggttgttcggtttccatgtagttgagcggttttgagtgagattcttaatcctgagttctaatttgattgcactgtggtctgagagatagtttgttataatttctgttcttttacatttgctgaggaaagctttacttccaagtaaatggtcaattttggaataggtgtggtgtggtgctgaaaaaaatgtatattctgttgatttggagtggagagttctgtagatgtctattaggtctgcttggtgcagagctgagttcaattcctgggtatccttgttgactttctgtctcgttgatctgtctaatgttgacagtggggtgttaaagtctcccattattaatgtgtggaagtctaagtctctttgtaggtcactcaggacttgctttatgaatctgggtgctcctgcaggtgcatatatatttaggatagttagctcttcttgttgaattgatccctttaccattatgtaatggccttctttgtctcttttgatctttgttggtttaaagtctgttttatcagagaccaggattgcaacccctgcctttttttgttttccatttgcttggtagatcttcctccatccttttattttgagcctatgtgtgtctctgcatgtgagatgggtttcctgaatacagcacactgatgggtgttgactctttatccaatttgccagtctgtgtcttttaattggagcatttagtccatttacatttaaagttaatagtgttatgtgtgaatttgatcctgtcattttgatgttagctggttattttgctcgttagttgatgcagtttcttcctagtctcgatggtctttacattttggcatgattttgcagcggctggtaccggttgttcctttccatgtttagcgcttccttcaggagctcttttagggcaggcctggtggtgacaaaatctctcagcatttgcttgtctgtaaaggattttatttctccttcacttatgaagcttagtttggctggatatgaaattctgggttgagaattcttttctttaagaatgttgaatattggcccccactctcttctggcttgtagggtttctgccgagagatctgctgttagtctgatgggcttccctttgagggtaacccgacctttctctctggctgcccttaacattttttccttcatttcaactttggtgaatctgacaattatgtgtcttggagttgctcttctcgaggagtatctttgtggcgttctgtgtatttcctgaatctgaacgttggcctgccttgctagattggggaaattctcctggataatatcctgcagagtgttttccaacttggttccattctccccatcactttcaggtacaccagtcagacgtagacttggtctattcacatagtcccatatttcttggaggctttgctcgtttctttttattcttttttctctaaactttccttctcacttcatttcattcatttcatcttccattgctgataccctttcttccagttgatcgcatcagctcctgaggcttctgcattcttcaggtagttcttgagccttggttttcagctccatcagctcctttaagcacttctctgtattggttattctagttatacattcttctaaattttttttaaagttttcaacttctttgcctttggtttgaatgtcctcccgtagctcagagtaatttgatcgtctgaagccttcttctctcagctcgtcaaagtcattctccatccagctttgttctgttgctggtgaggagctgcgttcctttagaggaggagaggcgctctgatttttagagtttccagtttttctgttctgttttttccccatctttgtggttttatctacttttggtctttgatgatggtgatgtacagatgggtttttggtgtggatgtcctttctgtttgttagttttccttctaacagacaggaccctcagctgcaggtctgttggagtaccctgcagtgtgaggtgtcagcctgcccctgctggagcctcccagttaggctgctcgggggtcaggggtcagagacccacttgaggaggcagtctgccagttctcagatctccagctgcgtgctgggagaaccactgctctcttgaaagctgtcagacagggacatttaagtctgcagaggttactgctgtctttttgtttgtctgtgccctgccctgcccccagagttggagcctacagaagcacgcaggcctccttgagctgtggtgggctccacccagttggagcttcccggctgctttgtttacctaagcaagcctggacaatggtgggcgcccctcccccagcctcgccgctgccttgcagtttgatctcagactgctgtgctagcaatcagcgagactccgtggggtaggaccctcccagccaggtgcgggatataatctcgtggtgtgctgttttttaagcccgtcggaaaagcgcagtattcgggtgggagtgacccgattctccaggtgccatccgtcacccctttctttgattaggaaagggaactccctgaccccttgcacttcccgagtgaggcaatgcctcgccctgcttcggcttgtgcacggtgcgcgcacccactgacctgcgcctactgtctggcactccctagtgagatgaacccagtacctcagatggaaatgcagaaatcacctgtcttctgcgtcgctcaggctgggagctgtagaccggagctgttcctattcggccatcttggctcctcctgttgtaaa

SEQ ID NO: 10375 - DNA, 7918 bp, Homo sapiens
ttttttttttttttttgagacggagtctcgctctgtcacccaggctggagggcagtggctcgatcttggctcactgcaagctctgcctcccaggttcatgccattctcctgcttcagcctcccaagtagctgggactacaggtgcccgccaccacccccggctaattttttgtatttttagtagagacagggtttcaccgtgttagccaggatggtctcgatctcctgacctcgtgatccgcccgcctcggcctcccaaagtgctgggattacaggcgtgagccactgcgcccagccagtaatatcttaagagtgtagcccatactttatcttggtactatatctaccacataatagttctcaatagatacgctgagtaaaagaatgaaggaattaaaatgaattaaacgttaaatacgtgtttcccaagaataaactgttttaaagtccatcatgagtcagaaactgaattggcagcagcaactatcagataaactatctgattgctggcacctgctctgtgcagaagggaaaaggaaactatcaatcaatgtcattgcaacctatcattattcttcacagcttcctttttttgagatggagtctcgctctgtcgcccagactgcagtgcagtggtgtgatcttggctcactgcaacctccgcctaccgggttcaagtggttctcctgcttcagcctccctagtagctgggactacaggcacatgccaccacacctggctaattgttttttgtatttttagtagagatggggtttcaccatgttagccaggatggtctcaatctcctgacctcatgatctgcccgccttggcctcccaaagtgctgggattacaggcatgagttaccttgcctggcccacagtttctttttaaacaaccctacgccttcttttccccaaaaaatgcaaaatgaaaaaaaattaaacttgcatttattcaatcatcaaacatccactgagcctttattctgtgtcatccttggacacacaactaagaacatgaataatttggaaaccttaacatcatattggaggatatttgtcctttgtgaacctgtggcccagtcctcaccttctgtaacacagctttaatacttctataaagtataacaaactatgtttttttatttttacatgctaattttcacacatttctccaaaattcacatagactttcgctaggttgtaatcagaaggcaaaaaaacaccaagtctcactggcttgcaacaacagttaattctcactcacattacaaacgggcaacctcaagtcagctgcaggctttgtctacagacctcatttcaggacccaggctgaaaaagcagctccagtttgagacatgcctttctcttttggcaacagaaaagagcaagagagttggtagaaacagacaatgactcttcaagcatctgctgagacttgctgaacatcatgtttgctcatatgcactggccaaagtaagtcaaacgcttcctattcctgctccaccatgaaggatttgctacaagtcttgggcaaaggacagagatacacaacttcttacaggagggagtttaaatattggagacgccagggtacacaactcattactttgggagggaatagactaacataaagggagaacattccacatttttagcacttttgtatttaaacgtagcttttaaaaaaaaacaaatgtttattaagcaccccttttgttccagacacttttctgggtgcttgttatgtactaatgaacaaaacagaaaaaaaaaattctctacctttatggagcttacccactaaactattaaaataaaataagcctaataaagaagttaatagtacagtgagatgctcttttcccctcttttttttaatattttattttttattattatactttaagttttagggtacatgtgcacattgtgcaggttagttacatacgtatacatgtgccatgctggtgcgctgcacccactaactcgtcatctagcattaggtatatctcccaatgctatccctcccccctccccccaatccacaacagtccccagagtgtgatgttccccttcctgtgtccatgtgatctcattgttcaattcccacctaggagtgagaatatgcggtgtttggttttttgttcttgagatagtttactgagaatgatgatttccaatttcatccatgtccctaaaaaggacatgaactcatcattttttatggttgcatagtattccatggtgtatatgtgccacattttcttaatgcagtctatcattgttggacatttgggttggttccaagtctttgctattgtgaataatgccgcaataaacatacgtgtgcatgtgtctttatagcagcatgatttataatcctttgggtatataaccagtaatgggatggctgggtcaaatggtatttctagttctagatccctgaggaatcaccatactgtcttccgcaatggttgaactagtttacagtccctccaacagtgtaaaagtgttcctatttctccacatcctctccagcacctgttgtttcctgactttttaatgattgccattctaactggtgggagatggtatctcattgtggttttgatttgcatttctctgatggccagtgatggtgagcattttttcatgtgttttttggctgcataaatgtcttcttttgagaagtgtctgttcatgtcctttgcccactttttgatggggttgtttgtttttttcttgtaaatttgtttgagttcattgtagattctggatattagccctttgtcagatgagtaggttgcaaaaattttctcccattttgtaggttgcctgttcactctgatggtagtttcttttgctgtgcagaagctctttagtttcattagatcccatttgtcaattttgggttttgttgccattgcttttggtgttttagacatgaagtccttgcccatgcctatgtcctgaatggtaatgcctaggttttcttctagggtttttatggttttaggtctaacgtttaagtctttaatccatcttgaattgatttttgtataaggtgtaaggaagggatccagtttcagctttctacatatggctagccagttttcccagcaccatttattaaataaggaatcctttccccattgcttgtttttctcaggtttgtcaaagatcagatagttgtagatatgcggcattatttctgagggctctgttctgttccattgatctatatctctgttttggtaccagtaccatgctattttggttactgtagccttgtagtatagtttgaagtcaggtagtgtggtgcctccagctttgttcttttggcttaggattgacttgacgatgcgggctcttttttggttccatatgaactttaaagtagttttttccaattctgtgaagaaagtcattggtagcttgatggggatggcactgaacctgtaaattaccttgggcagtatggccattttcacgatattgattcttcctacccatgagcatggaatgttcttccatttgtttgtatcctcttttatttccttcagcagtggtttgtagttctccttgaagaggtccttcacatcccttgtaagttggattcctaggtattttattctctttgaagccattgtgaatgggagttcactcatgatttggctctctgtttgtctgttgttggtgtacaggaatgcttgtgatttttgcacattgatattgtatcctgagactttgctgaagttgcttatcagcttaaggagattttgggctgagacgatggggttttctagatatacaatcatgtcgtctgcaaacagagacaatttgacttcctcttttcctaattgaataccctttatttccttctcctgcctaattgccctggccagaacttccaacactatgttgaatgggagtggtgagagagggcatccctgtcttgtgccagttttcaaagggaatgcttccagtttgtgcccattcagtatgatattggctgtgggtttgtcatagatagctcttattattttgaaatacctcccatcaatacctaatttattgagagtttttagcatgaagtgttgtttaattttgtcaaaggccttttctgcatctattgagataatcatgtggtttttgtctttggctccgtttatatgctggattacatttattgatttgcttatatggaaccagccttgcatcccagggatgaagcccacttgatcatggtggataagctttttgatgtgctgctggattcgttttgccagtattttattgaggatttttgcatcaatgttcatcaaggatattggtctaaaattctctttcttggttatgtctctgcccggctttggtttcagaatgatgctggcctcataaaatgagttagggaggattccctctttttctattgattggaatagtttcagaaggaatgataccagttcctccttgtacctctggtagaatttggctgtgaatccatctggtcctggactctttttggttggtaagctattgattattgccacaatttcagatcctgttattggtctattcagagattcaacttcttcctggtttggtcttgggagagtgtatgtgtcaaggaatttatccatttcttctagattttctagtttatttgtgtagaggtgtttgtagtattctctgatggtagtttgtatttctgtgggatcggtggtgataacccctttatcattttttattgcctctatttgattcttctctctttttttctttattagtcttgcgagtggtctatcaattttgttgatcctttcaaaaaaccagctcctggattcattaattttttgaagggttttttgtgtctctctttccttcagttctgctctgattttagttatttcttgccttctgctagcttttgaatgtgtttgctcttgcttttctagttcttttaattgtgatgttagggtgtcaattttagctctttcctgctttctcttgtgggcatttagtgctataaatttccctctacacactgctttgaatgcctcccagagattctggtatgttgtgtctttgttctcgttggtttcaaagaacatctttatttctgccttcatttcgttaggtacccagtagtcattcaggagcaggttgttcagtttccatgtagttgagcggttttgagtgagattcttaatcctgagttctagtttgattgcactgtggtctgagagatagtttgttataatttctgttcttttacatttgctgaggagagctttacttccaagtatgtggtcaattttggaataggtgtggtgtggtgctgaaaaaaaaatgtatattctgttgatttggggtggagagttctgtagatgtctattaggtccgcttggtgcagagctgagttcaattcctgggtatccttgttgactttctgtcttgttgatctgtctaatgttgacagtggggtgttaaagtctcccattattattgtgtgggagtctaagtctctttgtaggtcactcaggacttgctttatgaatctgggtgctcctgtattgggtgcatatatatttaggatagttagctcttcttgttgaattgatccctttaccattatgtaatggccttctttgtctcttttgatctttgttcgtttaaagtctgttttatcagagactaggattgcaacccctgcctttttttgttttccatttgcttggtagatcttcctccatccttttatgttgagcctatgtgtgtctctgcacatgagatgggtttcctgaatacagcacactgatgggtcttgactctttatccaatttgccagtctgtgtcttttaattggagcatttagtccatttacatttaaagttaatattgttatgtgtgaatttcatcctgtcattatgatgttagctggttattttgctcgttagttgatgcagtttcttcctagtctcgatggtctttacattttggcatgattttgcagtggctggtaccggttgttcctttccatgtttagcgcttccttcaggagctcttttagggcaggcctggtggtgacaaaatctctgagcatttgcttgtctgtaaagtattttatttctccttcacttatgaagcttagtttggctggatatgaaattctgggttgaaaattctttcctttaagaatgttgaatattggcccccactcttctggcttgcagggtttctgccgagagatccgctgttagtctgatgggcctccctttgagggtaacccgacctttctctctggctgcccttaacatttcttccttcatttcaactttggtgaatctgacaattatgtgtcttggagtttctcttctcgaggagtatctttgtggcattctctgtatttcctgaatctgaacgttggcctgccttgctagattggggaagttctcctggataatatcctgcacagtgttttccaacttggttccattctccccatcactttcaggtacaccaatcagacgtagatttggtcttttcagatagtcccatatttcttggaggctttgctcgtttctttttattcttttttctctaaacttcccttctcacttcatttcattcatttcatcttccattgctgataccctttcttcctgttgatggcatcggctcctgaggcttctgcattcttcacgtagttctcaagccttggttttcagctccatcagctcctttaagcacttctctgtattggttattctagttatacattcttctaaatttttttcaaagttttcaacttctttgcctttggtttgaatgtcctcccgtagctcatagtaatttgatcgtctgaagccttcttctctcagctcatcaaagtcattctccgtccagctttgttcagttgctggtgagaagctgcgttcctttggaggaagagaggcactctgctttttagagtttccagtttttctgttctgttttttccccatctttgtggttttatctacttttggtctttgatgatggtgatgtacagatgggtttttggtgtggatgtcctttctgtttgttagttttccttctaacagacaggaccctcagctgcaggtctgttggagtaccctgcagtgtgaggtgtcagtgtgccctgctgggggtgcctcccagttaggctgctcaggggtcaggggtcagggacccacttgaggaggcagtctgcccgttctcagatctccagctgcgtactaggagaaccactgctctcttcaaaactgtcagacagggacatttaagtctgcagaggttactgctgtctttttgtttgtctgtgccctgctgccataggtggagcctacagaggcaggcaggcctccttgagctgtggtggactccacccagttccagcttccagctgctttgtttacctaagcaagcctgggcaatggtgggcgcccctcccccagccttgctgccgccttgcagtttgatctcagactgctgtgctagcaatcagcaagactccgtgggcgtaggaccctccgagccaggtgcgggatataatctcgtggtgtgccgttttttaagcccgtcggaaaagcgcagtattggggtgggagtgacccaattttccagatgccgtccatcacccctttctttgattaggaaagggaactccctgaccccttgtgcttcccaagtgaggcaatgcctcgccctgcttcggctcgcgcacggtgcgcgcacccactaacctgcgcctactgtctggcactccctactgagatgaacccggtacctcagatggaaatgcagaaatcacccgtcttctgcgtcgctcacgctgggagctgtagaccggagctgttcctattcggccatcttggctcctcccctct

SEQ ID NO: 10376 - DNA, 6062 bp, Homo sapiens
atttcatttttatttatttttatttttttttttaattttttttttttattatactctaagttttagggtacatgtgcacattgtgcaggttagttacatatgtatacatgtgccatgctggtgcgctgcacccactaacgtgtcatctagcattaggtatatctcccaatgctatccctcccccctcccccgaccccaccacagtccccagagtgtgatattccccttcctgtgtccatgtgatctcattgttcaattcccacctatgagtgagaatatgcggtgtttggttttttgttcttgcgatagtttactgagaatgatggtttccaatttcatccatgtccctacaaaggacatgaactcatcattttttatggctgcatagtattccatggtgtatatgtgccacattttcttaatccagtctatcattgttggacatttgggttggttccaagtctttgctattgtgaatagtgccgcaataaacatacgtgtgcatgtgtctttatagcagcatgatttatagtcatttgggtatatacccagtaatgggatggctgggtcaaatggtatttctagttctagatccctgaggaatcgccacactgacttccacaatggttgaactagtttacagtcccaccaacagtgtaaaagtgttcctatttctccacatcctctccagcacctgttgtttcctgactttttaatgattgccattctaactggtgtgagatgatatctcatagtggttttgatttgcatttctctgatggccagtgatgatgagcatttcttcatgtgttttttggctgcataaatgtcttcttttgagaagtgtctgttcatgtccttcgcccactttttgatggggttgtttgtttttttcttgtaaatttgtttgagttcattgtagattctggatattagccctttgtcagatgagtaggttgcgaaaattttctcccatgttgtaggttgcctgttcactctgatggtagtttcttttgctgtgcagaagctctttagtttaattagatcccatttgtcaattttggcttttgttgccattgcttttggtgttttggacatgaagtccttgcccacgcctatgtcctcaatggtaatgcctaggttttcttctagggtttttatggttttaggtctaacgtttaaatctttaatccatcttgaattgatttttgtataaggtgtaaggaagggatccagtttcagctttctacatatggctagccagttttcccagcaccatttattaaatagggaatcctttccccattgcttgtttttctcaggtttgtcaaagatcagatagttgtagatatgcggcattatttctgagggctctgttctgttccattgatctatatctctgttttggtaccagtaccatgctgttttggttactgtagccttgtagtatagtttgaagtcaggtagtgtgatgcctccagctttgttcttttggcttaggattgacttggcgatgcgggctcttttttggttccatatgaactttaaagtagttttttccaattctgtgaagaaagtcattggtagcttgatggggatggcattgaatctgtaaattaccttgggcagtatggccattttcacgatattgattcttcctacccatgagcatggaatgttcttccatttgtttgtgtcctcttttatttccttgagcagtggtttgtagttctccttgaagaggtccttcacatcccttgtaagttggattcctaggtattttattctctttgaagcaattgtgaatgggagttcactcatgatttggctctctgtttgtctgttgttggtgtataagaatgcttgtgatttttgtacattgattttgtatcctgagactttgctgaagttgcttatcagcttaaggagattttgggctgagacgatggggttttctagataaacaatcatgtcgtctgcaaacagggacaatttgacttcctcttttcctaattgaataccctttatttccttctcctgcctgattgccctggccagaacttccaacactatgttgaataggagtggtgagagagggcatccctgtcttgtgccagttttcaaagggaatgcttgcagtttttgcccattcagtatgatattggctgtgggtttgtcatagatagctcttattattttgaaatacgtcccatcaatacctaatttattgagagtttttagcatgaagggttgttgaattttgtcaaaggctttttctgcatctattgagataatcatgtggtttttgtctttggctctgtttatatgctggattacatttattgatttgcgtatattgaaccagccttgcatcccagggatgaagcccacttgatcatggtggataagctttttgatgtgctgctggattcggtttgccagtattttattgaggatttttgcatcaatgttcatcaaggatattggtctaaaattctcttttttggttgtgtctctgcccggctttggtatcagaatgatgctggcctcataaaatgagttagggaggattccctctttttctattgattggaatagtttcagaaggaatggtaccagttcctccttgtacctctggtagaattcggctgtgaatccatctggtcctggactctttttggttggtaaactattgattattgccacaatttcagagcctgttattggtctattcagagattcaacttcttcctggtttagtcttgggagagtgtatgtgtccaggaatgtatccatttcttctagattttctagtttatttgcgtagaggtgtttgtaggattctctgatggtagtttgtatttctgtgggatcggtggtgatatcccctttatcattttttattgtgtctatttgattcttctctctttttttctttattagtcttgctagcggtctatcaattttgttgatcctttcaaaaaaccagctcctggattcattgattttttgaagggttttttgtgtctctatttccttcagttctgctctgattttagttatttcttgccttctgctagcttttgaatgtgtttgctcttgcttttctagttcttttaattgtgatgttagggtgtcaattttggatctttcctgctttctcttgtaggcatttagtgctataaatttccctctacacactgctttgaatgcgtcccagagattctggtatgtggtgtctttgttctcgttggtttcaaagaacatctttatttctgccttcatttcgttatgtacccagtagtcattcaggagcaggttgttcagtttccatgtagttgagcggctttgagtgagattcttaatcctgagttctagtttgattgcactgtggtctgagagatagtttgttataatttctgttcttttacatttgctgaggagagctttacttccaactatgtggtcaattttggaataggtgtggtgtggtgctgaaaaaaatgtatattctgttgatttggggtggagagttctgtagatgtctattaggtctgcttggtgcagagctgagttcaattcctgggtattcttgttgactttctgtctcgttgatctgtctaatgttgacagtggggtgttaaagtcttccattattaatgtgtgggagtctaagtctctttgtaggtcactcaggacttgctttatgaatctgggtgctcctgtattgggtgcataaatatttaggatagttagctcctcttgttgaattgatccctttaccattatgtaatggccttctttgtctcttttgatctttgttggtttaaagtctgttttatcagagactaggattgcaacccctgcctttttttgttttccattggcttggtagatcttcctccatccttttattttgagcctatgtgtgtctctgcacgtgagatgggtttcctgaatacagcacactgatggatcttgactctttatccaacttgccagtctgtgtcttttaattgcagaatttagtccatttatatttaaagttaatattgttatgtgtgaatttgatcctgtcattatgatgttagctggtgattttgctcattagttgatgcagtttcttcctagtctcgatggtctttacattttggcatgattttgcagcggctggtaccggttgttcctttccatgtttagcgcttccttcaggagctcttttagggcaggcctggtgatgacaaaatctctcagcatttgcttgtctataaagtattttatttctccttcacttatgaagcttagtttggctggatatgaaattctgggttgaaaattcttttctttaagaatgttgaatattggcccccactctctcctggcttgtagggtttctgccgagagatccgctgttagtctgatgggctttcctttgagggtaacccgacctttctctctggctgcccttaacattttttccttcatttcaactttggtgaatctgacaattatgtgtcttggagttgctcttctcgaggagtatctttgtggcgttctctgtatttcctgaatctgaatgttggcctgccttgctagattggggaagttctcctggataatatcctgcagagtgttttccaacttggttccattctccacatcactttcaggtacaccaatcagacgtagatttggtcttttcacatagtcccatatttcttggaggctttgctcatttctttttattcttttttctctaaacttcccttctcgcttcatttcattcatttcatcttccattgctgataccctttcttccagttgatcgcatcggctcctgaggcttctgcattcttcacgtagttctcgagccttggttttcagctccatcagctcctttaagcacttctctgtattggttattctagttatacattcttctaaatttttttcaaagttttcaacttctttgcctttggtttgaatgtcctcccgtagctcagagtaatttgatcgtctgaagccttcttctctcagctcgtcaaaatcattctccatccagctttgttccgttgctggtgaggaactgcgttcctttggaggaggagaggcgctctgcattttagagtttccagtttttctgttctgttttttccccatctttgtggttttatctacttttggtctttgatgatggtgatgtacagatgggttttcggtgtagatgtcctttctggttgttagttttccttctaacagacaggaccctcagctgcaggtctgttggaataccctgccgtgtgaggtgtcagtgtgcccctgctggggggtgcctcccagttaggctgctcgggggtcaggggtcagggacccacttgaggaggcagtctgcccgttctcagatctccagctgcgtgctgggagaaccactgctctcttcaaagctgtcagacagggacacttaagtctgcagaggttactgctgtctttttgtttgtctgtgccctgcccccagaggtggagcctacagaggcaggcaggcctccttgagctgtggtgggctccacccagttcgagcttcccggctgctttgtttacctaagcaagcctgggcaatggcgggagcccctcccccagcctcgctgccgccttgcagtttgatctcagactgctgtgctagcaatcagcgagattccgtgggcgtaggaccctctgagccaggtgtgggatatagtctcgtggtgcgccgtttcttaagccggtctgaaaagcgcaatattcgggtgggagtgacccgattttccaggtgcgtccgtcacccctttctttgactcggaaagggaactccctgaccccttgcgcttcccaggtgaggcaatgcctcgccctgcttcggctcgctcacggtgcgcgcacacactggcctgcgcccactgtctggcactccctagtgagatgaacccggtacctcagatggaaatgcagaaatcacccgtcttctgcgtcgctcacgctgggagctgtagaccggagctgttcctattcggccatcttggctccca
